United States Patent Application Publication US 2020/0163878 A1 - sequence listing, part 44

SEQ ID NO: 165132 - RNA, 1701 nt, Artificial Sequence
  derived and/or modified CDS sequence (opt4) from hemagglutinin__InfluenzaA__ADI48782
augaaggccauccugguggugcugcuguacaccuucgccaccgccaacgccgacacccugugcaucggcuaccacgccaacaacagcaccgacaccguggacaccgugcuggagaagaacgugaccgugacccacagcgugaaccugcuggaggacaagcacaacggcaagcugugcaagcugagaggcguggccccccugcaccugggcaagugcaacaucgccggcuggauccugggcaaccccgagugcgagagccugagcaccgccagcagcuggagcuacaucguggagaccagcagcagcgacaacggcaccugcuaccccggcgacuucaucgacuacgaggagcugagagagcagcugagcagcgugagcagcuucgagagauucgagaucuuccccaagaccagcagcuggcccaaccacgacagcaacaagggcgugaccgccgccugcccccacgccggcgccaagagcuucuacaagaaccugaucuggcuggugaagaagggcaacagcuaccccaagcugagcaagagcuacaucaacgacaagggcaaggaggugcuggugcuguggggcauccaccaccccagcaccagcgccgaccagcagagccuguaccagaacgccgacgccuacguguucgugggcaccagcagauacagcaagaaguucaagcccgagaucgccaucagacccaaggugagagaccaggagggcagaaugaacuacuacuggacccugguggagcccggcgacaagaucaccuucgaggccaccggcaaccugguggugcccagauacgccuucgccauggagagaaacgccggcagcggcaucaucaucagcgacacccccgugcacgacugcaacaccaccugccagacccccaagggcgccaucaacaccagccugcccuuccagaacauccaccccaucaccaucggcaagugccccaaguacgugaagagcaccaagcugagacuggccaccggccugagaaacgugcccagcauccagagcagaggccuguucggcgccaucgccggcuucaucgagggcggcuggaccggcaugguggacggcugguacggcuaccaccaccagaacgagcagggcagcggcuacgccgccgaccugaagagcacccagaacgccaucgacgagaucaccaacaaggugaacagcgugaucgagaagaugaacacccaguucaccgccgugggcaaggaguucaaccaccuggagaagagaaucgagaaccugaacaagaagguggacgacggcuuccuggacaucuggaccuacaacgccgagcugcuggugcugcuggagaacgagagaacccuggacuaccacgacagcaacgugaagaaccuguacgagaaggugagaagccagcugaagaacaacgccaaggagaucggcaacggcugcuucgaguucuaccacaagugcgacaacaccugcauggagagcgugaagaacggcaccuacgacuaccccaaguacagcgaggagagcaagcugaacagagaggagaucgacggcgugaagcuggagagcaccagaaucuaccagauccuggccaucuacagcaccguggccagcagccuggugcugguggugagccugggcgccaucagcuucuggaugugcagcaacggcagccugcagugcagaaucugcaucuga

SEQ ID NO: 165133 - RNA, 1701 nt, Artificial Sequence
  derived and/or modified CDS sequence (opt4) from hemagglutinin__InfluenzaA__ADI48792
auggaggccauccugguggugcugcuguacaccuucgccaccgccaacgccgacacccugugcaucggcuaccacgccaacaacagcaccgacaccguggacaccgugcuggagaagaacgugaccgugacccacagcgugaaccugcuggaggacaagcacaacggcaagcugugcaagcugagaggcguggccccccugcaccugggcaagugcaacaucgccggcuggauccugggcaaccccgagugcgagagccugagcaccgccagcagcuggagcuacaucguggagaccagcagcagcgacaacggcaccugcuaccccggcgacuucaucgacuacgaggagcugagagagcagcugagcagcgugagcagcuucgagagauucgagaucuuccccaagaccagcagcuggcccaaccacgacagcaacaagggcgugaccgccgccugcccccacgccggcgccaagagcuucuacaagaaccugaucuggcuggugaagaagggcaacagcuaccccaagcugagcaagagcuacaucaacgacaagggcaaggaggugcuggugcuguggggcauccaccaccccagcaccagcgccgaccagcagagccuguaccagaacgccgacgccuacaucuucgugggcagcagcagauacagcaagaaguucaagcccgagaucgccaucagacccaaggugagagaccaggagggcagaaugaacuacuacuggacccugguggagcccggcgacaagaucaccuucgaggccaccggcaaccugguggugcccagauacgccuucgccauggagagaaacgccggcagcggcaucaucaucagcgacacccccgugcacgacugcaacaccaccugccagacccccaagggcgccaucaacaccagccugcccuuccacaacauccaccccaucaccaucggcaagugccccaaguacgugaagagcaccaagcugagacuggccaccggccugagaaacgugcccagcauccagagcagaggccuguucggcgccaucgccggcuucaucgagggcggcuggaccggcaugguggacggcugguacggcuaccaccaccagaacgagcagggcagcggcuacgccgccgaccugaagagcacccagaacgccaucgacgagaucaccaacaaggugaacagcgugaucgagaagaugaacacccaguucaccgccgugggcaaggaguucaaccaccuggagaagagaaucgagaaccugaacaagaagguggacgacggcuuccuggacaucuggaccuacaacgccgagcugcuggugcugcuggagaacgagagaacccuggacuaccacgacagcaacgugaagaaccuguacgagaaggugagaagccagcugaagaacaacgccaaggagaucggcaacggcugcuucgaguucuaccacaagugcgacaacaccugcauggagagcgugaagaacggcaccuacgacuaccccaaguacagcgaggaggccaagcugaacagagaggagaucgacggcgugaagcuggagagcaccagaaucuaccagauccuggccaucuacagcaccguggccagcagccuggugcugguggugagccugggcgccaucagcuucuggaugugcagcaacggcagccugcagugcagaaucugcaucuga

SEQ ID NO: 165134 - RNA, 1701 nt, Artificial Sequence
  derived and/or modified CDS sequence (opt4) from hemagglutinin__InfluenzaA__ADI49029
auggaggccauccugguggugcugcuguacaccuucgccaccgccaacgccgacacccugugcaucggcuaccacgccaacaacagcaccgacaccguggacaccgugcuggagaagaacgugaccgugacccacagcgugaaccugcuggaggacaagcacaacggcaagcugugcaagcugagaggcguggccccccugcaccugggcaagugcaacaucgccggcuggauccugggcaaccccgagugcgagagccugagcaccgccagcagcuggagcuacaucguggagaccagcaucagcgacaacggcaccugcuaccccggcgacuucaucgacuacgaggagcugagagagcagcugagcagcgugagcagcuucgagagauucgagaucuuccccaagaccagcagcuggcccaaccacgacagcaacaagggcgugaccgccgccugcccccacgccggcgccaagagcuucuacaagaaccugaucuggcuggugaagaagggcaacagcuaccccaagcugagcaagagcuacaucaacgacaagggcaaggaggugcuggugcuguggggcauccaccaccccagcaccagcgccgaccagcagagccuguaccagaacgccgacgccuacguguucgugggcagcagcagauacagcaagaaguucaagcccgagaucgccaucagacccaaggugagagaccaggagggcagaaugaacuacuacuggacccugguggagcccggcgacaagaucaccuucgaggccaccggcaaccugguggugcccagauacgccuucgccauggagagaaacgccggcagcggcaucaucaucagcgacacccccgugcacgacugcaacaccaccugccagacccccaagggcgccaucaacaccagccugcccuuccacaacauccaccccaucaccaucggcaagugccccaaguacgugaagagcaccaagcugagacuggccaccggccugaagaacgugcccagcauccagagcagaggccuguucggcgccaucgccggcuucaucgagggcggcuggaccggcaugguggacggcugguacggcuaccaccaccagaacgagcagggcagcggcuacgccgccgaccugaagagcacccagaacgccaucgacgagaucaccaacaaggugaacagcgugaucgagaagaugaacacccaguucaccgccgugggcaaggaguucaaccaccuggagaagagaaucgagaaccugaacaagaagguggacgacggcuuccuggacaucuggaccuacaacgccgagcugcuggugcugcuggagaacgagagaacccuggacuaccacgacagcaacgugaagaaccuguacgagaaggugagaagccagcugaagaacaacgccaaggagaucggcaacggcugcuucgaguucuaccacaagugcgacaacaccugcauggagagcgugaagaacggcaccuacgacuaccccaaguacagcgaggaggccaagcugaacagagaggagaucgacggcgugaagcuggagagcaccagaaucuaccagauccuggccaucuacagcaccguggccagcagccuggugcugguggugagccugggcgccaucagcuucuggaugugcagcaacggcagccugcagugcagaaucugcaucuga

SEQ ID NO: 165135 - RNA, 1701 nt, Artificial Sequence; identical to SEQ ID NO: 162971
  derived and/or modified CDS sequence (opt4) from hemagglutinin__InfluenzaA__ADI49240

SEQ ID NO: 165136 - RNA, 1701 nt, Artificial Sequence; identical to SEQ ID NO: 162971
  derived and/or modified CDS sequence (opt4) from hemagglutinin__InfluenzaA__ADI49260

SEQ ID NO: 165137 - RNA, 1701 nt, Artificial Sequence
  derived and/or modified CDS sequence (opt4) from hemagglutinin__InfluenzaA__ADI49270
augaaggccauccugguggugcugcuguacaccuucgccaccgccaacgccgacacccugugcaucggcuaccacgccaacaacagcaccgacaccguggacaccgugcuggagaagaacgugaccgugacccacagcgugaaccugcuggaggacaagcacaacggcaagcugugcaagcugagaggcguggccccccugcaccugggcaagugcaacaucgccggcuggauccugggcaaccccgagugcgagagccugagcaccgccagcagcuggagcuacaucguggagaccagcagcagcgacaacggcaccugcuaccccggcgacuucaucgacuacgaggagcugagagagcagcugagcagcgugagcagcuucgagagauucgagaucuuccccaagaccagcagcuggcccaaccacgacagcaacaagggcgugaccgccgccugcccccacgccggcgccaagagcuucuacaagaaccugaucuggcuggugaagaagggcaacagcuaccccaagcugagcaagagcuacaucaacgacaagggcaaggaggugcuggugcuguggggcauccaccaccccagcaccagcgccgaccagcagagccuguaccagaacgccgacgccuacguguucgugggcaccagcagauacagcaagaaguucaagcccgagaucgccaucagacccaaggugagagaccaggagggcagaaugaacuacuacuggacccugguggagcccggcgacaagaucaccuucgaggccaccggcaaccugguggugcccagauacgccuucgccauggagagaaacgccggcagcggcaucaucaucagcgacacccccgugcacgacugcaacaccaccugccagacccccaagggcgccaucaacaccagccugcccuuccagaacauccaccccaucaccaucggcaagugccccaaguacgugaagagcaccaagcugagacuggccaccggccugagaaacgugcccagcauccagagcagaggccuguucggcgccaucgccggcuucaucgagggcggcuggaccggcaugguggacggcugguacggcuaccaccaccagaacgagcagggcagcggcuacgccgccgaccugaagagcacccagaacgccaucgacgagaucaccaacaaggugaacagcgugaucgagaagaugaacacccaguucaccgccgugggcaaggaguucaaccaccuggagaagagaaucgagaaccugaacaagaagguggacgacggcuuccuggacaucuggaccuacaacgccgagcugcuggugcugcuggagaacgagagaacccuggacuaccacgacagcaacgugaagaaccuguacgagaaggugagaagccagcugaagaacaacgccagagagaucggcaacggcugcuucgaguucuaccacaagugcgacaacaccugcauggagagcgugaagaacggcaccuacgacuaccccaaguacagcgaggaggccaagcugaacagagaggagaucgacggcgugaagcuggagagcaccagaaucuaccagauccuggccaucuacagcaccguggccagcagccuggugcugguggugagccugggcgccaucagcuucuggaugugcagcaacggcagccugcagugcagaaucugcaucuga

SEQ ID NO: 165138 - RNA, 1701 nt, Artificial Sequence; identical to SEQ ID NO: 162971
  derived and/or modified CDS sequence (opt4) from hemagglutinin__InfluenzaA__ADI49280

SEQ ID NO: 165139 - RNA, 1701 nt, Artificial Sequence; identical to SEQ ID NO: 162971
  derived and/or modified CDS sequence (opt4) from hemagglutinin__InfluenzaA__ADI49312

SEQ ID NO: 165140 - RNA, 1701 nt, Artificial Sequence; identical to SEQ ID NO: 162971
  derived and/or modified CDS sequence (opt4) from hemagglutinin__InfluenzaA__ADI49322

SEQ ID NO: 165141 - RNA, 1701 nt, Artificial Sequence; identical to SEQ ID NO: 162971
  derived and/or modified CDS sequence (opt4) from hemagglutinin__InfluenzaA__ADI49332

SEQ ID NO: 165142 - RNA, 1701 nt, Artificial Sequence; identical to SEQ ID NO: 163298
  derived and/or modified CDS sequence (opt4) from hemagglutinin__InfluenzaA__ADI49342

SEQ ID NO: 165143 - RNA, 1701 nt, Artificial Sequence; identical to SEQ ID NO: 162971
  derived and/or modified CDS sequence (opt4) from hemagglutinin__InfluenzaA__ADI49352

SEQ ID NO: 165144 - RNA, 1701 nt, Artificial Sequence; identical to SEQ ID NO: 162729
  derived and/or modified CDS sequence (opt4) from hemagglutinin__InfluenzaA__ADI49362

SEQ ID NO: 165145 - RNA, 1701 nt, Artificial Sequence; identical to SEQ ID NO: 164281
  derived and/or modified CDS sequence (opt4) from hemagglutinin__InfluenzaA__ADI49382

SEQ ID NO: 165146 - RNA, 1701 nt, Artificial Sequence; identical to SEQ ID NO: 163082
  derived and/or modified CDS sequence (opt4) from hemagglutinin__InfluenzaA__ADI49392

SEQ ID NO: 165147 - RNA, 1701 nt, Artificial Sequence; identical to SEQ ID NO: 162716
  derived and/or modified CDS sequence (opt4) from hemagglutinin__InfluenzaA__ADI49717

SEQ ID NO: 165148 - RNA, 1701 nt, Artificial Sequence
  derived and/or modified CDS sequence (opt4) from hemagglutinin__InfluenzaA__ADI49727
augaaggccauccugguggugcugcuguacaccuucgccaccgccaacgccgacacccugugcaucggcuaccacgccaacaacagcaccgacaccguggacaccgugcuggagaagaacgugaccgugacccacagcgugaaccugcuggaggacaagcacaacggcaagcugugcaagcugagaggcguggccccccugcaccugggcaagugcaacaucgccggcuggauccugggcaaccccgagugcgagagccugagcaccgccagcagcuggagcuacaucguggagaccagcagcagcgacaacggcaccugcuaccccggcgacuucaucgacuacgaggagcugagagagcagcugagcagcgugagcagcuucgagagauucgagaucuuccccaagaccagcagcuggcccaaccacgacagcaacaagggcgugaccgccgccugcccccacgccggcgccaagagcuucuacaagaaccugaucuggcuggugaagaagggcaacagcuaccccaagcugagcaagagcuacaucaacgacaagggcaaggaggugcuggugcuguggggcauccaccaccccagcaccagcgccgaccagcagagccuguaccagaacgccgacgccuacguguucgugggcagcagcagauacagcaagaaguucaagcccgagaucgccaucagacccaaggugagagaccaggagggcagaaugaacuacuacuggacccugguggagcccggcgacaagaucaccuucgaggccaccggcaaccugguggugcccagauacgccuucgccauggagagaaacgccggcagcggcaucaucaucagcgacacccccgugcacgacugcaacaccaccugccagacccccaagggcgccaucaacaccagccugcccuuccagaacauccaccccaucaccaucggcaagugccccaaguacgugaagagcaccaagcugagacuggccaccggccugagaaacgugcccagcauccagagcagaggccuguucggcgccaucgccggcuucaucgagggcggcuggaccggcaugguggacggcugguacggcuaccaccaccagaacgagcagggcagcggcuacgccgccgaccugaagagcacccagaacgccaucgacgagaucaccaacaaggugaacagcaucaucgagaagaugaacacccaguucaccgccgugggcaaggaguucaaccaccuggagaagagaaucgagaaccugaacaagaagguggacgacggcuuccuggacaucuggaccuacaacgccgagcugcuggugcugcuggagaacgagagaacccuggacuaccacgacagcaacgugaagaaccuguacgagaaggugagaagccagcugaagaacaacgccaaggagaucggcaacggcugcuucgaguucuaccacaagugcgacaacaccugcauggagagcgugaagaacggcaccuacgacuaccccaaguacagcgaggaggccaagcugaacagagaggagaucgacggcgugaagcuggagagcaccagaaucuaccagauccuggccaucuacagcaccguggccagcagccuggugcugguggugagccugggcgccaucagcuucuggaugugcagcaacggcagccugcagugcagaaucugcaucuga

SEQ ID NO: 165149 - RNA, 1701 nt, Artificial Sequence; identical to SEQ ID NO: 162716
  derived and/or modified CDS sequence (opt4) from hemagglutinin__InfluenzaA__ADI49737

SEQ ID NO: 165150 - RNA, 1701 nt, Artificial Sequence; identical to SEQ ID NO: 162716
  derived and/or modified CDS sequence (opt4) from hemagglutinin__InfluenzaA__ADI49747

SEQ ID NO: 165151 - RNA, 1701 nt, Artificial Sequence; identical to SEQ ID NO: 162716
  derived and/or modified CDS sequence (opt4) from hemagglutinin__InfluenzaA__ADI49757

SEQ ID NO: 165152 - RNA, 1701 nt, Artificial Sequence; identical to SEQ ID NO: 162716
  derived and/or modified CDS sequence (opt4) from hemagglutinin__InfluenzaA__ADI49767

SEQ ID NO: 165153 - RNA, 1701 nt, Artificial Sequence
  derived and/or modified CDS sequence (opt4) from hemagglutinin__InfluenzaA__ADI49777
augaaggccauccugguggugcugcuguacaccuucgccaccgccaacgccgacacccugugcaucggcuaccacgccaacaacagcaccgacaccguggacaccgugcuggagaagaacgugaccgugacccacagcgugaacauccuggaggacaagcacaacggcaagcugugcaagcugagaggcguggccccccugcaccugggcaagugcaacaucgccggcuggauccugggcaaccccgagugcgagagccugagcaccgccagcagcuggagcuacaucguggagaccagcagcagcgacaacggcaccugcuaccccggcgacuucaucgacuacgaggagcugagagagcagcugagcagcgugagcagcuucgagagauucgagaucuuccccaagaccagcagcuggcccaaccacgacagcaacaagggcgugaccgccgccugcccccacgccggcgccaagagcuucuacaagaaccugaucuggcuggugaagaagggcaacagcuaccccaagcugagcaagagcuacaucaacgacaagggcaaggaggugcuggugcuguggggcauccaccaccccagcaccagcaccgaccagcagagccuguaccagaacgccgacgccuacguguucgugggcagcagcagauacagcaagaaguucaagcccgagaucgccaucagacccaaggugagagaccaggagggcagaaugaacuacuacuggacccugguggagcccggcgacaagaucaccuucgaggccaccggcaaccugguggugcccagauacgccuucgccauggagagaaacgccggcagcggcaucaucaucagcgacacccccgugcacgacugcaacaccaccugccagacccccaagggcgccaucaacaccagccugcccuuccagaacauccaccccaucaccaucggcaagugccccaaguacgugaagagcaccaagcugagacuggccaccggccugagaaacgugcccagcauccagagcagaggccuguucggcgccaucgccggcuucaucgagggcggcuggaccggcaugguggacggcugguacggcuaccaccaccagaacgagcagggcagcggcuacgccgccgaccugaagagcacccagaacgccaucgacgagaucaccaacaaggugaacagcgugaucgagaagaugaacacccaguucaccgccgugggcaaggaguucaaccaccuggagaagagaaucgagaaccugaacaagaagguggacgacggcuuccuggacaucuggaccuacaacgccgagcugcuggugcugcuggagaacgagagaacccuggacuaccacgacagcaacgugaagaaccuguacgagaaggugagaagccagcugaagaacaacgccaaggagaucggcaacggcugcuucgaguucuaccacaagugcgacaacaccugcauggagagcgugaagaacggcaccuacgacuaccccaaguacagcgaggaggccaagcugaacagagaggagaucgacggcgugaagcuggagagcaccagaaucuaccagauccuggccaucuacagcaccguggccagcagccuggugcugguggugagccugggcgccaucagcuucuggaugugcagcaacggcagccugcagugcagaaucugcaucuga

SEQ ID NO: 165154 - RNA, 1701 nt, Artificial Sequence
  derived and/or modified CDS sequence (opt4) from hemagglutinin__InfluenzaA__ADI49787
augaaggccauccugguggugcugcuguacaccuucgccaccgccaacgccgacacccugugcaucggcuaccacgccaacaacagcaccgacaccguggacaccgugcuggagaagaacgugaccgugacccacagcgugaaccugcuggaggacaagcacaacggcaagcugugcaagcugagaggcguggccccccugcaccugggcaagugcaacaucgccggcuggauccugggcaaccccgagugcgagagcaucagcaccgccagcagcuggagcuacaucguggagaccagcagcagcgacaacggcaccugcuaccccggcgacuucaucgacuacgaggagcugagagagcagcugagcagcgugagcagcuucgagagauucgagaucuuccccaagaccagcagcuggcccaaccacgacagcaacaagggcgugaccgccgccugcccccacgccggcgccaagagcuucuacaagaaccugaucuggcuggugaagaagggcaacagcuaccccaagcugagcaagagcuacaucaacgacaagggcaaggaggugcuggugcuguggggcauccaccaccccagcaccagcgccgaccagcagagccuguaccagaacgccgacgccuacguguucgugggcagcagcagauacagcaagaaguucaagcccgagaucgccaucagacccaaggugagagaccaggagggcagaaugaacuacuacuggacccugguggagcccggcgacaagaucaccuucgaggccaccggcaaccugguggugcccagauacgccuucgccauggagagaaacgccggcagcggcaucaucaucagcgacacccccgugcacgacugcaacaccaccugccagacccccaagggcgccaucaacaccagccugcccuuccagaacauccaccccaucaccaucggcaagugccccaaguacgugaagagcaccaagcugagacuggccaccggccugagaaacgugcccagcauccagagcagaggccuguucggcgccaucgccggcuucaucgagggcggcuggaccggcaugguggacggcugguacggcuaccaccaccagaacgagcagggcagcggcuacgccgccgaccugaagagcacccagaacgccaucgacgagaucaccaacaaggugaacagcgugaucgagaagaugaacacccaguucaccgccgugggcaaggaguucaaccaccuggagaagagaaucgagaaccugaacaagaagguggacgacggcuuccuggacaucuggaccuacaacgccgagcugcuggugcugcuggagaacgagagaacccuggacuaccacgacagcaacgugaagaaccuguacgagaaggugagaagccagcugaagaacaacgccaaggagaucggcaacggcugcuucgaguucuaccacaagugcgacaacaccugcauggagagcgugaagaacggcaccuacgacuaccccaaguacagcgaggaggccaagcugaacagagaggagaucgacggcgugaagcuggagagcaccagaaucuaccagauccuggccaucuacagcaccguggccagcagccuggugcugguggugagccugggcgccaucagcuucuggaugugcagcaacggcagccugcagugcagaaucugcaucuga

SEQ ID NO: 165155 - RNA, 1701 nt, Artificial Sequence; identical to SEQ ID NO: 164064
  derived and/or modified CDS sequence (opt4) from hemagglutinin__InfluenzaA__ADI49822

SEQ ID NO: 165156 - RNA, 1701 nt, Artificial Sequence
  derived and/or modified CDS sequence (opt4) from hemagglutinin__InfluenzaA__ADI50027
augaaggccauccugguggugcugcuguacaccuucgccaccgccaacgccgacacccugugcaucggcuaccacgccaacaacagcaccgacaccguggacaccgugcuggagaagaacgugaccgugacccacagcgugaaccugcuggaggacaagcacaacggcaagcugugcaagcugagaggcguggccccccugcaccugggcaagugcaacaucgccggcuggauccugggcaaccccgagugcgagagccugagcaccgccagcagcuggagcuacaucguggagaccagcagcagcgacaacggcaccugcuaccccggcgacuucaucgacuacgaggagcugagagagcagcugagcagcgugagcagcuucgagagauucgagaucuuccccaagaccagcagcuggcccaaccacgacagcaacaagggcgugaccgccgccugcccccacgccggcgccaagagcuucuacaagaaccugaucuggcuggugaagaagggcaacagcuaccccaagcugagcaagagcuacaucaacgacaagggcaaggaggugcuggugcuguggggcauccaccaccccagcaccagcgccgaccagcagagccuguaccagaacgccgacgccuacguguucgugggcagcagcagauacagcaagaaguucaagcccgagaucgccaucagacccaaggugagagaccaggagggcagaaugaaguacuacuggacccugguggagcccggcgacaagaucaccuucgaggccaccggcaaccugguggugcccagauacgccuucgccauggagagaaacgccggcagcggcaucaucaucagcgacacccccgugcacgacugcaacaccaccugccagacccccaagggcgccaucaacaccagccugcccuuccagaacauccaccccaucaccaucggcaagugccccaaguacgugaagagcaccaagcugagacuggccaccggccugagaaacgugcccagcauccagagcagaggccuguucggcgccaucgccggcuucaucgagggcggcuggaccggcaugguggacggcugguacggccaccaccaccagaacgagcagggcagcggcuacgccgccgaccugaagagcacccagaacgccaucgacgagaucaccaacaaggugaacagcgugaucgagaagaugaacacccaguucaccgccgugggcaaggaguucaaccaccuggagaagagaaucgagaaccugaacaagaagguggacgacggcuuccuggacaucuggaccuacaacgccgagcugcuggugcugcuggagaacgagagaacccuggacuaccacgacagcaacgugaagaaccuguacgagaaggugagaagccagcugaagaacaacgccaaggagaucggcaacggcugcuucgaguucuaccacaagugcgacaacaccugcauggagagcgugaagaacggcaccuacgacuaccccaaguacagcgaggaggccaagcugaacagagaggagaucgacggcaucaagcuggagagcaccagaaucuaccagauccuggccaucuacagcaccguggccagcagccuggugcugguggugagccugggcgccaucagcuucuggaugugcagcaacggcagccugcagugcagaaucugcaucuga

SEQ ID NO: 165157 - RNA, 1701 nt, Artificial Sequence
  derived and/or modified CDS sequence (opt4) from hemagglutinin__InfluenzaA__ADI52834
augaaggccauccugguggugcugcuguacaccuucgccaccgccaacgccgacacccugugcaucggcuaccacgccaacaacagcaccgacaccguggacaccgugcuggagaagaacgugaccgugacccacagcgugaacauccuggaggacaagcacaacggcaagcugugcaagcugagaggcguggccccccugcaccugggcaagugcaacaucgccggcuggauccugggcaaccccgagugcgagagccugagcaccgccagcagcuggagcuacaucguggagaccagcagcagcgacaacggcaccugcuaccccggcgacuucaucgacuacgaggagcugagagagcagcugagcagcgugagcagcuucgagagauucgagaucuuccccaagaccagcagcuggcccaaccacgacagcaacaagggcgugaccgccgccugcccccacgccggcgccaagagcuucuacaagaaccugaucuggcuggugaagaagggcaacagcuaccccaagcugagcaagagcuacaucaacgacaagggcaaggaggugcuggugcuguggggcauccaccacccccccaccagcgccgaccagcagagccuguaccagaacgccgacgccuacguguucgugggcagcagcagauacagcaagaaguucaagcccgagaucgccaucagacccaaggugagagaccaggagggcagaaugaacuacuacuggacccugguggagcccggcgacaagaucaccuucgaggccaccggcaaccugguggugcccagauacgccuucgccauggagagaaacgccggcagcggcaucaucaucagcgacacccccgugcacgacugcaacaccaccugccagacccccaagggcgccaucaacaccagccugcccuuccagaacauccaccccaucaccaucggcaagugccccaaguacgugaagagcaccaagcugagacuggccaccggccugagaaacgugcccagcauccagagcagaggccuguucggcgccaucgccggcuucaucgagggcggcuggaccggcaugguggacggcugguacggcuaccaccaccagaacgagcagggcagcggcuacgccgccgaccugaagagcacccagaacgccaucgacgagaucaccaacaaggugaacagcgugaucgagaagaugaacacccaguucaccgccgugggcaaggaguucaaccaccuggagaagagaaucgagaaccugaacaagaagguggacgacggcuuccuggacaucuggaccuacaacgccgagcugcuggugcugcuggagaacgagagaacccuggacuaccacgacagcaacgugaagaaccuguacgagaaggugagaagccagcugaagaacaacgccaaggaggugggcaacggcugcuucgaguucuaccacaagugcgacaacaccugcauggagagcgugaagaacggcaccuacgacuaccccaaguacagcgaggaggccaagcugaacagagaggagaucgacggcgugaagcuggagagcaccagaaucuaccagauccuggccaucuacagcaccgccgccagcagccuggugcugguggugagccugggcgccaucagcuucuggaugugcagcaacggcagccugcagugcagaaucugcaucuga

SEQ ID NO: 165158 - RNA, 1701 nt, Artificial Sequence
  derived and/or modified CDS sequence (opt4) from hemagglutinin__InfluenzaA__ADI52835
auggaggccauccugguggugcugcuguacaccuucgccaccgccaacgccgacacccugugcaucggcuaccacgccaacaacagcaccgacaccguggacaccgugcuggagaagaacgugaccgugacccacagcgugaaccugcuggaggacaagcacaacggcaagcugugcaagcugagaggcguggccccccugcaccugggcaagugcaacaucgccggcuggauccugggcaaccccgagugcgagagccugagcaccgccagcagcuggagcuacaucguggagaccagcagcagcgacaacggcaccugcuaccccggcgacuucaucgacuacgaggagcugagagagcagcugagcagcgugagcagcuucgagagauucgagaucuuccccaagaccagcagcuggcccaaccacgacagcaacaagggcgugaccgccgccugcccccacgccggcgccaagagcuucuacaagaaccugaucuggcuggugaagaagggcaacagcuaccccaagcugagcaagagcuacaucaacgacaagggcaaggaggugcuggugcuguggggcauccaccacccccccaccagcgccgaccagcagagccuguaccagaacgccgacgccuacguguucgugggcagcagcaaguacagcaagaaguucaagcccgagaucgccaucagacccaaggugagagaccaggagggcagaaugaacuacuacuggacccugguggagcccggcgacaagaucaccuucgaggccaccggcaaccugguggugcccagauacgccuucgccauggagagaaacgccggcagcggcaucaucaucagcgacacccccgugcacgacugcaacaccaccugccagacccccaagggcgccaucaacaccagccugcccuuccacaacauccaccccaucaccaucggcaagugccccaaguacgugaagagcaccaagcugagacuggccaccggccugagaaacgugcccagcauccagagcagaggccuguucggcgccaucgccggcuucaucgagggcggcuggaccggcaugguggacggcugguacggcuaccaccaccagaacgagcagggcagcggcuacgccgccgaccugaagagcacccagaacgccaucgacgagaucaccaacaaggugaacagcgugaucgagaagaugaacacccaguucaccgccgugggcaaggaguucaaccaccuggagaagagaaucgagaaccugaacaagaagguggacgacggcuuccuggacaucuggaccuacaacgccgagcugcuggugcugcuggagaacgagagaacccuggacuaccacgacagcaacgugaagaaccuguacgagaaggugagaagccagcugaagaacaacgccaaggagaucggcaacggcugcuucgaguucuaccacaagugcgacaacaccugcauggagagcgugaagaacggcaccuacgacuaccccaaguacagcgaggaggccaagcugaacagagaggagaucgacggcgugaagcuggagagcaccaagaucuaccagauccuggccaucuacagcaccguggccagcagccuggugcugguggugagccugggcgccaucagcuucuggaugugcagcaacggcagccugcagugcagaaucugcaucuga

SEQ ID NO: 165159 - RNA, 1701 nt, Artificial Sequence
  derived and/or modified CDS sequence (opt4) from hemagglutinin__InfluenzaA__ADI52836
auggaggccauccugguggugcugcuguacaccuucgccaccgccaacgccgacacccugugcaucggcuaccacgccaacaacagcaccgacaccguggacaccgugcuggagaagaacgugaccgugacccacagcgugaaccugcuggaggacaagcacaacggcaagcugugcaagcugagaggcguggccccccugcaccugggcaagugcaacaucgccggcuggauccugggcaaccccgagugcgagagccugagcaccgccagcagcuggagcuacaucguggagaccagcagcagcgacaacggcaccugcuaccccggcgacuucaucgacuacgaggagcugagagagcagcugagcagcgugagcagcuucgagagauucgagaucuuccccaagaccagcagcuggcccaaccacgacagcaacaagggcgugaccgccgccugcccccacgccggcgccaagagcuucuacaagaaccugaucuggcuggugaagaaggagaacagcuaccccaagcugagcaagagcuacaucaacgacaagggcaaggaggugcuggugcuguggggcauccaccaccccagcaccagcgccgaccagcagagacuguaccagaacgccgacgccuacguguucgugggcagcagcaaguacagcaagaaguucaagcccgagaucgccaucagacccaaggugagagaccaggagggcagaaugaacuacuacuggacccugguggagcccggcgacaagaucaccuucgaggccaccggcaaccugguggugcccagauacgccuucgccauggagagaaacgccggcagcggcaucaucaucagcgacacccccgugcacgacugcaacaccaccugccagacccccaagggcgccaucaacaccagccugcccuuccacaacauccaccccaucaccaucggcaagugccccaaguacgugaagagcaccaagcugagacuggccaccggccugagaaacgugcccagcauccagagcagaggccuguucggcgccaucgccggcuucaucgagggcggcuggaccggcaugguggacggcugguacggcuaccaccaccagaacgagcagggcagcggcuacgccgccgaccugaagagcacccagaacgccaucgacgagaucaccaacaaggugaacagcgugaucgagaagaugaacacccaguucaccgccgugggcaaggaguucaaccaccuggagaagagaaucgagaaccugaacaagaagguggacgacggcuuccuggacaucuggaccuacaacgccgagcugcuggugcugcuggagaacgagagaacccuggacuaccacgacagcaacgugaagaaccuguacgagaaggugagaagccagcugaagaacaacgccaaggagaucggcaacggcugcuucgaguucuaccacaagugcgacaacaccugcauggagagcgugaagaacggcaccuacgacuaccccaaguacagcgaggaggccaagcugaacagagaggagaucgacggcgugaagcuggagagcaccaagaucuaccagauccuggccaucuacagcaccguggccagcagccuggugcugguggugagccugggcgccaucagcuucuggaugugcagcaacggcagccugcagugcagaaucugcaucuga

SEQ ID NO: 165160 - RNA, 1701 nt, Artificial Sequence
  derived and/or modified CDS sequence (opt4) from hemagglutinin__InfluenzaA__ADI52837
auggaggccauccugguggugcugcuguacaccuucgccaccgccaacgccgacacccugugcaucggcuaccacgccaacaacagcaccgacaccguggacaccgugcuggagaagaacgugaccgugacccacagcgugaaccugcuggaggugaagcacaacggcaagcugugcaagcugagaggcguggccccccugcaccugggcaagugcaacaucgccggcuggauccugggcaaccccgagugcgagagccugagcaccgccagcagcuggagcuacaucguggagaccagcagcagcgacaacggcaccugcuaccccggcgacuucaucgacuacgaggagcugagagagcagcugagcagcgugagcagcuucgagagauucgagaucuuccccaagaccagcagcuggcccaaccacgacagcaacaagggcgugaccgccgccugcccccacgccggcgccaagagcuucuacaagaaccugaucuggcuggugaagaagggcaacagcuaccccaagcugagcaagagcuacaucaacgacaagggcaaggaggugcuggugcuguggggcauccaccaccccagcaccagcgccgaccagcagagccuguaccagaacgccgacgccuacguguucgugggcagcagcaaguacagcaagaaguucaagcccgagaucgccaucagacccaaggugagagaccaggagggcagaaugaacuacuacuggacccugguggagcccggcgacaagaucaccuucgaggccaacggcaaccugguggugcccagauacgccuucgccauggagagaaacgccggcagcggcaucaucaucagcgacacccccgugcacgacugcaacaccaccugccagacccccaagggcgccaucaacaccagccugcccuuccacaacauccaccccaucaccaucggcaagugccccaaguacgugaagagcaccaagcugagacuggccaccggccugagaaacgugcccagcauccagagcagaggccuguucggcgccaucgccggcuucaucgagggcggcuggaccggcaugguggacggcugguacggcuaccaccaccagaacgagcagggcagcggcuacgccgccgaccugaagagcacccagaacgccaucgacgagaucaccaacaaggugaacagcgugaucgagaagaugaacacccaguucaccgccgugggcaaggaguucaaccaccuggagaagagaaucgagaaccugaacaagaagguggacgacggcuuccuggacaucuggaccuacaacgccgagcugcuggugcugcuggagaacgagagaacccuggacuaccacgacagcaacgugaagaaccuguacgagaaggugagaagccagcugaagaacaacgccaaggagaucggcaacggcugcuucgaguucuaccacaagugcgacaacaccugcauggagagcgugaagaacggcaccuacgacuaccccaaguacagcgaggaggccaagcugaacagagaggagaucgacggcgugaagcuggagagcaccaagaucuaccagauccuggccaucuacagcaccguggccagcagccuggugcugguggugagccugggcgccaucagcuucuggaugugcagcaacggcagccugcagugcagaaucugcaucuga

SEQ ID NO: 165161 - RNA, 1701 nt, Artificial Sequence; identical to SEQ ID NO: 163527
  derived and/or modified CDS sequence (opt4) from hemagglutinin__InfluenzaA__ADI72915

SEQ ID NO: 165162 - RNA, 1701 nt, Artificial Sequence; identical to SEQ ID NO: 163527
  derived and/or modified CDS sequence (opt4) from hemagglutinin__InfluenzaA__ADI72916

SEQ ID NO: 165163 - RNA, 1701 nt, Artificial Sequence; identical to SEQ ID NO: 163527
  derived and/or modified CDS sequence (opt4) from hemagglutinin__InfluenzaA__ADI72917

SEQ ID NO: 165164 - RNA, 1701 nt, Artificial Sequence
  derived and/or modified CDS sequence (opt4) from hemagglutinin__InfluenzaA__ADI72918
augaaggccauccugguggugcugcuguacaccuucgccaccgccaacgccgacacccugugcaucggcuaccacgccaacaacagcaccgacaccguggacaccgugcuggagaagaacgugaccgugacccacagcgugaaccugcuggaggacaagcacaacggcaagcugugcaagcugagaggcguggccccccugcaccugggcaagugcaacaucgccggcuggauccugggcaaccccgagugcgagagccugagcaccgccagcagcuggagcuacaucguggagaccagcagcagcgacaacggcaccugcuaccccggcgacuucaucgacuacgaggagcugagagagcagcugagcagcgugagcagcuucgagagauucgagaucuuccccaagaccagcagcuggcccaaccacgaccccaacaagggcgugaccgccgccugcccccacgccggcgccaagagcuucuacaagaaccugaucuggcuggugaagaagggcaacagcuaccccaagcugagcaagagcuacaucaacgacagaggcaaggaggugcuggugcuguggggcauccaccaccccagcaccagcgccgaccagcagagccuguaccagaacgccgacgccuacguguucgugggcaccagcagauacagcaagaaguucaagcccgagaucgccaucagacccaaggugagagaccaggagggcagaaugaacuacuacuggacccugguggagcccggcgacaagaucaccuucgaggccaccggcaaccugguggugcccagauacgccuucgccauggagagaaacgccggcagcggcaucaucaucagcgacacccccgugcacgacugcaacaccaccugccagacccccaagggcgccaucaacaccagccugcccuuccagaacauccaccccaucaccaucggcaagugccccaaguacgugaagagcaccaagcugagacuggccaccggccugagaaacgugcccagcauccagagcagaggccuguucggcgccaucgccggcuucaucgagggcggcuggaccggcaugguggacggcugguacggcuaccaccaccagaacgagcagggcagcggcuacgccgccgaccugaagagcacccagaacgccaucgacgagaucaccaacaaggugaacagcgugaucgagaagaugaacacccaguucaccgccgugggcaaggaguucaaccaccuggagaagagaaucgagaaccugaacaagaagguggacgacggcuuccuggacaucuggaccuacaacgccgagcugcuggugcugcuggagaacgagagaacccuggacuaccacgacagcaacgugaagaagcuguacgagaaggugagaagccagcugaagaacaacgccaaggagaucggcaacggcugcuucgaguucuaccacaagugcgacaacaccugcauggagagcgugaagaacggcaccuacgacuaccccaaguacagcgaggaggccaagcugaacagagaggagaucgacggcgugaagcuggagagcaccagaaucuaccagauccuggccaucuacagcaccguggccagcagccuggugcugguggugagccugggcgccaucagcuucuggaugugcagcaacggcagccugcagugcagaaucugcaucuga

SEQ ID NO: 165165 - RNA, 1701 nt, Artificial Sequence; identical to SEQ ID NO: 163527
  derived and/or modified CDS sequence (opt4) from hemagglutinin__InfluenzaA__ADI72919

SEQ ID NO: 165166 - RNA, 1701 nt, Artificial Sequence; identical to SEQ ID NO: 163527
  derived and/or modified CDS sequence (opt4) from hemagglutinin__InfluenzaA__ADI72920

SEQ ID NO: 165167 - RNA, 1701 nt, Artificial Sequence
  derived and/or modified CDS sequence (opt4) from hemagglutinin__InfluenzaA__ADI72921
augaaggccauccugguggugcugcuguacaccuucgccaccgccaacgccgacacccugugcaucggcuaccacgccaacaacagcaccgacaccguggacaccgugcuggagaagaacgugaccgugacccacagcgugaaccugcuggaggacaagcacaacggcaagcugugcaagcugagaggcguggccccccugcaccugggcaagugcaacaucgccggcuggauccugggcaaccccgagugcgagagccugagcaccgccagcagcuggagcuacaucguggagaccagcagcagcgacaacggcaccugcuaccccggcgacuucaucgacuacgaggagcugagagagcagcugagcagcgugagcagcuucgagagauucgagaucuuccccaagaccagcagcuggcccaaccacgaccccaacaagggcgugaccgccgccugcccccacgccggcgccaagagcuucuacaagaaccugaucuggcuggugaagaagggcaacagcuaccccaagcugagcaagagcuacaucaacgacaagggcaaggaggugcuggugcuguggggcauccaccaccccagcaccagcgccgaccagcagagccuguaccagaacgccgacgccuacguguucgugggcaccagcagauacagcaagaaguucaagcccgagaucgccaucagacccaaggugagagaccaggagggcagaaugaacuacuacuggacccugguggagcccggcgacaagaucaccuucgaggccaccggcaaccugguggugcccagauacgccuucgccauggagagaaacgccggcagcggcaucaucaucagcgacacccccgugcacgacugcaacaccaccugccagacccccaagggcgccaucaacaccagccugcccuuccagaacauccaccccaucaccaucggcaagugccccaaguacgugaagagcaccaagcugagacuggccaccggccugagaaacgugcccagcauccagagcagaggccuguucggcgccaucgccggcuucaucgagggcggcuggaccggcaugguggacggcugguacggcuaccaccaccagaacgagcagggcagcggcuacgccgccgaccugaagagcacccagaacgcccuggacgagaucaccaacaaggugaacagcgugaucgagaagaugaacacccaguucaccgccgugggcaaggaguucaaccaccuggagaagagaaucgagaaccugaacaagaagguggacgacggcuuccuggacaucuggaccuacaacgccgagcugcuggugcugcuggagaacgagagaacccuggacuaccacgacagcaacgugaagaaccuguacgagaaggugagaagccagcugaagaacaacgccaaggagaucggcaacggcugcuucgaguucuaccacaagugcgacaacaccugcauggagagcgugaagaacggcaccuacgacuaccccaaguacagcgaggaggccaagcugaacagagaggagaucgacggcgugaagcuggagagcaccagaaucuaccagauccuggccaucuacagcaccguggccagcagccuggugcugguggugagccugggcgccaucagcuucuggaugugcagcaacggcagccugcagugcagaaucugcaucuga

SEQ ID NO: 165168 - RNA, 1701 nt, Artificial Sequence; identical to SEQ ID NO: 162729
  derived and/or modified CDS sequence (opt4) from hemagglutinin__InfluenzaA__ADI72922

SEQ ID NO: 165169 - RNA, 1701 nt, Artificial Sequence
  derived and/or modified CDS sequence (opt4) from hemagglutinin__InfluenzaA__ADI72923
augaaggccauccugguggugcugcuguacaccuucgccaccagcaacgccgacacccugugcaucggcuaccacgccaacaacagcaccgacaccguggacaccgugcuggagaagaacgugaccgugacccacagcgugaaccugcuggaggacaagcacaacggcaagcugugcaagcugagaggcguggccccccugcaccugggcaagugcaacaucgccggcuggauccugggcaaccccgagugcgagagccugagcaccgccagcagcuggagcuacaucguggagaccagcagcagcgacaacggcaccugcuaccccggcgacuucaucgacuacgaggagcugagagagcagcugagcagcgugagcagcuucgagagauucgagaucuuccccaagaccagcagcuggcccaaccacgaccccaacaagggcgugaccgccgccugcccccacgccggcgccaagagcuucuacaagaaccugaucuggcuggugaagaagggcaacagcuaccccaagcugagcaagagcuacaucaacgacaagggcaaggaggugcuggugcuguggggcauccaccaccccagcaccagcgccgaccagcagagccuguaccagaacgccgacgccuacguguucgugggcaccagcagauacagcaagaaguucaagcccgagaucgccaucagacccaaggugagagaccaggagggcagaaugaacuacuacuggacccugguggagcccggcgacaagaucaccuucgaggccaccggcaaccugguggugcccagauacgccuucgccauggagagaaacgccggccccggcaucaucaucagcgacacccccgugcacgacugcaacaccaccugccagacccccaagggcgccaucaacaccagccugcccuuccagaacauccaccccaucaccaucggcaagugccccaaguacgugaagagcaccaagcugagacuggccaccggccugagaaacgugcccagcauccagagcagaggccuguucggcgccaucgccggcuucaucgagggcggcuggaccggcaugguggacggcugguacggcuaccaccaccagaacgagcagggcagcggcuacgccgccgaccugaagagcacccagaacgccaucgacgagaucaccaacaaggugaacagcgugaucgagaagaugaacacccaguucaccgccgugggcaaggaguucaaccaccuggagaagagaaucgagaaccugaacaagaagguggacgacggcuuccuggacaucuggaccuacaacgccgagcugcuggugcugcuggagaacgagagaacccuggacuaccacgacagcaacgugaagaaccuguacgagaaggugagaagccagcugaagaacaacgccaaggagaucggcaacggcugcuucgaguucuaccacaagugcgacaacaccugcauggagagcgugaagaacggcaccuacgacuaccccaaguacagcgaggaggccaagcugaacagagaggagaucgacggcgugaagcuggagagcaccagaaucuaccagauccuggccaucuacagcaccguggccagcagccuggugcugguggugagccugggcgccaucagcuucuggaugugcagcaacggcagccugcagugcagaaucugcaucuga

SEQ ID NO: 165170 - RNA, 1701 nt, Artificial Sequence; identical to SEQ ID NO: 163527
  derived and/or modified CDS sequence (opt4) from hemagglutinin__InfluenzaA__ADI72924

SEQ ID NO: 165171 - RNA, 1701 nt, Artificial Sequence; identical to SEQ ID NO: 162729
  derived and/or modified CDS sequence (opt4) from hemagglutinin__InfluenzaA__ADI72925

SEQ ID NO: 165172 - RNA, 1701 nt, Artificial Sequence
  derived and/or modified CDS sequence (opt4) from hemagglutinin__InfluenzaA__ADI72926
augaaggccauccugguggugcugcuguacaccuucgccaccgccaacgccgacacccugugcaucggcuaccacgccaacaacagcaccgacaccguggacaccgugcuggagaagaacgugaccgugacccacagcgugaaccugcuggaggacaagcacaacggcaagcugugcaagcugagaggcguggccccccugcaccugggcaagugcaacaucgccggcuggauccugggcaaccccgagugcgagagccugagcaccgccagcagcuggagcuacaucguggagaccagcagcagcgacaacggcaccugcuaccccggcgacuucaucgacuacgaggagcugagagagcagcugagcagcgugagcagcuucgagagauucgagaucuuccccaagaccagcagcuggcccaaccacgaccccaacaagggcgugaccgccgccugcccccacgccggcgccaagagcuucuacaagaaccugaucuggcuggugaagaagggcaacagcuaccccaagcugagcaagagcuacaucaacgacaagggcaaggaggugcuggugcuguggggcauccaccaccccagcaccagcgccgaccagcagagccuguaccagaacgccgacgccuacguguucgugggcaccagcggcuacagcaagaaguucaagcccgagaucgccaucagacccaaggugagagaccaggagggcagaaugaacuacuacuggacccugguggagcccggcgacaagaucaccuucgaggccaccggcaaccugguggugcccagauacgccuucgccauggagagaaacgccggcagcggcaucaucaucagcgacacccccgugcacgacugcaacaccaccugccagacccccaagggcgccaucaacaccagccugcccuuccagaacauccaccccaucaccaucggcaagugccccaaguacgugaagagcaccaagcugagacuggccaccggccugagaaacgugcccagcauccagagcagaggccuguucggcgccaucgccggcuucaucgagggcggcuggaccggcaugguggacggcugguacggcuaccaccaccagaacgagcagggcagcggcuacgccgccgaccugaagagcacccagaacgccaucgacgagaucaccaacaaggugaacagcgugaucgagaagaugaacacccaguucaccgccgugggcaaggaguucaaccaccuggagaagagaaucgagaaccugaacaagaagguggacgacggcuuccuggacaucuggaccuacaacgccgagcugcuggugcugcuggagaacgagagaacccuggacuaccacgacagcaacgugaagaaccuguacgagaaggugagaagccagcugaagaacaacgccaaggagaucggcaacggcugcuucgaguucuaccacaagugcgacaacaccugcauggagagcgugaagaacggcaccuacgacuaccccaaguacagcgaggaggccaagcugaacagagaggagaucgacggcgugaagcuggagagcaccagaaucuaccagauccuggccaucuacagcaccguggccagcagccuggugcugguggugagccugggcgccaucagcuucuggaugugcagcaacggcagccugcagugcagaaucugcaucuga

SEQ ID NO: 165173 - RNA, 1701 nt, Artificial Sequence
  derived and/or modified CDS sequence (opt4) from hemagglutinin__InfluenzaA__ADI72927
augaaggccauccugguggugcugcuguacaccuucgccaccgccaacgccgacacccugugcaucggcuaccacgccaacaacagcaccgacaccguggacaccgugcuggagaagaacgugaccgugacccacagcgugaaccugcuggaggacaagcacaacggcaagcugugcaagcugagaggcguggccccccugcaccugggcaagugcaacaucgccggcuggauccugggcaaccccgagugcgagagccugagcaccgccagcagcuggagcuacaucguggagaccagcagcagcgacaacggcaccugcuaccccggcgacuucaucgacuacgaggagcugagagagcagcugagcagcgugagcagcuucgagagauucgagaucuuccccaagaccagcagcuggcccaaccacgaccccaacaagggcgugaccgccgccugcccccacgccggcgccaagagcuucuacaagaaccugaucuggcuggugaagaagggcaacagcuaccccaagcugagcaagagcuacaucaacgacaagggcaaggaggugcuggugcuguggggcauccaccaccccagcaccagcgccgaccagcagagccuguaccagaacgccgacgccuacguguucgugggcaccagcagauacagcaagaaguucaagcccgagaucgccaucagacccaaggugagagaccaggagggcagaaugaacuacuacuggacccugguggagcccggcgacaagaucaccuucgaggccaccggcaaccugguggugcccagauacgccuucgccauggagagaaacgccggcagcggcaucaucaccagcgacacccccgugcacgacugcaacaccaccugccagacccccaagggcgccaucaacaccagccugcccuuccagaacauccaccccaucaccaucggcaagugccccaaguacgugaagagcaccaagcugagacuggccaccggccugagaaacgugcccagcauccagagcagaggccuguucggcgccaucgccggcuucaucgagggcggcuggaccggcaugguggacggcugguacggcuaccaccaccagaacgagcagggcagcggcuacgccgccgaccugaagagcacccagaacgccaucgacgagaucaccaacaaggugaacagcgugaucgagaagaugaacacccaguucaccgccgugggcaaggaguucaaccaccuggagaagagaaucgagaaccugaacaagaagguggacgacggcuuccuggacaucuggaccuacaacgccgagcugcuggugcugcuggagaacgagagaacccuggacuaccacgacagcaacgugaagaaccuguacgagaaggugagaagccagcugaagaacaacgccaaggagaucggcaacggcugcuucgaguucuaccacaagugcgacaacaccugcauggagagcgugaagaacggcaccuacgacuaccccaaguacagcgaggaggccaagcugaacagagaggagaucgacggcgugaagcuggagagcaccagaaucuaccagauccuggccaucuacagcaccguggccagcagccuggugcugguggugagccugggcgccaucagcuucuggaugugcagcaacggcagccugcagugcagaaucugcaucuga

SEQ ID NO: 165174 - RNA, 1701 nt, Artificial Sequence
  derived and/or modified CDS sequence (opt4) from hemagglutinin__InfluenzaA__ADI72928
augaaggccauccugguggugcugcuguacaccuucgccaccgccaacgccgacacccugugcaucggcuaccacgccaacaacagcaccgacaccguggacaccauccuggagaagaacgugaccgugacccacagcgugaaccugcuggaggacaagcacaacggcaagcugugcaagcugagaggcguggccccccugcaccugggcaagugcaacaucgccggcuggauccugggcaaccccgagugcgagagccugagcaccgccagcagcuggagcuacaucguggagaccagcagcagcgacaacggcaccugcuaccccggcgacuucaucgacuacgaggagcugagagagcagcugagcagcgugagcagcuucgagagauucgagaucuuccccaagaccagcagcuggcccaaccacgaccccaacaagggcgugaccgccgccugcccccacgccggcgccaagagcuucuacaagaaccugaucuggcuggugaagaagggcaacagcuaccccaagcugagcaagagcuacaucaacgacaagggcaaggaggugcuggugcuguggggcauccaccaccccagcaccagcgccgaccagcagagccuguaccagaacgccgacgccuacguguucgugggcaccagcagauacagcaagaaguucaagcccgagaucgccaucagacccaaggugagagaccaggagggcagaaugaacuacuacuggacccugguggagcccggcgacaagaucaccuucgaggccaccggcaaccugguggugcccagauacgccuucgccauggagagaaacgccggcagcggcaucaucaucagcgacacccccgugcacgacugcaacaccaccugccagacccccaagggcgccaucaacaccagccugcccuuccagaacauccaccccaucaccaucggcaagugccccaaguacgugaagagcaccaagcugagacuggccaccggccugagaaacgugcccagcauccagagcagaggccuguucggcgccaucgccggcuucaucgagggcggcuggaccggcaugguggacggcugguacggcuaccaccaccagaacgagcagggcagcggcuacgccgccgaccugaagagcacccagaacgccaucgacgagaucaccaacaaggugaacagcgugaucgagaagaugaacacccaguucaccgccgugggcaaggaguucaaccaccuggagaagagaaucgagaaccugaacaagaagguggacgacggcuuccuggacaucuggaccuacaacgccgagcugcuggugcugcuggagaacgagagaacccuggacuaccacgacagcaacgugaagaaccuguacgagaaggugagaagccagcugaagaacaacgccaaggagaucggcaacggcugcuucgaguucuaccacaagugcgacaacaccugcauggagagcgugaagaacggcaccuacgacuaccccaaguacagcgaggaggccaagcugaacagaaaggagaucgacggcgugaagcuggagagcaccagaaucuaccagauccuggccaucuacagcaccguggccagcagccuggugcugguggugagccugggcgccaucagcuucuggaugugcagcaacggcagccugcagugcagaaucugcaucuga

SEQ ID NO: 165175 - RNA, 1701 nt, Artificial Sequence; identical to SEQ ID NO: 162729
  derived and/or modified CDS sequence (opt4) from hemagglutinin__InfluenzaA__ADI72929

SEQ ID NO: 165176 - RNA, 1701 nt, Artificial Sequence; identical to SEQ ID NO: 162729
  derived and/or modified CDS sequence (opt4) from hemagglutinin__InfluenzaA__ADI72930

SEQ ID NO: 165177 - RNA, 1701 nt, Artificial Sequence
  derived and/or modified CDS sequence (opt4) from hemagglutinin__InfluenzaA__ADI72931
augaaggccauccugguggugcugcuguacaccuucgccaccgccaacgccgacacccugugcaucggcuaccacgccaacaacagcaccgacaccguggacaccgugcuggagaagaacgugaccgugacccacagcgugaaccugcuggaggacaagcacaacggcaagcugugcaagcugagaggcguggccccccugcaccugggcaagugcaacaucgccggcuggauccugggcaaccccgagugcgagagccugagcaccgccagcagcuggagcuacaucguggagaccagcagcagcgacaacggcaccugcuaccccggcgacuucaucgacuacgaggagcugagagagcagcugagcagcgugagcagcuucgagagauucgagaucuuccccaagaccagcagcuggcccaaccacgaccccaacaagggcgugaccgccgccugcccccacgccggcgccaagagcuucuacaagaaccugaucuggcuggugaagaagggcaacagcuaccccaagcugagcaagagcuacaucaacgacaagggcaaggaggugcuggugcuguggggcauccaccaccccagcaccagcgccgaccagcagagccuguaccagaacgccgacgccuacguguucgugggcaccagcagauacagcaagaaguucaagcccgagaucgccaucagacccaaggugagagaccaggagggcagaaugaacuacuacuggacccugguggagcccggcgacaagaucaccuucgaggccaccggcaaccugguggugcccagauacgccuucgccauggagagaaacgccggcagcggcaucaucaucagcgacacccccgugcacgacugcaacaccaccugccagacccccaagggcgccaucaacaccagccugcccuuccagaacauccaccccaucaccaucggcaagugccccaaguacgugaagagcaccaagcugagacuggccaccggccugagaaacgugcccagcauccagagcagaggccuguucggcgccaucgccggcuucaucgagggcggcuggaccggcaugguggacggcugguacggcuaccaccaccagaacgagcagggcagcggcuacgccgccgaccugaagagcacccagaacgccaucgacgagaucaccaacaaggugaacagcgugaucgagaagaugaacacccaguucaccgccgugggcaaggaguucaaccaccuggagaagagaaucgagaaccugaacaagaagguggacgacggcuuccuggacaucuggaccuacaacgccgagcugcuggugcugcuggagaacgagagaacccuggacuaccacgacagcaacgugaagaaccuguacgagaaggugagaagccagcugaagaacaacgccaaggagaucggcaacggcugcuucgaguucuaccacaagugcgacaacaccugcauggagagcgugaagaacggcaccuacgacuaccccaaguacagcgaggaggccaagcugaacagagaggagaucgacggcaucaagcuggagagcaccagaaucuaccagauccuggccaucuacagcaccguggccagcagccuggugcugguggugagccugggcgccaucagcuucuggaugugcagcaacggcagccugcagugcagaaucugcaucuga

SEQ ID NO: 165178 - RNA, 1701 nt, Artificial Sequence; identical to SEQ ID NO: 164385
  derived and/or modified CDS sequence (opt4) from hemagglutinin__InfluenzaA__ADI72932

SEQ ID NO: 165179 - RNA, 1698 nt, Artificial Sequence
  derived and/or modified CDS sequence (opt4) from hemagglutinin__InfluenzaA__ADI75818
augaaggugaagcugcuggugcugcugugcaccuucaccgccaccuacgccgacaccaucugcaucggcuaccacgccaacaacagcaccgacaccguggacaccgugcuggagaagaacgugaccgugacccacagcgugaaccugcuggagaacagccacaacggcaagcugugccugcugaagggcaucgccccccugcagcugggcaacugcagcguggccggcuggauccugggcaaccccgagugcgagcugcugaucagcaaggagagcuggagcuacaucguggagaagcccaaccccgagaacggcaccugcuaccccggccacuucgccgacuacgaggagcugagagagcagcugagcagcgugagcagcuucgagagauucgagaucuuccccaaggagagcagcuggcccaaccacaccgugaccggcgugagcgccagcugcagccacaacggcgagagcagcuucuacaagaaccugcuguggcugaccgagaagaacggccuguaccccaaccugagcaagagcuacgccaacaacaaggagaaggaggugcuggugcuguggggcgugcaccacccccccagcaucagcgaccagaagacccuguaccacaccgagaacgccuacgugagcguggugagcagccacuacagcagaaaguucacccccgagaucgccaagagacccaaggugagagaccaggagggcagaaucaacuacuacuggacccugcuggagcccggcgacaccaucaucuucgaggccaacggcaaccugaucgcccccagauacgccuucgcccugagcagaggcuucggcagcggcaucaucaacagcaacgcccccauggacaagugcgacgccaagugccagaccccccagggcgccaucaacagcagccugcccuuccagaacgugcaccccgugaccaucggcgagugccccaaguacgugagaagcgccaagcugagaauggugaccggccugagaaacauccccagcauccagagcagaggccuguucggcgccaucgccggcuucaucgagggcggcuggaccggcaugguggacggcugguacggcuaccaccaccagaacgagcagggcagcggcuacgccgccgaccagaagagcacccagaacgccaucaacggcaucaccaacaaggugaacagcgugaucgagaagaugaacacccaguucaccgccgugggcaaggaguucaacaagcuggagagaagaauggagaaccugaacaagaagguggacgacggcuucaucgacaucuggaccuacaacgccgagcugcuggugcugcuggagaacgagagaacccuggacuuccacgacagcaacgugaagaaccuguacgagaaggugaagaaccagcugaagaacaacgccaaggagaucggcaacggcugcuucgaguucuaccacaagugcaacgacgagugcauggagagcgugaagaacggcaccuacgacuaccccaaguacagcgaggagagcaagcugaacagagagaagaucgacggcgugaagcuggagagcaugggcguguaccagauccuggccaucuacagcaccguggccagcagccuggugcugcuggugagccugggcgccaucagcuucuggaugugcagcaacggcagccugcagugcagaaucugcaucuga

SEQ ID NO: 165180 - RNA, 1698 nt, Artificial Sequence
  derived and/or modified CDS sequence (opt4) from hemagglutinin__InfluenzaA__ADI75851
augaaggugaagcugcuggugcugcugugcaccuucaccgccaccuacgccgacaccaucugcaucggcuaccacgccaacaacagcaccgacaccguggacaccgugcuggagaagaacgugaccgugacccacagcgugaaccugcuggagaacagccacaacggcaagcugugccugcugaagggcaucgccccccugcagcugggcaacugcagcguggccggcuggauccugggcaaccccgagugcggccugcugaucagcaaggagagcuggagcuacaucguggagaagcccaaccccgagaacggcaccugcuaccccggccacuucgccgacuacgaggagcugagagagcagcugagcagcgugagcagcuucgagagauucgagaucuuccccaaggagagcagcuggcccaaccacaccgugaccggcgugagcgccagcugcagccacaacggcgagagcagcuucuacagaaaccugcuguggcugaccggcaagaacggccuguaccccaaccugagcaagagcuacgccaacaacaaggagaaggaggugcuggugcuguggggcgugcaccacccccccaacaucguggaccagaagacccuguacagaaccgagaacgccuacgugagcguggugagcagccacuacagcagaaaguucacccccgagaucgccaagagacccaaggugagagaccaggagggcagaaucaacuacuacuggacccugcuggagcccggcgacaccaucaucuucgaggccaacggcaaccugaucgcccccagauacgccuucgcccugagcagaggcuucggcagcggcaucaucaacagcaacgcccccaugggcaagugcgacgccaagugccagaccccccagggcgccaucaacagcagccugcccuuccagaacgugcaccccgugaccaucggcgagugccccaaguacgugagaagcgccaagcugagaauggugaccggccugagaaacauccccagcauccagagcagaggccuguucggcgccaucgccggcuucaucgagggcggcuggaccggcaugguggacggcugguacggcuaccaccaccagaacgagcagggcagcggcuacgccgccgaccagaagagcacccagaacgccaucaacggcaucaccaacaaggugaacagcgugaucgagaagaugaacacccaguucaccgccgugggcaaggaguucaacaagcuggagagaagaauggagaaccugaacaagaagguggacgacggcuucaucgacaucuggaccuacaacgccgagcugcuggugcugcuggagaacgagagaacccuggacuuccacgacagcaacgugaagaaccuguacgagaaggugaagagccagcugaagaacaacgccaaggagaucggcaacggcugcuucgaguucuaccacaagugcaacgacgagugcauggagagcgugaagaacggcaccuacgacuaccccaaguacagcgaggagagcaagcugaacagagagaagaucgacggcgugaagcuggagagcaugggcguguaccagauccuggccaucuacagcaccguggccagcagccuggugcugcuggugagccugggcgccaucagcuucuggaugugcagcaacggcagccugcagugcagaaucugcaucuga

SEQ ID NO: 165181 - RNA, 1701 nt, Artificial Sequence; identical to SEQ ID NO: 162494
  derived and/or modified CDS sequence (opt4) from hemagglutinin__InfluenzaA__ADI75884

SEQ ID NO: 165182 - RNA, 1701 nt, Artificial Sequence; identical to SEQ ID NO: 162494
  derived and/or modified CDS sequence (opt4) from hemagglutinin__InfluenzaA__ADI75917

SEQ ID NO: 165183 - RNA, 1698 nt, Artificial Sequence
  derived and/or modified CDS sequence (opt4) from hemagglutinin__InfluenzaA__ADI77349
augaaggugaagcugcuggugcugcugugcaccuucaccgccaccuacgccgacaccaucugcaucggcuaccacgccaacaacagcaccgacaccguggacaccgugcuggagaagaacgugaccgugacccacagcgugaaccugcuggagaacagccacaacggcaagcugugccugcugaagggcaucgccccccugcagcugggcaacugcagcguggccggcuggauccugggcaaccccgagugcgagcugcugaucagcaaggagagcuggagcuacaucguggagaagcccaaccccgagaacggcaccugcuaccccggccacuucgccgacuacgaggagcugagagagcagcugagcagcgugagcagcuucgagagauucgagaucuuccccaaggagagcagcuggcccaaccacaccgugaccggcgugagcgccagcugcagccacaacggcgagaacagcuucuacagaaaccugcuguggcugaccggcaagaacggccuguaccccaaccugagcaagagcuacgccaacaacaaggagaaggaggugcugauccuguggggcgugcaccacccccccaacauggccgaccagaagacccuguaccacaccgagaacgccuacgugagcguggugagcagccacuacagcagaaaguucacccccgagaucgccaagagacccaaggugagagaccaggagggcagaaucaacuacuacuggacccugcuggagcccggcgacaccaucaucuucgaggccaacggcaaccugaucgcccccagauacgccuucgcccugagcagaggcuucggcagcggcaucaucaacagcaacgcccccauggacaagugcgacaccaagugccagaccccccagggcgccaucaacagcagccugcccuuccagaacgugcaccccgugaccaucggcgagugccccaaguacgugagaagcgccaagcugagaauggugaccggccugagaaacauccccagcauccagagcagaggccuguucggcgccaucgccggcuucaucgagggcggcuggaccggcaugguggacggcugguacggcuaccaccaccagaacgagcagggcagcggcuacgccgccgaccagaagagcacccagaacgccaucaacggcaucaccaacaaggugaacagcgugaucgagaagaugaacacccaguucaccgccgugggcaaggaguucaacaagcuggagagaagaauggagaaccugaacaagaagguggacgacggcuucaucgacaucuggaccuacaacgccgagcugcuggugcugcuggagaacgagagaacccuggacuuccacgacagcaacgugaagaaccuguacgagaaggugaagagccagcugaagaacaacgccaaggagaucggcaacggcugcuucgaguucuaccacaagugcaacgacgagugcauggagagcgugaagaacggcaccuacgacuaccccaaguacagcgaggagagcaagcugaacagagagaagaucgacggcgugaagcuggagagcaugggcguguaccagauccuggccaucuacagcaccguggccagcagccuggugcugcuggugagccugggcgccaucagcuucuggaugugcagcaacggcagccugcagugcagaaucugcaucuga

SEQ ID NO: 165184 - RNA, 1701 nt, Artificial Sequence; identical to SEQ ID NO: 162729
  derived and/or modified CDS sequence (opt4) from hemagglutinin__InfluenzaA__ADI77360

SEQ ID NO: 165185 - RNA, 1701 nt, Artificial Sequence
  derived and/or modified CDS sequence (opt4) from hemagglutinin__InfluenzaA__ADI99498
augaagaccauccugguggugcugcuguacaccuucgccaccgccaacgccgacacccugugcaucggcuaccacgccaacaacagcaccgacaccguggacaccgugcuggagaagaacgugaccgugacccacagcgugaaccugcuggaggacaagcacaacggcaagcugugcaagcugagaggcguggccccccugcaccugggcaagugcaacaucgccggcuggauccugggcaaccccgagugcgagagccugagcaccgccagcagcuggagcuacaucguggagaccagcagcagcgacaacggcaccugcuaccccggcgacuucaucgacuacgaggagcugagagagcagcugagcagcgugagcagcuucgagagauucgagaucuuccccaagaccagcagcuggcccaaccacgacagcaacaagggcgugaccgccgccugcccccacgccggcgccaagagcuucuacaagaaccugaucuggcuggugaagaagggcaacagcuaccccaagcugaacaagagcuacaucaacgacaagggcaaggaggugcuggugcuguggggcauccaccaccccagcaccagcgccgaccagcagagccuguaccagaacgccgacgccuacguguucgugggcaccagcagauacagcaagaaguucaagcccgagaucgccaucagacccaaggugagaggccaggagggcagaaugaacuacuacuggacccuggugaagcccggcgacaagaucaccuucgaggccaccggcaaccugguggugcccagauacgccuucgccauggagagaaacgccggcagcggcaucaucaucagcgacacccccgugcacgacugcaacaccaccugccagacccccaagggcgccaucaacaccagccugcccuuccagaacauccaccccaucaccaucggcaagugccccaaguacgugaagagcaccaagcugagacuggccaccggccugagaaacgugcccagcauccagagcagaggccuguucggcgccaucgccggcuucaucgagggcggcuggaccggcaugguggacggcugguacggcuaccaccaccagaacgagcagggcagcggcuacgccgccgaccugaagagcacccagaacgccaucgacgagaucaccaacaaggugaacagcgugaucgagaagaugaacacccaguucaccgccgugggcaaggaguucaaccaccuggagaagagaaucgagaaccugaacaagaagguggacgacggcuuccuggacaucuggaccuacaacgccgagcugcuggugcugcuggagaacgagagaacccuggacuaccacgacagcaacgugaagaaccuguacgagaaggugagaagccagcugaagaacaacgccaaggagaucggcaacggcugcuucgaguucuaccacaagugcgacaacaccugcauggagagcgugaagaacggcaccuacgacuaccccaaguacagcgaggaggccaagcugaacagagaggagaucgacggcgugaagcuggagagcaccagaaucuaccagauccuggccaucuacagcaccguggccagcagccuggugcugguggugagccugggcgccaucagcuucuggaugugcagcaacggcagccugcagugcagaaucugcaucuga

SEQ ID NO: 165186 - RNA, 1701 nt, Artificial Sequence
  derived and/or modified CDS sequence (opt4) from hemagglutinin__InfluenzaA__ADI99560
augaaggccauccugguggugcugcuguacaccuucgccaccgccaacgccgacacccugugcaucggcuaccacgccaacaacagcaccgacaccguggacaccgugcuggagaagaacgugaccgugacccacagcgugaaccugcuggaggacaagcacaacggcaagcugugcaagcugagaggcguggccccccugcaccugggcaagugcaacaucgccggcuggauccugggcaaccccgagugcgagagccugagcaccgccagcagcuggagcuacaucguggagaccagcagcagcgacaacggcaccugcuaccccggcgacuucaucaacuacgaggagcugagagagcagcugagcagcgugagcagcuucgagagauucgagaucuuccccaagaccagcagcuggcccaaccacgacagcaacaagggcgugaccgccgccugcccccacgccggcgccaagagcuucuacaagaaccugaucuggcuggugaagaagggcaacagcuaccccaagcugagcaagagcuacaucaacgacaagggcaaggaggugcuggugcuguggggcauccaccaccccagcaccagcgccgaccagcagagccuguaccagaacgccgacgccuacguguucgugggcaccagcagauacagcaagaaguucaagcccgagaucgccaucagacccaaggugagagaccaggagggcagaaugaacuacuacuggacccugguggagcccggcgacaagaucaccuucgaggccaccggcaaccugguggugcccagauacgccuucgccauggagagaaacgccggcagcggcaucaucaucagcgacacccccgugcacgacugcaacaccaccugccagacccccaagggcgccaucaacaccagccugcccuuccagaacauccaccccaucaccaucggcaagugccccaaguacgugaagagcaccaagcugagacuggccaccggccugagaaacgugcccagcauccagagcagaggccuguucggcgccaucgccggcuucaucgagggcggcuggaccggcaugguggacggcugguacggcuaccaccaccagaacgagcagggcagcggcuacgccgccgaccugaagagcacccagaacgccaucgacaagaucaccaacaaggugaacagcgugaucgagaagaugaacacccaguucaccgccgugggcaaggaguucaaccaccuggagaagagaaucgagaaccugaacaagaagguggacgacggcuuccuggacaucuggaccuacaacgccgagcugcuggugcugcuggagaacgagagaacccuggacuaccacgacagcaacgugaagaaccuguacgagaaggugagaagccagcugaagaacaacgccaaggagaucggcaacggcugcuucgaguucuaccacaagugcaacaacaccugcauggagagcgugaagaacggcaccuacgacuaccccaaguacagcgaggaggccaagcugaacagagaggagaucgacggcgugaagcuggagagcaccagaaucuaccagauccuggccaucuacagcaccguggccagcagccuggugcugguggugagccugggcgccaucagcuucuggaugugcagcaacggcagccugcagugcagaaucugcaucuga

SEQ ID NO: 165187 - RNA, 1701 nt, Artificial Sequence; identical to SEQ ID NO: 165186
  derived and/or modified CDS sequence (opt4) from hemagglutinin__InfluenzaA__ADI99570

SEQ ID NO: 165188 - RNA, 1701 nt, Artificial Sequence; identical to SEQ ID NO: 165186
  derived and/or modified CDS sequence (opt4) from hemagglutinin__InfluenzaA__ADI99580

SEQ ID NO: 165189 - RNA, 1701 nt, Artificial Sequence; identical to SEQ ID NO: 164342
  derived and/or modified CDS sequence (opt4) from hemagglutinin__InfluenzaA__ADI99590

SEQ ID NO: 165190 - RNA, 1701 nt, Artificial Sequence
  derived and/or modified CDS sequence (opt4) from hemagglutinin__InfluenzaA__ADI99610
augaaggccauccugguggugcugcuguacaccuucgccaccgccaacgccgacacccugugcaucggcuaccacgccaacaacagcaccgacaccguggacaccgugcuggagaagaacgugaccgugacccacagcgugaaccugcuggaggacaagcacaacggcaagcugugcaagcugagaggcguggccccccugcaccugggcaagugcaacaucgccggcuggauccugggcaaccccgagugcgagagccugagcaccgccagcagcuggagcuacaucguggagaccagcagcagcgacaacggcaccugcuaccccggcgacuucaucaacuacgaggagcugagagagcagcugagcagcgugagcagcuucgagagauucgagaucuuccccaagaccagcagcuggcccaaccacgacagcaacaagggcgugaccgccgccugcccccacgccggcgccaagagcuucuacaagaaccugaucuggcuggugaagaagggcaacagcuaccccaagcugagcaagagcuacaucaacgacaagggcaaggagauccuggugcuguggggcauccaccaccccagcaccagcgccgaccagcagagccuguaccagaacgccgacgccuacguguucgugggcaccagcagauacagcaagaaguucaagcccgagaucgccaucagacccaaggugagagaccaggagggcagaaugaacuacuacuggacccugguggagcccggcgacaagaucaccuucgaggccaccggcaaccugguggugcccagauacgccuucgccauggagagaaacgccggcagcggcaucaucaucagcgacacccccgugcacgacugcaacaccaccugccagacccccaagggcgccaucaacaccagccugcccuuccagaacauccaccccaucaccaucggcaagugccccaaguacgugaagagcaccaagcugagacuggccaccggccugagaaacgugcccagcauccagagcagaggccuguucggcgccaucgccggcuucaucgagggcggcuggaccggcaugguggacggcugguacggcuaccaccaccagaacgagcagggcagcggcuacgccgccgaccugaagagcacccagaacgccaucgacaagaucaccaacaaggugaacagcgugaucgagaagaugaacacccaguucaccgccgugggcaaggaguucaaccaccuggagaagagaaucgagaaccugaacaagaagguggacgacggcuuccuggacaucuggaccuacaacgccgagcugcuggugcugcuggagaacgagagaacccuggacuaccacgacagcaacgugaagaaccuguacgagaaggugagaagccagcugaagaacaacgccaaggagaucggcaacggcugcuucgaguucuaccacaagugcgacaacaccugcauggagagcgugaagaacggcaccuacgacuaccccaaguacagcgaggaggccaagcugaacagagaggagaucgacggcgugaagcuggagagcaccagaaucuaccagauccuggccaucuacagcaccguggccagcagccuggugcugguggugagccugggcgccaucagcuucuggaugugcagcaacggcagccugcagugcagaaucugcaucuga

SEQ ID NO: 165191 - RNA, 1701 nt, Artificial Sequence
  derived and/or modified CDS sequence (opt4) from hemagglutinin__InfluenzaA__ADI99620
augaaggccauccugguggugcugcuguacaccuucgccaccgccaacgccgacacccugugcaucggcuaccacgccaacaacagcaccgacaccguggacaccgugcuggagaagaacgugaccgugacccacagcgugaaccugcuggaggacaagcacaacggcaagcugugcaagcugagaggcguggccccccugcaccugggcaagugcaacaucgccggcuggauccugggcaaccccgagugcgagagccugagcaccgccagcagcuggagcuacaucguggagaccagcagcagcgacaacggcaccugcuaccccggcgacuucaucaacuacgaggagcugagagagcagcugagcagcgugagcagcuucgagagauucgagaucuuccccaagaccagcagcuggcccaaccacgacagcaacaagggcgugaccgccgccugcccccacgccggcgccaagagcuucuacaagaaccugaucuggcuggugaagaagggcaacagcuaccccaagcugagcaagagcuacaucaacgacaagggcaaggaggugcuggugcuguggggcauccaccaccccagcaccagcgccgaccagcagagccuguaccagaacgccgacgccuacguguucgugggcaccagcagauacagcaagaaguucaagcccgagaucgccaucagacccaaggugagagaccaggagggcagaaugaacuacuacuggacccugguggagcccggcgacaagaucaccuucgaggccaccggcaaccugguggugcccagauacgccuucgccauggagagaaacgccggcagcggcaucaucaucaccgacacccccgugcacgacugcaacaccaccugccagacccccaagggcgccaucaacaccagccugcccuuccagaacauccaccccaucaccaucggcaagugccccaaguacgugaagagcaccaagcugagacuggccaccggccugagaaacgugcccagcauccagagcagaggccuguucggcgccaucgccggcuucaucgagggcggcuggaccggcaugguggacggcugguacggcuaccaccaccagaacgagcagggcagcggcuacgccgccgaccugaagagcacccagaacgccaucgacaagaucaccaacaaggugaacagcgugaucgagaagaugaacacccaguucaccgccgugggcaaggaguucaaccaccuggagaagagaaucgagaaccugaacaagaagguggacgacggcuuccuggacaucuggaccuacaacgccgagcugcuggugcugcuggagaacgagagaacccuggacuaccacgacagcaacgugaagaaccuguacgagaaggugagaagccagcugaagaacaacgccaaggagaucggcaacggcugcuucgaguucuaccacaagugcgacaacaccugcauggagagcgugaagaacggcaccuacgacuaccccaaguacagcgaggaggccaagcugaacagagaggagaucgacggcgugaagcuggagagcaccagaaucuaccagauccuggccaucuacagcaccguggccagcagccuggugcugguggugagccugggcgccaucagcuucuggaugugcagcaacggcagccugcagugcagaaucugcaucuga

SEQ ID NO: 165192 - RNA, 1701 nt, Artificial Sequence
  derived and/or modified CDS sequence (opt4) from hemagglutinin__InfluenzaA__ADI99630
augaaggccauccugguggugcugcuguacaccuucgccaccgccaacgccgacacccugugcaucggcuaccacgccaacaacagcaccgacaccguggacaccgugcuggagaagaacgugaccgugacccacagcgugaaccugcuggaggacaagaacaacggcaagcugugcaagcugagaggcguggccccccugcaccugggcaagugcaacaucgccggcuggauccugggcaaccccgagugcgagagccugagcaccgccagcagcuggagcuacaucguggagaccagcagcagcgacaacggcaccugcuaccccggcaacuucaucgacuacgaggagcugagagagcagcugagcagcgugagcagcuucgagagauucgagaucuuccccaagaccagcagcuggcccaaccacgacagcaacaagggcgugaccgccgccugcccccacgccggcgccaagagcuucuacaagaaccugaucuggcuggugaagaagggcaacagcuaccccaagcugagcaagagcuacaucaacgacaagggcaaggaggugcuggugcuguggggcauccaccaccccagcaccagcgccgaccagcagagccuguaccagaacgccgacgccuacguguucgugggcaccagcagauacagcaagaaguucaagcccgagaucgccaucagacccaaggugagagaccaggagggcagaaugaacuacuacuggacccugguggagcccggcgacaagaucaccuucgaggccaccggcaaccugguggugcccagauacgccuucgccauggagagaaacgccggcagcggcaucaucaucagcgacacccccgugcacgacugcaacaccaccugccagacccccaagggcgccaucaacaccagccugcccuuccagaacauccaccccaucaccaucggcaagugccccaaguacgugaagagcaccaagcugagacuggccaccggccugagaaacgugcccagcauccagagcagaggccuguucggcgccaucgccggcuucaucgagggcggcuggaccggcaugguggacggcugguacggcuaccaccaccagaacgagcagggcagcggcuacgccgccgaccugaagagcacccagaacgccaucgacaagaucaccaacaaggugaacagcgugaucgagaagaugaacacccaguucaccgccgugggcaaggaguucaaccaccuggagaagagaaucgagaaccugaacaagaagguggacgacggcuuccuggacaucuggaccuacaacgccgagcugcuggugcugcuggagaacgagagaacccuggacuaccacgacagcaacgugaagaaccuguacgagaaggugagaagccagcugaagaacaacgccaaggagaucggcaacggcugcuucgaguucuaccacaagugcgacaacaccugcauggagagcgugaagaacggcaccuacgacuaccccaaguacagcgaggaggccaagcugaacagagaggagaucgacggcgugaagcuggagagcaccagaaucuaccagauccuggccaucuacagcaccguggccagcagccuggugcugguggugagccugggcgccaucagcuucuggaugugcagcaacggcagccugcagugcagaaucugcaucuga

SEQ ID NO: 165193 - RNA, 1701 nt, Artificial Sequence
  derived and/or modified CDS sequence (opt4) from hemagglutinin__InfluenzaA__ADI99640
augaaggccauccugguggugcugcuguacaccuucgccaccgccaacgccgacacccugugcaucggcuaccacgccaacaacagcaccgacaccguggacaccgugcuggagaagaacgugaccgugacccacagcgugaaccugcuggaggacaagcacaacggcaagcugugcaagcugagaggcguggccccccugcaccugggcaagugcaacaucgccggcuggauccugggcaaccccgagugcgagagccugagcaccgccagcagcuggagcuacaucguggagaccagcagcagcgacaacggcaccugcuaccccggcgacuucaucgacuacgaggagcugagagagcagcugagcagcgugagcagcuucgagagauucgagaucuuccccaagaccagcagcuggcccaaccacgacagcaacaagggcgugaccgccgccugcccccacgccggcgccaagagcuucuacaagaaccugaucuggcuggugaagaagggcaacagcuaccccaagcugagcaagagcuacaucaacgacaagggcaaggaggugcuggugcuguggggcauccaccaccccagcaccagcaccgaccagcagagccuguaccagaacgccgacagcuacguguucgugggcaccagcagauacagcaagaaguucaagcccgagaucgccaucagacccaaggugagagaccaggagggcagaaugaacuacuacuggacccugguggagcccggcgacaagaucaccuucgaggccaccggcaaccugguggugcccagauacgccuucgccauggagagaaacgccggcagcggcaucaucaucagcgacacccccauccacgacugcaacaccaccugccagacccccgagggcgccaucaacaccagccugcccuuccagaacauccaccccaucaccaucggcaagugccccaaguacgugaagagcaccaagcugagacuggccaccggccugagaaacgugcccagcauccagagcagaggccuguucggcgccaucgccggcuucaucgagggcggcuggaccggcaugguggacggcugguacggcuaccaccaccagaacgagcagggcagcggcuacgccgccgaccugaagagcacccagaacgccaucgacgagaucaccaacaaggugaacagcgugaucgagaagaugaacacccaguucaccgccgugggcaaggaguucaaccaccuggagaagagaaucgagaaccugaacaagaagguggacgacggcuuccuggacaucuggaccuacaacgccgagcugcuggugcugcuggagaacgagagaacccuggacuaccacgacagcaacgugaagaaccuguacgagaaggugagaagccagcugaagaacaacgccaaggagaucggcaacggcugcuucgaguucuaccacaagugcgacaacaccugcauggagagcgugaagaacggcaccuacgacuaccccaaguacagcgaggaggccaagcugaacagagaggagaucgacggcgugaagcuggagagcaccagaaucuaccagauccuggccaucuacagcaccguggccagcagccuggugcugguggugagccugggcgccaucagcuucuggaugugcagcaacggcagccugcagugcagaaucugcaucuga

SEQ ID NO: 165194 - RNA, 1701 nt, Artificial Sequence; identical to SEQ ID NO: 164281
  derived and/or modified CDS sequence (opt4) from hemagglutinin__InfluenzaA__ADI99660

SEQ ID NO: 165195 - RNA, 1701 nt, Artificial Sequence
  derived and/or modified CDS sequence (opt4) from hemagglutinin__InfluenzaA__ADI99670
augaaggccauccugguggugcugcuguacaccuucgccaccgccaacgccgacacccugugcaucggcuaccacgccaacaacagcaccgacaccguggacaccgugcuggagaagaacgugaccgugacccacagcgugaacauccuggaggacaagcacaacggcaagcugugcaagcugagaggcguggccccccugcaccugggcaagugcaacaucgccggcuggauccugggcaaccccgagugcgagagccugagcaccgccagcagcuggagcuacaucguggagaccagcagcagcgacaacggcaccugcuaccccggcgacuucaucgacuacgaggagcugagagagcagcugagcagcgugagcagcuucgagagauucgagaucuuccccaagaccagcagcuggcccaaccacgacagcaacaagggcgugaccgccgccugcccccacgccggcgccaagagcuucuacaagaaccugaucuggcuggugaagaagggcaacagcuaccccaagcugagcaagagcuacaucaacgacaagggcaaggaggugcuggugcuguggggcauccaccaccccagcaccagcgccgaccagcagagccuguaccagaacgccgacgccuacguguucgugggcaccagcagauacagcaagaaguucaagcccgagaucgccaucagacccaaggugagagaccaggagggcagaaugaacuacuacuggacccugguggagcccggcgacaagaucaccuucgaggccaccggcaaccugguggugcccagauacgccuucgccauggagagaaacgccggcagcggcaucaucaucagcgacacccccgugcacgacugcaacaccaccugccagacccccaagggcgccaucaacaccagccugcccuuccagaacauccaccccaucaccaucggcaagugccccaaguacgugaagagcaccaagcugagacuggccaccggccugagaaacgugcccagcauccagagcagaggccuguucggcgccaucgccggcuucaucgagggcggcuggaccggcaugguggacggcugguacggcuaccaccaccagaacgagcagggcagcggcuacgccgccgaccugaagagcacccagaacgccaucgacgagaucaccaacaaggugaacagcgugaucgagaagaugaacacccaguucaccgccgugggcaaggaguucaaccaccuggagaagagaaucgagaaccugaacaagaagguggacgacggcuuccuggacaucuggaccuacaacgccgagcugcuggugcugcuggagaacgagagaacccuggacuaccacgacagcaacgugaagaaccuguacgagaaggugagaagccagcugaagaacaacgccaaggagaucggcaacggcugcuucgaguucuaccacaagugcgacaacaccugcauggagagcgugaagaacggcaccuacggcuaccccaaguacagcgaggaggccaagcugaacagagaggagaucgacggcgugaagcuggagagcaccagaaucuaccagauccuggccaucuacagcaccguggccagcagccuggugcugguggugagccugggcgccaucagcuucuggaugugcagcaacggcagccugcagugcagaaucugcaucuga

SEQ ID NO: 165196 - RNA, 1701 nt, Artificial Sequence
  derived and/or modified CDS sequence (opt4) from hemagglutinin__InfluenzaA__ADI99680
augaaggccauccugguggugcugcuguacaccuucgccaccgccaacgccgacacccugugcaucggcuaccacgccaacaacagcaccgacaccguggacaccgugcuggagaagaacgugaccgugacccacagcgugaacauccuggaggacaagcacaacggcaagcugugcaagcugagaggcguggccccccugcaccugggcaagugcaacaucgccggcuggauccugggcaaccccgagugcgagagccugagcaccgccagcagcuggagcuacaucguggagaccagcagcagcgacaacggcaccugcuaccccggcgacuucaucgacuacgaggagcugagagagcagcugagcagcgugagcagcuucgagagauucgagaucuuccccaagaccagcagcuggcccaaccacgacagcaacaagggcgugaccgccgccugcccccacgccggcgccaagagcuucuacaagaaccugaucuggcuggugaagaagggcaacagcuaccccaagcugagcaagagcuacaucaacgacaagggcaaggaggugcuggugcuguggggcauccaccaccccagcaccagcgccgaccagcagagccuguaccagaacgccgacgccuacguguucgugggcaccagcagauacagcaagaaguucaagcccgagaucgccaucagacccaaggugagagaccaggagggcagaaugaacuacuacuggaccaucguggagcccggcgacaagaucaccuucgaggccaccggcaaccugguggugcccagauacgccuucgccauggagagaaacgccggcagcggcaucaucaucagcgacacccccgugcacgacugcaacaccaccugccagacccccaagggcgccaucaacaccagccugcccuuccagaacauccaccccaucaccaucggcaagugccccaaguacgugaagagcaccaagcugagacuggccaccggccugagaaacgugcccagcauccagagcagaggccuguucggcgccaucgccggcuucaucgagggcggcuggaccggcaugguggacggcugguacggcuaccaccaccagaacgagcagggcagcggcuacgccgccgaccugaagagcacccagaacgccaucgacgagaucaccaacaaggugaacagcgugaucgagaagaugaacacccaguucaccgccgugggcaaggaguucaaccaccuggagaagagaaucgagaaccugaacaagaagguggacgacggcuuccuggacaucuggaccuacaacgccgagcugcuggugcugcuggagaacgagagaacccuggacuaccacgacagcaacgugaagaaccuguacgagaaggugagaagccagcugaagaacaacgccaaggagaucggcaacggcugcuucgaguucuaccacaagugcgacaacaccugcauggagagcgugaagaacggcaccuacgacuaccccaaguacagcgaggaggccaagcugaacagagaggagaucgacggcgugaagcuggagagcaccagaaucuaccagauccuggccaucuacagcaccguggccagcagccuggugcugguggugagccugggcgccaucagcuucuggaugugcagcaacggcagccugcagugcagaaucugcaucuga

SEQ ID NO: 165197 - RNA, 1701 nt, Artificial Sequence
  derived and/or modified CDS sequence (opt4) from hemagglutinin__InfluenzaA__ADI99690
augaaggccauccuggccgugcugcuguacaccuucgccaucgccaacgccgacacccugugcaucggcuaccacgccaacaacagcaccgacaccguggacaccgugcuggagaagaacgugaccgugacccacagcgugaacauccuggaggacaagcacaacggcaagcugugcaagcugagaggcguggccccccugcaccugggcaagugcaacaucgccggcuggauccugggcaaccccgagugcgagagccugagcaccgccagcagcuggagcuacaucguggagaccagcagcagcgacaacggcaccugcuaccccggcgacuucaucgacuacgaggagcugagagagcagcugagcagcgugagcagcuucgagagauucgagaucuuccccaagaccagcagcuggcccaaccacgacagcaacaagggcgugaccgccgccugcccccacgccggcgccaagagcuucuacaagaaccugaucuggcuggugaagaagggcaacagcuaccccaagcugagcaagagcuacaucaacgacaagggcaagaaggugcuggugcuguggggcauccaccaccccagcaccagcgccgaccagcagagccuguaccagaacgccgacgccuacguguucgugggcaccagcagauacagcaagaaguucaagcccgagaucgccaucagacccaaggugagagaccaggagggcagaaugaacuacuacuggacccugguggagcccggcgacaagaucaccuucgaggccaccggcaaccugguggugcccagauacgccuucgccauggagagaaacgccggcagcggcaucaucaucagcgacacccccgugcacgacugcaacaccaccugccagacccccaagggcgccaucaacaccagccugcccuuccagaacauccaccccaucaccaucggcaagugccccaaguacgugaagagcaccaagcugagacuggccaccggccugagaaacgugcccagcauccagagcagaggccuguucggcgccaucgccggcuucaucgagggcggcuggaccggcaugguggacggcugguacggcuaccaccaccagaacgagcagggcagcggcuacgccgccgaccugaagagcacccagaacgccaucgacgagaucaccaacaaggugaacagcgugaucgagaagaugaacacccaguucaccgccgugggcaaggaguucaaccaccuggagaagagaaucgagaaccugaacaagaagguggacgacggcuuccuggacaucuggaccuacaacgccgagcugcuggugcugcuggagaacgagagaacccuggacuaccacgacagcaacgugaagaaccuguacgagaaggugagaagccagcugaagaacaacgccaaggagaucggcaacggcugcuucgaguucuaccacaagugcgacaacaccugcauggagagcgugaagaacggcaccuacgacuaccccaaguacagcgaggaggccaagcugaacagagaggagaucgacggcgugaagcuggagagcaccagaaucuaccagauccuggccaucuacagcaccguggccagcagccuggugcugguggugagccugggcgccaucagcuucuggaugugcagcaacggcagccugcagugcagaaucugcaucuga

SEQ ID NO: 165198 - RNA, 1701 nt, Artificial Sequence
  derived and/or modified CDS sequence (opt4) from hemagglutinin__InfluenzaA__ADI99700
augaaggccauccugguggugcugcuguacaccuucgccaccgccaacgccgacacccugugcaucggcuaccacgccaacaacagcaccgacaccguggacaccgugcuggagaagaacgugaccgugacccacagcgugaaccugcuggaggacaagcacaacggcaagcugugcaagcugagaggcgugagcccccugcaccugggcaagugcaacaucgccggcuggauccugggcaaccccgagugcgagagccugagcaccgccagcagcuggagcuacaucguggagaccagcagcagcgacaacggcaccugcuaccccggcgacuucaucgacuacgaggagcugagagagcagcugagcagcgugagcagcuucgagagauucgagaucuuccccaagaccagcagcuggcccaaccacgacagcaacaagggcgugaccgccgccugcccccacgccggcgccaagagcuucuacaagaaccugaucuggcuggugaagaagggcaacagcuaccccaagcugagcaagagcuacaucaacgacaagggcaaggaggugcuggugcuguggggcgugcaccaccccagcaccagcgccgaccagcagagccuguaccagaacgccgacgccuacguguucgugggcaccagcagauacagcaagaaguucaagcccgagaucgccaucagacccaaggugagagaccaggagggcagaaugaacuacuacuggacccugguggagcccggcgacaagaucaccuucgaggccaccggcaaccugguggcccccagauacgccuucgccauggagagaaacgccggcagcggcaucaucaucagcgacacccccgugcacgacugcaacaccaccugccagacccccaagggcgccaucaacaccagccugcccuuccagaacauccaccccaucaccaucggcaagugccccaaguacgugaagagcaccaagcugagacuggccaccggccugagaaacgugcccagcauccagagcagaggccuguucggcgccaucgccggcuucaucgagggcggcuggaccggcaugguggacggcugguacggcuaccaccaccagaacgagcagggcagcggcuacgccgccgaccugaagagcacccagaacgccaucgacgagaucaccaacaaggugaacagcgugaucgagaagaugaacacccaguucaccgccgugggcaaggaguucaaccaccuggagaagagaaucgagaaccugaacaagaagguggacgacggcuuccuggacaucuggaccuacaacgccgagcugcuggugcugcuggagaacgagagaacccuggacuaccacgacagcaacgugaagaaccuguacgagaaggugagaagccagcugaagaacaacgccaaggagaucggcaacggcugcuucgaguucuaccacaagugcgacaacaccugcauggagagcgugaagaacggcaccuacgacuaccccaaguacagcgaggaggccaagcugaacagagaggagaucgacggcgugaagcuggagagcaccagaaucuaccagauccuggccaucuacagcaccguggccagcagccuggugcugguggugagccugggcgccaucagcuucuggaugugcagcaacggcagccugcagugcagaaucugcaucuga

SEQ ID NO: 165199 - RNA, 1701 nt, Artificial Sequence; identical to SEQ ID NO: 164378
  derived and/or modified CDS sequence (opt4) from hemagglutinin__InfluenzaA__ADI99710

SEQ ID NO: 165200 - RNA, 1701 nt, Artificial Sequence
  derived and/or modified CDS sequence (opt4) from hemagglutinin__InfluenzaA__ADI99720
augaaggccauccugguggugcugcuguacaccuucgccaccgccaacgccgacacccugugcaucggcuaccacgccaacaacagcaccgacaccguggacaccgugcuggagaagaacgugaccgugacccacagcgugaaccugcuggaggacaagcacaacggcaagcugugcaagcugagaggcguggccccccugcaccugggcaagugcaacaucgccggcuggauccugggcaaccccgagugcgagagccugagcaccgccagcagcuggagcuacaucguggagaccagcagcagcgacaacggcaccugcuaccccggcgacuucaucgacuacgaggagcugagagagcagcugagcagcgugagcagcuucgagagauucgagaucuuccccaagaccagcagcuggcccgaccacgacagcaacaagggcgugaccgccgccugcccccacgccggcgccaagagcuucuacaagaaccugaucuggcuggugaagaagggcaacagcuaccccaagcugagcaagagcuacaucaacgacaagggcaaggaggugcuggugcuguggggcauccaccaccccagcaccagcgccgaccagcagagccuguaccagaacgccgacgccuacguguucgugggcaccagcagauacagcaagaaguucaagcccgagaucgccaucagacccaaggugagaggccaggagggcagaaugaacuacuacuggacccugguggagcccggcgacaagaucaccuucgaggccaccggcaaccugguggugagcagauacgccuucgccauggagagaaacgccggcagcggcaucaucaucagcgacacccccgugcacgacugcaacaccaccugccagacccccaagggcgccaucaacaccagccugcccuuccagaacauccaccccaucaccaucggcaagugccccaaguacgugaagagcaccaagcugagacuggccaccggccugagaaacgugcccagcauccagagcagaggccuguucggcgccaucgccggcuucaucgagggcggcuggaccggcaugguggacggcugguacggcuaccaccaccagaacgagcagggcagcggcuacgccgccgaccugaagagcacccagaacgccaucgacgagaucaccaacaaggugaacagcgugaucgagaagaugaacacccaguucaccgccgugggcaaggaguucaaccaccuggagaagagaaucgagaaccugaacaagaagguggacgacggcuuccuggacaucuggaccuacaacgccgagcugcuggugcugcuggagaacgagagaacccuggacuaccacgacagcaacgugaagaaccuguacgagaaggugagaagccagcugaagaacaacgccaaggagaucggcaacggcugcuucgaguucuaccacaagugcgacaacaccugcauggagagcgugaagaacggcaccuacgacuaccccaaguacagcgaggaggccaagcugaacagagaggagaucgacggcgugaagcuggagagcaccagaaucuaccagauccuggccaucuacagcaccguggccagcagccuggugcugguggugagccugggcgccaucagcuucuggaugugcagcaacggcagccugcagugcagaaucugcaucuga

SEQ ID NO: 165201 - RNA, 1701 nt, Artificial Sequence; identical to SEQ ID NO: 162729
  derived and/or modified CDS sequence (opt4) from hemagglutinin__InfluenzaA__ADI99730

SEQ ID NO: 165202 - RNA, 1701 nt, Artificial Sequence; identical to SEQ ID NO: 162729
  derived and/or modified CDS sequence (opt4) from hemagglutinin__InfluenzaA__ADJ00497

SEQ ID NO: 165203 - RNA, 1701 nt, Artificial Sequence; identical to SEQ ID NO: 162729
  derived and/or modified CDS sequence (opt4) from hemagglutinin__InfluenzaA__ADJ00498

SEQ ID NO: 165204 - RNA, 1701 nt, Artificial Sequence; identical to SEQ ID NO: 163923
  derived and/or modified CDS sequence (opt4) from hemagglutinin__InfluenzaA__ADJ00501

SEQ ID NO: 165205 - RNA, 1701 nt, Artificial Sequence; identical to SEQ ID NO: 163893
  derived and/or modified CDS sequence (opt4) from hemagglutinin__InfluenzaA__ADJ18163

SEQ ID NO: 165206 - RNA, 1701 nt, Artificial Sequence; identical to SEQ ID NO: 163893
  derived and/or modified CDS sequence (opt4) from hemagglutinin__InfluenzaA__ADJ18165

SEQ ID NO: 165207 - RNA, 1701 nt, Artificial Sequence
  derived and/or modified CDS sequence (opt4) from hemagglutinin__InfluenzaA__ADJ18167
augaaggccauccugguggugcugcuguacaccuucgccaccgccaacgccgacacccugugcaucggcuaccacgccaacaacagcaccgacaccguggacaccgugcuggagaagaacgugaccgugacccacagcgugaaccugcuggaggacaagcacaacggcaagcugugcaagcugagaggcguggccccccugcaccugggcaagugcaacaucgccggcuggauccugggcaaccccgagugcgagagccugagcaccgccagcagcuggagcuacaucguggagaccagcagcagcgacaacggcaccugcuaccccggcgacuucaucgacuacgaggagcugagagagcagcugagcagcgugagcagcuucgagagauucgagaucuuccccaagaccagcagcuggcccaaccacgacagcaacaagggcgugaccgccgccugccccuacgccggcgccaagagcuucuacaagaaccugaucuggcuggugaagaagggcaacagcuaccccaagcugagcaagagcuacaucaacgacaagggcaaggaggugcuggugcuguggggcauccaccaccccagcaccagcgccgaccagcagagccuguaccagaacgccgacgccuacguguucgugggcaccagcagauacagcaagaaguucaagcccgagaucgccaucagacccaaggugagagacagagagggcagaaugaacuacuacuggacccugguggagcccggcgacaagaucaccuucgaggccaccggcaaccugguggugcccagauacgccuucgccauggagagaaacgccggcagcggcaucaucaucagcgacacccccgugcacgacugcaacaccaccugccagacccccaagggcgccaucaacaccagccugcccuuccagaacauccaccccaucaccaucggcaagugccccaaguacgugaagagcaccaagcugagacuggccaccggccugagaaacauccccagcauccagagcagaggccuguucggcgccaucgccggcuucaucgagggcggcuggaccggcaugguggacggcugguacggcuaccaccaccagaacgagcagggcagcggcuacgccgccgaccugaagagcacccagaacgccaucgacaagaucaccaacaaggugaacagcgugaucgagaagaugaacacccaguucaccgccgugggcaaggaguucaaccaccuggagaagagaaucgagaaccugaacaagaagguggacgacggcuuccuggacaucuggaccuacaacgccgagcugcuggugcugcuggagaacgagagaacccuggacuaccacgacagcaacgugaagaaccuguacgagaaggugagaagccagcugaagaacaacgccaaggagaucggcaacggcugcuucgaguucuaccacaagugcgacaacaccugcauggagagcgugaagaacggcaccuacgacuaccccaaguacagcgaggaggccaagcugaacagagaggagaucgacggcgugaagcuggagagcaccagaaucuaccagauccuggccaucuacagcaccguggccagcagccuggugcugguggugagccugggcgccaucagcuucuggaugugcagcaacggcagccugcagugcagaaucugcaucuga

SEQ ID NO: 165208 - RNA, 1701 nt, Artificial Sequence
  derived and/or modified CDS sequence (opt4) from hemagglutinin__InfluenzaA__ADJ18169
augaaggccauccugguggugcugcuguacaccuucgccaccgccaacgccgacacccugugcaucggcuaccacgccaacaacagcaccgacaccguggacaccgugcuggagaagaacgugaccgugacccacagcgugaaccugcuggaggacaagcacaacggcaagcugugcaagcugagaggcguggccccccugcaccugggcaagugcaacaucgccggcuggauccugggcaaccccgagugcgagagccugagcaccgccagcagcuggagcuacaucguggagaccagcagcagcgacaacggcaccugcuaccccggcgacuucaucgacuacgaggagcugagagagcagcugagcagcgugagcagcuucgagagauucgagaucuuccccaagaccagcagcuggcccaaccacgacagcaacaagggcgugaccgccgccugcccccacgccggcgccaagagcuucuacaagaaccugaucuggcuggugaagaagggcaacagcuaccccaagcugagcaagagcuacaucaacgacaagggcaaggaggugcuggugcuguggggcauccaccaccccagcaccagcgccgaccagcagagccuguaccagaacgccgacgccuacguguucgugggcaccagcagauacagcaagaaguucaagcccgagaucgccaucagacccaaggugagagacagagagggcagaaugaacuacuacuggacccugguggagcccggcgacaagaucaccuucgaggccaccggcaaccugguggugcccagauacgccuucgccauggagagaaacgccggcagcggcaucaucaucagcgacacccccgugcacgacugcaacaccaccugccagacccccaagggcgccaucaacaccagccugcccuuccagaacauccaccccaucaccaucggcaagugccccaaguacgugaagagcaccaagcugagacuggccaccggccugagaaacgugcccagcauccagagcagaggccuguucggcgccaucgccggcuucaucgagggcggcuggaccggcaugguggacggcugguacggcuaccaccaccagaacgagcagggcagcggcuacgccgccgaccugaagagcacccagaacgccaucgacaagaucaccaacaaggugaacagcgugaucgagaagaugaacacccaguucaccgccgugggcaaggaguucaaccaccuggagaagagaaucgagaaccugaacaagaagguggacgacggcuuccuggacaucuggaccuacaacgccgagcugcuggugcugcuggagaacgagagaacccuggacuaccacgacagcaacgugaagaaccuguacgagaaggugagaagccagcugaagaacaacgccaaggagaucggcaacggcugcuucgaguucuaccacaagugcgacaacaccugcauggagagcgugaagaacggcaccuacgacuaccccaaguacagcgaggaggccaagcugaacagagaggagaucgacggcgugaagcuggagagcaccagaaucuaccagauccuggccaucuacagcaccguggccagcagccuggugcugguggugagccugggcgccaucagcuucuggaugugcagcaacggcagccugcagugcagaaucugcaucuga

SEQ ID NO: 165209 - RNA, 1701 nt, Artificial Sequence
  derived and/or modified CDS sequence (opt4) from hemagglutinin__InfluenzaA__ADJ18171
augaaggccauccugguggugcugcuguacaccuucgccaccgccaacgccgacacccugugcaucggcuaccacgccaacaacagcaccgacaccguggacaccgugcuggagaagaacgugaccgugacccacagcgugaaccugcuggaggacaagcacaacggcaagcugugcaagcugagaggcguggccccccugcaccugggcaagugcaacaucgccggcuggauccugggcaaccccgagugcgagagccugagcaccgccagcagcuggcccuacaucguggagaccagcagcagcgacaacggcaccugcuaccccggcgacuucaucgacuacgaggagcugagagagcagcugagcagcgugagcagcuucgagagauucgagaucuuccccaagaccagcagcuggcccaaccacgacagcaacaagggcgugaccgccgccugcccccacgccggcgccaagagcuucuaccagaaccugaucuggcuggugaagaagggcaacagcuaccccaagcugagcaagagcuacauccacgacaagggcaaggaggugcuggugcuguggggcauccaccaccccagcaccagcgccgaccagcagagccuguaccagaacgccgacgccuacguguucgugggcaccagcagauacagcaagaaguucaagcccgagaucgccaucagacccaaggugagagacagacagggcagaaugaacuacuacuggacccugguggagcugggcgacaagaucaccuucgaggccaccggcaaccugguggugcccagauacgccuucgccauggagagaaacgccggcagcggcaucaucaucagcgacacccccgugcacaacugcaacaccaccugccagaccaccaccggcgccaucaacaccagccugcccuuccagaacauccaccccaucaccaucggcaagugccccaaguacgugaagagcaccaagcugagacuggccaccggccugagaaacgugcccagcauccagagcagaggccuguucggcgccaucgccggcuucaucgagggcggcuggaccggcaugguggacggcugguacggcuaccaccaccagaacgagcagggcagcggcuacgccgccgaccugaagagcacccagaacgccaucgacaagaucaccaacaaggugaacagcgugaucgagaagaugaacacccaguucaccgccgugggcaaggaguucaaccaccuggagaagagaaucgagaaccugaacaagaagguggacgacggcuuccuggacaucuggaccuacaacgccgagcugcuggugcugcuggagaacgagagaacccuggacuaccacgacagcaacgugaagaaccuguacgagaaggugagaagccagcugaagaacaacgccaaggagaucggcaacggcugcuucgaguucuaccacaagugcgacaacaccugcauggagagcgugaagaacggcaccuacgacuaccccaaguacagcgaggaggccaagcugaacagagaggagaucgacggcgugaagcuggagagcaccagaaucuaccagauccuggccaucuacagcaccguggccagcagccuggugcugguggugagccugggcgccaucagcuucuggaugugcagcaacggcagccugcagugcagaaucugcaucuga

SEQ ID NO: 165210 - RNA, 1701 nt, Artificial Sequence; identical to SEQ ID NO: 163893
  derived and/or modified CDS sequence (opt4) from hemagglutinin__InfluenzaA__ADJ18173

SEQ ID NO: 165211 - RNA, 1701 nt, Artificial Sequence; identical to SEQ ID NO: 163893
  derived and/or modified CDS sequence (opt4) from hemagglutinin__InfluenzaA__ADJ18175

SEQ ID NO: 165212 - RNA, 1701 nt, Artificial Sequence
  derived and/or modified CDS sequence (opt4) from hemagglutinin__InfluenzaA__ADJ18177
augaaggccauccugguggugcugcuguacaccuucgccaccgccaacgccgacacccugugcaucggcuaccacgccaacaacagcaccgacaccguggacaccgugcuggagaagaacgugaccgugacccacagcgugaaccugcuggaggacaagcacaacggcaagcugugcaagcugagaggcguggccccccugcaccugggcaagugcaacaucgccggcuggauccugggcaaccccgagugcgagagccugagcaccgccagcagcuggagcuacaucguggagaccagcagcagcgacaacggcaccugcuaccccggcgacuucaucgacuacgaggagcugagagagcagcugagcagcgugagcagcuucgagagauucgagaucuuccccaagaccagcagcuggcccaaccacgacagcaacaagggcgugaccgccgccugcccccacgccggcgccaagagcuucuacaagaaccugaucuggcuggugaagaagggcaacagcuaccccaagcugagcaagagcuacaucaacgacaagggcaaggaggugcuggugcuguggggcauccaccaccccagcaccagcgccgaccagcagagccuguaccagaacgccgacgccuacguguucgugggcaccagcagauacagcaagaaguucaagcccgagaucgccaucagacccaaggugagaggccaggagggcagaaugaacuacuacuggacccugguggagcccggcgacaagaucaccuucgaggccaccggcaaccugguggugcccagauacgccuucgccauggagagaaacgccggcagcggcaucaucaucagcgacacccccgugcacgacugcaacaccaccugccagacccccaagggcgccaucaacaccagccugcccuuccagaacauccaccccaucaccaucggcaagugccccaaguacgugaagagcaccaagcugagacuggccaccggccugagaaacauccccagcgugcagagcagaggccuguucggcgccaucgccggcuucaucgagggcggcuggaccggcaugguggacggcugguacggcuaccaccaccagaacgagcagggcagcggcuacgccgccgaccugaagagcacccagaacgccaucgacaagaucaccaacaaggugaacagcgugaucgagaagaugaacacccaguucaccgccgugggcaaggaguucaaccaccuggagaagagaaucgagaaccugaacaagaagguggacgacggcuuccuggacaucuggaccuacaacgccgagcugcuggugcugcuggagaacgagagaacccuggacuaccacgacagcaacgugaagaaccuguacgagaaggugagaagccagcugaagaacaacgccaaggagaucggcaacggcugcuucgaguucuaccacaagugcgacaacaccugcauggagagcgugaagaacggcaccuacgacuaccccaaguacagcgaggaggccaagcugaacagagaggagaucgacggcgugaagcuggagagcaccagaaucuaccagauccuggccaucuacagcaccguggccagcagccuggugcugguggugagccugggcgccaucagcuucuggaugugcagcaacggcagccugcagugcagaaucugcaucuga

SEQ ID NO: 165213 - RNA, 1701 nt, Artificial Sequence
  derived and/or modified CDS sequence (opt4) from hemagglutinin__InfluenzaA__ADJ40444
augaaggccauccugguggugcugcuguacaccuucgccaccgccaacgccgacacccugugcaucggcuaccacgccaacaacagcaccgacaccguggacaccgugcugaagaagaacgugaccgugacccacagcgugaaccugcuggaggacaagcacaacggcaagcugugcaagcugagaggcguggccccccugcaccugggcaagugcaacaucgccggcuggauccugggcaaccccgagugcgagagccugagcaccgccagcagcuggagcuacaucguggagaccagcagcagcgacaacggcaccugcuaccccggcgacuucaucgacuacgaggagcugagagagcagcugagcagcgugagcagcuucgagagauucgagaucuuccccaagaccagcagcuggcccaaccacgacagcaacaagggcgugaccgccgccugcccccacgccggcgccaagagcuucuacaagaaccugaucuggcuggugaagaagggcaacagcuaccccaagcugagcaagagcuacaucaacgacaagggcaaggaggugcuggugcuguggggcauccaccaccccagcaccagcgccgaccagcagagccuguaccagaacgccgacgccuacguguucgugggcaccagcagauacagcaagaaguucaagcccgagaucgccaucagacccaaggugagagaccaggagggcagaaugaacuacuacuggacccugguggagcccggcgacaagaucaccuucgaggccaccggcaaccugguggugcccagauacgccuucgccauggagagaaacgccggcagcggcaucaucaucagcgacacccccgugcacgacugcaacaccaccugccagacccccaagggcgccaucaacaccagccugcccuuccagaacauccaccccaucaccaucggcaagugccccaaguacgugaagagcaccaagcugagacuggccaccggccugagaaacgugcccagcauccagagcagaggccuguucggcgccaucgccggcuucaucgagggcggcuggaccggcaugguggacggcugguacggcuaccaccaccagaacgagcagggcagcggcuacgccgccgaccugaagagcacccagaacgccaucgacgagaucaccaacaaggugaacagcgugaucgagaagaugaacacccaguucaccgccgugggcaaggaguucaaccaccuggagaagagaaucgagaaccugaacaagaagguggacgacggcuuccuggacaucuggaccuacaacgccgagcugcuggugcugcuggagaacgagagaacccuggacuaccacgacagcaacgugaagaaccuguacgagaaggugagaagccagcugaagaacaacgccaaggagaucggcaacggcugcuucgaguucuaccacaagugcgacaacaccugcauggagagcgugaagaacggcaccuacgacuaccccaaguacagcgaggaggccaagcugaacagagaggagaucgacggcgugaagcuggagagcaccagaaucuaccagauccuggccaucuacagcaccguggccagcagccuggugcugguggugagccugggcgccaucagcuucuggaugugcagcaacggcagccugcagugcagaaucugcaucuga

SEQ ID NO: 165214 - RNA, 1701 nt, Artificial Sequence
  derived and/or modified CDS sequence (opt4) from hemagglutinin__InfluenzaA__ADJ40454
augaaggccauccugguggugcugcuguacaccuucgccaccgccaacgccgacacccugugcaucggcuaccacgccaacaacagcaccgacaccguggacaccgugcuggagaagaacgugaccgugacccacagcgugaaccugcuggaggacaagcacaacggcaagcugugcaagcugagaggcguggccccccugcaccugggcaagugcaacaucgccggcuggauccugggcaaccccgagugcgagagccugagcaccgccagcagcuggagcuacaucguggagaccagcagcagcgacaacggcaccugcuaccccggcgacuucaucgacuacgaggagcugagagagcagcugagcagcgugagcagcuucgagagauucgagaucuuccccaagaccagcagcuggcccaaccacgacagcaacaagggcgugaccgccgccugcccccacgccggcgccaagagcuucuacaagaaccugaucuggcuggugaagaagggcaacagcuaccccaagcugagcaagagcuacaucaacgacaagggcaaggaggugcuggugcuguggggcauccaccaccccagcaccagcgccgaccagcagagccuguaccagaacgccgacgccuacguguucgugggcaccagcagauacagcaagaaguucaagcccgagaucgccaucagacccaaggugagaaaccaggagggcagaaugaacuacuacuggacccugguggagcccggcgacaagaucaccuucgaggccaccggcaaccugguggugcccagauacgccuucgccauggagagaaacgccggcagcggcaucaucaucagcgacacccccgugcacgacugcaacaccaccugccagacccccaagggcgccaucaacaccagccugcccuuccagaacauccaccccaucaccaucggcaagugccccaaguacgugaagagcaccaagcugagacuggccaccggccugagaaacauccccagcauccagagcagaggccuguucggcgccaucgccggcuucaucgagggcggcuggaccggcaugguggacggcugguacggcuaccaccaccagaacgagcagggcagcggcuacgccgccgaccugaagagcacccagaacgccaucgacaagaucaccaacaaggugaacagcgugaucgagaagaugaacacccaguucaccgccgugggcaaggaguucaaccaccuggagaagagaaucgagaaccugaacaagaagguggacgacggcuuccuggacaucuggaccuacaacgccgagcugcuggugcugcuggagaacgagagaacccuggacuaccacgacagcaacgugaagaaccuguacgagaaggugagaagccagcugaagaacaacgccaaggagaucggcaacggcugcuucgaguucuaccacaagugcgacaacaccugcauggagagcgugaagaacggcaccuacgacuaccccaaguacagcgaggaggccaagcugaacagagaggagaucgacggcguggagcuggagagcaccagaaucuaccagauccuggccaucuacagcaccguggccagcagccuggugcugguggugagccugggcgccaucagcuucuggaugugcagcaacggcagccugcagugcagaaucugcaucuga

SEQ ID NO: 165215 - RNA, 1701 nt, Artificial Sequence
  derived and/or modified CDS sequence (opt4) from hemagglutinin__InfluenzaA__ADJ40464
augaaggccauccugguggugcugcuguacaccuucgccaccgccaacaccgacacccugugcaucggcuaccacgccaacaacagcaccgacaccguggacaccgugcuggagaagaacgugaccgugacccacagcgugaaccugcuggaggacaagcacaacggcaagcugugcaagcugagaggcguggccccccugcaccugggcaagugcaacaucgccggcuggauccugggcaaccccgagugcgagagccugagcaccgccagcagcuggagcuacaucguggagaccagcagcagcgacaacggcaccugcuaccccggcgacuucaucgacuacgaggagcugagagagcagcugagcagcgugagcagcuucgagagauucgagaucuuccccaagaccagcagcuggcccaaccacgacagcaacaagggcgugaccgccgccugcccccacgccggcgccaagagcuucuacaagaaccugaucuggcuggugaagaagggcaacagcuaccccaagcugagcaagagcuacaucaacgacaagggcaaggaggugcuggugcuguggggcauccaccaccccagcaccagcgccgaccagcagagccuguaccagaacgccgacgccuacguguucgugggcaccagcagauacagcaagaaguucaagcccgagaucgccaucagacccaaggugagagaccaggagggcagaaugaacuacuacuggacccugguggagcccggcgacaagaucaccuucgaggccaccggcaaccugguggugcccagauacgccuucgccauggagagaaacgccggcagcggcaucaucaucagcgacacccccgugcacgacugcaacaccaccugccagacccccaagggcgccaucaacaccagccugcccuuccagaacauccaccccaucaccaucggcaagugccccaaguacgugaagagcaccaagcugagacuggccaccggccugagaaacgugcccagcauccagagcagaggccuguucggcgccaucgccggcuucaucgagggcggcuggaccggcaugguggacggcugguacggcuaccaccaccagaacgagcagggcagcggcuacgccgccgaccugaagagcacccagaacgccaucgacgagaucaccaacaaggugaacagcgugaucgagaagaugaacacccaguucaccgccgugggcaaggaguucaaccaccuggagaagagaaucgagaaccugaacaagaagguggacgacggcuuccuggacaucuggaccuacaacgccgagcugcugauccugcuggagaacgagagaacccuggacuaccacgacagcaacgugaagaaccuguacgagaaggugagaagccagcugaagaacaacgccaaggagaucggcaacggcugcuucgaguucuaccacaagugcgacaacaccugcauggagagcgugaagaacggcaccuacgacuaccccaaguacagcgaggaggccaagcugaacagagaggagaucgacggcgugaagcuggagagcaccagaaucuaccagauccuggccaucuacagcaccguggccagcagccuggugcugguggugagccugggcgccaucagcuucuggaugugcagcaacggcagccugcagugcagaaucugcaucuga

SEQ ID NO: 165216 - RNA, 1701 nt, Artificial Sequence
  derived and/or modified CDS sequence (opt4) from hemagglutinin__InfluenzaA__ADJ40474
augaaggccauccugguggugcugcuguacaccuucgccaccgccaacgccgacacccugugcaucggcuaccacgccaacaacagcaccgacaccguggacaccgugcuggagaagaacgugaccgugacccacagcgugaaccugcuggaggacaagcacaacggcaagcugugcaagcugagaggcguggccccccugcaccugggcaagugcaacaucgccggcuggauccugggcaaccccgagugcgagagccugagcaccgccagcagcuggagcuacaucguggagaccagcagcagcgacaacggcaccugcuaccccggcgacuucaucgacuacgaggagcugagagagcagcugagcagcgugagcagcuucgagagauucgagaucuuccccaagaccagcagcuggcccaaccacgacagcaacaagggcgugaccgccgccugcccccacgccggcgccaagagcuucuacaagaaccugaucuggcuggugaagaagggcaacagcuaccccaagcugagcaagagcuacaucaacgacaagggcaaggaggugcuggugcuguggggcauccaccaccccagcaccagcgccgaccagcagagccuguaccagaacgccgacgccuacguguucgugggcaccagcagauacagcaagaaguucaagcccgagaucgccaucagacccaaggugagagagcaggagggcagaaugaacuacuacuggacccugguggagcccggcgacaagaucaccuucgaggccaccggcaaccugguggugcccagauacgccuucgccauggagagaaacgccggcagcggcaucaucaucagcgacacccccgugcacgacugcaacaccaccugccagacccccaagggcgccaucaacaccagccugcccuuccagaacauccaccccaucaccaucggcaagugccccaaguacgugaagagcaccaagcugagacuggccaccggccugagaaacgugcccagcauccagagcagaggccuguucggcgccaucgccggcuucaucgagggcggcuggaccggcaugguggacggcugguacggcuaccaccaccagaacgagcagggcagcggcuacgccgccgaccugaagagcacccagaacgccaucgacgagaucaccaacaaggugaacagcgugaucgagaagaugaacacccaguucaccgccgugggcaaggaguucaaccaccuggagaagagaaucgagaaccugaacaagaagguggacgacggcuuccuggacaucuggaccuacaacgccgagcugcuggugcugcuggagaacgagagaacccuggacuaccacgacagcaacgugaagaaccuguacgagaaggugagaagacagcugaagaacaacgccaaggagaucggcaacggcugcuucgaguucuaccacaagugcgacaacaccugcauggagagcgugaagaacggcaccuacgacuaccccaaguacagcgaggaggccaagcugaacagagaggagaucgacggcgugaagcuggagagcaccagaaucuaccagauccuggccaucuacagcaccguggccagcagccuggugcugguggugagccugggcgccaucagcuucuggaugugcagcaacggcagccugcagugcagaaucugcaucuga

SEQ ID NO: 165217 - RNA, 1701 nt, Artificial Sequence
  derived and/or modified CDS sequence (opt4) from hemagglutinin__InfluenzaA__ADJ40494
augaaggccauccugguggugcugcuguacaccuucgccaccgccaacgccgacacccugugcaucggcuaccacgccaacaacagcaccgacaccguggacaccgugcuggagaagaacgugaccgugacccacagcguggaccugcuggaggacaagcacaacggcaagcugugcaagcugagaggcguggccccccugcaccugggcaagugcaacaucgccggcuggauccugggcaaccccgagugcgagagccugagcaccgccagcagcuggagcuacaucguggagaccagcagcagcgacaacggcaccugcuaccccggcgacuucaucgacuacgaggagcugagagagcagcugagcagcgugagcagcuucgagagauucgagaucuuccccaagaccagcagcuggcccaaccacgacagcaacaagggcgugaccgccgccugcccccacgccggcgccaagagcuucuacaagacccugaucuggcuggugaagaagggcaacagcuaccccaagcugagcaagagcuacaucaacgacaagggcaaggaggugcuggugcuguggggcauccaccaccccagcaccagcgccgaccagcagagccuguaccagaacgccgacgccuacguguucgugggcaccagcagauacagcaagaaguucaagcccgagaucgccaucagacccaaggugagagaccaggagggcagaaugaacuacuacuggacccugguggagcccggcgacaagaucaccuucgaggccaccggcaaccugguggugcccagauacgccuucgccauggagagaaacgccggcagcggcaucaucaucagcgacacccccgugcacgacugcaacaccaccugccagacccccaagggcgccaucaacaccagccugcccuuccagaacauccaccccaucaccaucggcaagugccccaaguacgugaagagcaccaagcugagacuggccaccggccugagaaacgugcccagcauccagagcagaggccuguucggcgccaucgccggcuucaucgagggcggcuggaccggcaugguggacggcugguacggcuaccaccaccagaacgagcagggcagcggcuacgccgccgaccugaagagcacccagaacgccaucgacgagaucaccaacaaggugaacagcgugaucgagaagaugaacacccaguucaccgccgugggcaaggaguucaaccaccuggagaagagaaucgagaaccugaacaagaagguggacgacggcuuccuggacaucuggaccuacaacgccgagcugcuggugcugcuggagaacgagagaacccuggacuaccacgacagcaacgugaagaaccuguacgagaaggugagaagccagcugaagaacaacgccaaggagaucggcaacggcugcuucgaguucuaccacaagugcgacaacaccugcauggagagcgugaagaacggcaccuacgacuaccccaaguacagcgaggaggccaagcugaacagagaggagaucgacggcgugaagcuggagagcaccagaaucuaccagauccuggccaucuacagcaccguggccagcagccuggugcugguggugagccugggcgccaucagcuucuggaugugcagcaacggcagccugcagugcagaaucugcaucuga

SEQ ID NO: 165218 - RNA, 1701 nt, Artificial Sequence
  derived and/or modified CDS sequence (opt4) from hemagglutinin__InfluenzaA__ADJ40514
augaaggccgugcugguggugcugcuguacaccuucgccaccaccaacgccgacacccugugcaucggcuaccacgccaacaacagcaccgacaccguggacaccgugcuggagaagaacgugaccgugacccacagcgugaaccugcuggaggacaagcacaacggcaagcugugcaagcugagaggcguggccccccugcaccugggcaagugcaacaucgccggcuggauccugggcaaccccgagugcgagagccugagcaccgccagcagcuggagcuacaucguggagaccagcagcagcgacaacggcaccugcuaccccggcgacuucaucgacuacgaggagcugagagagcagcugagcagcgugagcagcuucgagagauucgagaucuuccccaagaccagcagcuggcccaaccacgacagcaacaagggcgugaccgccgccugcccccacgccggcgccaagagcuucuacaagaaccugaucuggcuggugaagaagggcaacagcuaccccaagcugagcaagagcuacaucaacgacaagggcaaggaggugcuggugcuguggggcauccaccaccccagcaccagcgccgaccagcagagccuguaccagaacgccgacgccuacguguucgugggcaccagcagauacagcaagaaguucaagcccgagaucgccaucagacccaaggugagaaaccaggagggcagaaugaacuacuacuggacccugguggagcccggcgacaagaucaccuucgaggccaccggcaaccugguggugcccagauacgccuucgccauggagagaaacgccggcagcggcaucaucaucagcgacacccccgugcacgacugcaacaccaccugccagacccccaagggcgccaucaacaccagccugcccuuccagaacauccaccccaucaccaucggcaagugccccaaguacgugaagagcaccaagcugagacuggccaccggccugagaaacgugcccagcauccagagcagaggccuguucggcgccaucgccggcuucaucgagggcggcuggaccggcaugguggacggcugguacggcuaccaccaccagaacgagcagggcagcggcuacgccgccgaccugaagagcacccagaacgccaucgacgagaucaccaacaaggugaacagcgugaucgagaagaugaacacccaguucaccgccgugggcaaggaguucaaccaccuggagaagagaaucgagaaccugaacaagaagguggacgacggcuuccuggacaucuggaccuacaacgccgagcugcuggugcugcuggagaacgagagaacccuggacuaccacgacagcaacgugaagaaccuguacgagaaggugagaagccagcugaagaacaacgccaaggagaucggcaacggcugcuucgaguucuaccacaagugcgacaacaccugcauggagagcgugaagaacggcaccuacgacuaccccaaguacagcgaggaggccaagcugaacagagaggagaucgacggcgugaagcuggagagcaccagaaucuaccagauccuggccaucuacagcaccguggccagcagccuggugcugguggugagccugggcgccaucagcuucuggaugugcagcaacggcagccugcagugcagaaucugcaucuga

SEQ ID NO: 165219 - RNA, 1701 nt, Artificial Sequence; identical to SEQ ID NO: 162729
  derived and/or modified CDS sequence (opt4) from hemagglutinin__InfluenzaA__ADJ40524

SEQ ID NO: 165220 - RNA, 1701 nt, Artificial Sequence; identical to SEQ ID NO: 163082
  derived and/or modified CDS sequence (opt4) from hemagglutinin__InfluenzaA__ADJ40534

SEQ ID NO: 165221 - RNA, 1701 nt, Artificial Sequence
  derived and/or modified CDS sequence (opt4) from hemagglutinin__InfluenzaA__ADJ40554
augaaggccauccugguggugcugcuguacaccuucgccaccgccaacgccgacacccugugcaucggcuaccacgccaacaacagcaccgacaccguggacaccgugcuggagaagaacgugaccgugacccacagcgugaaccugcuggaggacaagcacaacggcaagcugugcaagcugagaggcguggccccccugcaccugggcaagugcaacaucgccggcuggauccugggcaaccccgagugcgagagccugagcaccgccagcagcuggagcuacaucguggagaccagcagcagcgacaacggcaccugcuaccccggcgacuucaucgacuacgaggagcugagagagcagcugagcagcgugagcagcuucgagagauucgagaucuuccccaacaccagcagcuggcccaaccacgacagcaacaagggcgugaccgccgccugcccccacgccggcgccaagagcuucuacaagaaccugaucuggcuggugaagaagggcaacagcuaccccaagcugagcaagagcuacaucaacgacaagggcaaggaggugcuggugcuguggggcauccaccaccccagcaccagcgccgaccagcagagccuguaccagaacgccgacgccuacguguucgugggcaccagcagauacagcaagaaguucaagcccgagaucgccaucagacccaaggugagagaccaggagggcagaaugaacuacuacuggacccugguggagcccggcgacaagaucaccuucgaggccaccggcaaccugguggugcccagauacgccuucgccauggagagaaacgccggcagcggcaucaucaucagcgacacccccgugcacgacugcaacaccaccugccagacccccaagggcgccaucaacaccagccugcccuuccagaacauccaccccaucaccaucggcaagugccccaaguacgugaagagcaccaagcugagacuggccaccggccugagaaacgugcccagcauccagagcagaggccuguucggcgccaucgccggcuucaucgagggcggcuggaccggcaugguggacggcugguacggcuaccaccaccagaacgagcagggcagcggcuacgccgccgaccugaagagcacccagaacgccaucgacgagaucaccaacaaggugaacagcgugaucgagaagaugaacacccaguucaccgccgugggcaaggaguucaaccaccuggagaagagaaucgagaaccugaacaagaagguggacgacggcuuccuggacaucuggaccuacaacgccgagcugcuggugcugcuggagaacgagagaacccuggacuaccacgacagcaacgugaagaaccuguacgagaaggugagaagccagcugaagaacaacgccaaggagaucggcaacggcugcuucgaguucuaccacaagugcgacaacaccugcauggagagcgugaagaacggcaccuacgacuaccccaaguacagcgaggaggccaagcugaacagagaggagaucgacggcgugaagcuggagagcaccagaaucuaccagauccuggccaucuacagcaccguggccagcagccuggugcugguggugagccugggcgccaucagcuucuggaugugcagcaacggcagccugcagugcagaaucugcaucuga

SEQ ID NO: 165222 - RNA, 1701 nt, Artificial Sequence; identical to SEQ ID NO: 162729
  derived and/or modified CDS sequence (opt4) from hemagglutinin__InfluenzaA__ADJ40564

SEQ ID NO: 165223 - RNA, 1701 nt, Artificial Sequence; identical to SEQ ID NO: 162729
  derived and/or modified CDS sequence (opt4) from hemagglutinin__InfluenzaA__ADJ40574

SEQ ID NO: 165224 - RNA, 1701 nt, Artificial Sequence; identical to SEQ ID NO: 164149
  derived and/or modified CDS sequence (opt4) from hemagglutinin__InfluenzaA__ADJ40584

SEQ ID NO: 165225 - RNA, 1701 nt, Artificial Sequence; identical to SEQ ID NO: 162729
  derived and/or modified CDS sequence (opt4) from hemagglutinin__InfluenzaA__ADJ40594

SEQ ID NO: 165226 - RNA, 1701 nt, Artificial Sequence; identical to SEQ ID NO: 163298
  derived and/or modified CDS sequence (opt4) from hemagglutinin__InfluenzaA__ADJ40604

SEQ ID NO: 165227 - RNA, 1701 nt, Artificial Sequence; identical to SEQ ID NO: 163298
  derived and/or modified CDS sequence (opt4) from hemagglutinin__InfluenzaA__ADJ40614

SEQ ID NO: 165228 - RNA, 1701 nt, Artificial Sequence; identical to SEQ ID NO: 162729
  derived and/or modified CDS sequence (opt4) from hemagglutinin__InfluenzaA__ADJ40634

SEQ ID NO: 165229 - RNA, 1701 nt, Artificial Sequence; identical to SEQ ID NO: 162729
  derived and/or modified CDS sequence (opt4) from hemagglutinin__InfluenzaA__ADJ40644

SEQ ID NO: 165230 - RNA, 1701 nt, Artificial Sequence; identical to SEQ ID NO: 162729
  derived and/or modified CDS sequence (opt4) from hemagglutinin__InfluenzaA__ADJ40654

SEQ ID NO: 165231 - RNA, 1701 nt, Artificial Sequence; identical to SEQ ID NO: 162729
  derived and/or modified CDS sequence (opt4) from hemagglutinin__InfluenzaA__ADJ40664

SEQ ID NO: 165232 - RNA, 1701 nt, Artificial Sequence; identical to SEQ ID NO: 162729
  derived and/or modified CDS sequence (opt4) from hemagglutinin__InfluenzaA__ADJ40674

SEQ ID NO: 165233 - RNA, 1701 nt, Artificial Sequence
  derived and/or modified CDS sequence (opt4) from hemagglutinin__InfluenzaA__ADJ41816
augaagaccaucaucgcccugagcuacauguucugccugguguucgcccagaaccugcccggcaacgacaacagcaccgccacccugugccugggccaccacgccgugcccaacggcacccuggugaagaccaucaccaacgaccagaucgaggugaccaacgccaccgagcuggugcagagcagcagcaccggcagaaucugcgacagcccccacagaauccuggacggcaagaacugcacccugaucgacgcccugcugggcgacccccacugcgacggcuuccagaacgagaagugggaccuguucguggagagaagcaaggccuucagcaacugcuaccccuacgacgugcccgacuacgccagccugagaagccugguggccagcagcggcacccuggaguucaucaacgagggcuucaacuggaccggcgugacccagagcggcggcagcugcaccugcaagagaggcagcaacgacagcuucuucagcagacugaacuggcuguacgagagcgagagcaaguaccccgugcugaacgugaccaugcccaacaacggcaaguucgacaagcuguacaucuggggcauccaccaccccagcaccgacaaggagcagaccaaccuguacaucagagccagcggcagagugaccgugagcaccaagagaagccagcagaccgugauccccaacaucggcagcagacccugggugagaggccugagcagcagaaucagcaucuacuggaccaucgugaagcccggcgacauccugcugaucagcagcaccggcaaccugaucgcccccagaggcuacuucaagaucagaaccggcaagagcagcaucaugagaagcgacgcccccaucggcaccugcagcagcgagugcaucacccccaacggcagcauccccaacgacaagcccuuccagaacgugaacaagaucaccuacggcgccugccccagauacgugaagcagaacacccugaagcuggccaccggcaugagaaacgugcccgagaagcagaccagaggcaucuucggcgccaucgccggcuucaucgagaacggcugggagggcaugguggacggcugguacggcuucagacaccagaacagcgagggcaccggccaggccgccgaccugaagagcacccaggccgccaucgaccagaucaacggcaagcugaacagagugaucgagaagaccaacgagaaguuccaccagaucgagaaggaguucagcgagguggagggcagaauccaggaccuggagaaguacguggaggacaccaagaucgaccuguggagcuacaacgccgagcugcugguggcccuggagaaccagcacaccaucgaccugaccgacagcgagaugaacaagcuguucgagaagaccagaaagcagcugagagagaacgccgaggacaugggcaacggcugcuucaagaucuaccacaagugcgacaacgccugcaucggcagcaucagaaacggcaccuacgaccacgacguguacagagacgaggcccugaacaacagauuccagaucaagggcguggagcugaagagcggcuacaaggacuggauccuguggaucagcuucgccaucagcugcuuccugcugugcguggugcugcugggcuucaucaugugggccugccagaagggcaacaucagaugcaacaucugcaucuga

SEQ ID NO: 165234 - RNA, 1701 nt, Artificial Sequence; identical to SEQ ID NO: 162729
  derived and/or modified CDS sequence (opt4) from hemagglutinin__InfluenzaA__ADJ56640

SEQ ID NO: 165235 - RNA, 1701 nt, Artificial Sequence; identical to SEQ ID NO: 163527
  derived and/or modified CDS sequence (opt4) from hemagglutinin__InfluenzaA__ADJ56650

SEQ ID NO: 165236 - RNA, 1701 nt, Artificial Sequence; identical to SEQ ID NO: 162820
  derived and/or modified CDS sequence (opt4) from hemagglutinin__InfluenzaA__ADJ67983

SEQ ID NO: 165237 - RNA, 1701 nt, Artificial Sequence; identical to SEQ ID NO: 162820
  derived and/or modified CDS sequence (opt4) from hemagglutinin__InfluenzaA__ADJ67984

SEQ ID NO: 165238 - RNA, 1701 nt, Artificial Sequence; identical to SEQ ID NO: 162820
  derived and/or modified CDS sequence (opt4) from hemagglutinin__InfluenzaA__ADJ67985

SEQ ID NO: 165239 - RNA, 1701 nt, Artificial Sequence
  derived and/or modified CDS sequence (opt4) from hemagglutinin__InfluenzaA__ADJ80241
augaaggccauccugguggugcugcuguacaccuucgccaccgccaacgccgacacccugugcaucggcuaccacgccaacaacagcaccgacaccguggacaccgugcuggagaagaacgugaccgugacccacagcgugaaccugcuggaggacaagcacaacggcaagcugugcaagcugagaggcguggccccccugcaccugggcaagugcaacaucgccggcuggauccugggcaaccccgagugcgagagccugagcaccgccagcagcuggagcuacaucguggagaccagcagcagcgacaacggcaccugcuaccccggcgacuucaucgacuacgaggagcugagagagcagcugagcagcgugagcagcuucgagagauucgagaucuuccccaagaccagcagcuggcccaaccacgacagcaacaagggcgugaccgccgccugcccccacgccggcgccaagagcuucuacaagaaccugaucuggcuggugaagaagggcaacagcuaccccaagcugagcaagagcuacaucaacgacaagggcaaggaggugcuggugcuguggggcauccaccaccccagcaccagcgccgaccagcagagccuguaccagaacgccgacgccuacguguucgugggcaccagcagauacagcaagaaguucaagcccgagaucgccaucagacccaaggugagaaaccaggagggcagaaugaacuacuacuggacccugguggagcccggcgacaagaucaccuucgaggccaccggcaaccugguggugcccagauacgccuucgccauggagagaaacgccggcagcggcaucaucaucagcgacacccccgugcacgacugcaacaccaccugccagacccccaagggcgccaucaacaccagccugcccuuccagaacauccaccccaucaccaucggcaagugccccaaguacgugaagagcaccaagcugagacuggccaccggccugagaaacgugcccagcauccagagcagaggccuguucggcgccaucgccggcuucaucgagggcggcuggaccggcaugguggacggcugguacggcuaccaccaccagaacgagcagggcagcggcuacgccgccgaccugaagagcacccagaacgccaucgacaagaucaccaacaaggugaacagcgugaucgagaagaugaacacccaguucaccgccgugggcaaggaguucaaccaccuggagaagagaaucgagaaccugaacaagaagguggacgacggcuuccuggacaucuggaccuacaacgccgagcugcuggugcugcuggagaacgagagaacccuggacuaccacgacagcaacgugaagaaccuguacgagaaggugagaagccagcugaagaacaacgccaaggagaucggcaacggcugcuucgaguucuaccacaagugcgacaacaccugcauggagagcgugaagaacggcaccuacgacuaccccaaguacagcgaggaggccaagcugaacagagaggagaucgacggcgugaagcuggagagcaccagaaucuaccagauccuggccaucuacagcaccguggccagcagccuggugcugguggugagccugggcgccaucagcuucuggaugugcagcaacggcagccugcagugcagaaucugcaucuga

SEQ ID NO: 165240 - RNA, 1701 nt, Artificial Sequence
  derived and/or modified CDS sequence (opt4) from hemagglutinin__InfluenzaA__ADJ80242
augaaggccauccugguggugcugcuguacaccuucgccaccgccaacgccgacacccugugcaucggcuaccacgccaacaacagcaccgacaccguggacaccgugcuggagaagaacgugaccgugacccacagcgugaaccugcuggaggacaagcacaacggcaagcugugcaagcugagaggcguggccccccugcaccugggcaagugcaacaucgccggcuggauccugggcaaccccgagugcgagagccugagcaccgccagcagcuggagcuacaucguggagaccagcagcagcgacaacggcaccugcuaccccggcgacuucaucgacuacgaggagcugagagagcagcugagcagcgugagcagcuucgagagauucgagaucuuccccaagaccagcagcuggcccaaccacgacagcaacaagggcgugaccgccgccugcccccacgccggcgccaagagcuucuacaagaaccugaucuggcuggugaagaagggcaacagcuaccccaagcugagcaagagcuacaucaacgacaagggcaaggaggugcuggugcuguggggcauccaccaccccagcaccagcgccgaccagcagagccuguaccagaacgccgacgccuacguguucgugggcaccagcagauacagcaagaaguucaagcccgagaucgccaucagacccaaggugagagaccaggagggcagaaugaacuacuacuggacccugguggagcccggcgacaagaucaccuucgaggccaccggcaaccugguggugcccagauacgccuucgccauggagagaaacgccggcagcggcaucaucaucagcgacacccccgugcacgacugcaacaccaccugccagacccccaagggcgccaucaacaccagccugcccuuccagaacauccaccccaucaccaucggcaagugccccaaguacgugaagagcaccaagcugagacuggccaccggccugagaaacgugcccagcauccagagcagaggccuguucggcgccaucgccggcuucaucgagggcggcuggaccggcaugguggacggcugguacggcuaccaccaccagaacgagcagggcagcggcuacgccgccgaccugaagagcacccagaacgccaucgacgagaucaccaacaaggugaacagcgugaucgagaagaugaacacccaguucaccgccgugggcaaggaguucaaccaccuggagaagagaaucgagaaccugaacaagaagguggacgacggcuuccuggacaucuggaccuacaacgccgagcugcuggugcugcuggagaacgagagaacccuggacuaccacgacagcaacgugaagaaccuguacgagaaggugagaagccagcugaagaacaacgccaaggagaucggcaacggcugcuucgaguucuaccacaagugcgacaacaccugcauggagagcgugaagaacggcaccuacgacuaccccaaguacagcgaggaggccaagcugaacagagaggagaucgacggcgugaagcuggagagcaccagaaucuaccagauccuggccaucuacagcaccgccgccagcagccuggugcugguggugagccugggcgccaucagcuucuggaugugcagcaacggcagccugcagugcagaaucugcaucuga

SEQ ID NO: 165241 - RNA, 1701 nt, Artificial Sequence; identical to SEQ ID NO: 164281
  derived and/or modified CDS sequence (opt4) from hemagglutinin__InfluenzaA__ADJ80243

SEQ ID NO: 165242 - RNA, 1701 nt, Artificial Sequence; identical to SEQ ID NO: 162729
  derived and/or modified CDS sequence (opt4) from hemagglutinin__InfluenzaA__ADJ80634

SEQ ID NO: 165243 - RNA, 1701 nt, Artificial Sequence; identical to SEQ ID NO: 164731
  derived and/or modified CDS sequence (opt4) from hemagglutinin__InfluenzaA__ADJ80644

SEQ ID NO: 165244 - RNA, 1701 nt, Artificial Sequence; identical to SEQ ID NO: 164731
  derived and/or modified CDS sequence (opt4) from hemagglutinin__InfluenzaA__ADJ80654

SEQ ID NO: 165245 - RNA, 1701 nt, Artificial Sequence; identical to SEQ ID NO: 163893
  derived and/or modified CDS sequence (opt4) from hemagglutinin__InfluenzaA__ADJ80674

SEQ ID NO: 165246 - RNA, 1701 nt, Artificial Sequence; identical to SEQ ID NO: 163893
  derived and/or modified CDS sequence (opt4) from hemagglutinin__InfluenzaA__ADJ80684

SEQ ID NO: 165247 - RNA, 1701 nt, Artificial Sequence
  derived and/or modified CDS sequence (opt4) from hemagglutinin__InfluenzaA__ADJ80694
augaaggccauccugguggugcugcuguacaccuucgccaccgccaacgccgacacccugugcaucggcuaccacgccaacaacagcaccgacaccguggacaccgugcuggagaagaacgugaccgugacccacagcgugaacauccuggaggacaaccacaacggcaagcugugcaagcugagaggcguggccccccugcaccugggcaagugcaacaucgccggcuggauccugggcaaccccgagugcgagagccugagcaccgccagcagcuggagcuacaucguggagaccagcagcagcgacaacggcaccugcuaccccggcgacuucaucgacuacgaggagcugagagagcagcugagcagcgugagcagcuucgagagauucgagaucuuccccaagaccagcagcuggcccaaccacgacagcaacaagggcgugaccgccgccugcccccacgccggcgccaagagcuucuacaagaaccugaucuggcuggugaagaagggcaacagcuaccccaagcugagcaagagcuacaucaacgacaagggcaaggaggugcuggugcuguggggcauccaccaccccagcaccagcgccgaccagcagagccuguaccagaacgccgacgccuacguguucgugggcagcagcagauacagcaagaaguucaagcccgagaucgccaucagacccaaggugagagaccaggagggcagaaugaacuacuacuggacccugguggagcccggcgacaagaucaccuucgaggccaccggcaaccugguggugcccagauacgccuucgccauggagagaaacgccggcagcggcaucaucaucagcgacacccccgugcacgacugcaacaccaccugccagacccccaagggcgccaucaacaccagccugcccuuccagaacauccaccccaucaccaucggcaagugccccaaguacgugaagagcaccaagcugagacuggccaccggccugagaaacgugcccagcauccagagcagaggccuguucggcgccaucgccggcuucaucgagggcggcuggaccggcaugguggacggcugguacggcuaccaccaccagaacgagcagggcagcggcuacgccgccgaccugaagagcacccagaacgccaucgacgagaucaccaacaaggugaacagcgugaucgagaagaugaacacccaguucaccgccgugggcaaggaguucaaccaccuggagaagagaaucgagaaccugaacaagaagguggacgacggcuuccuggacaucuggaccuacaacgccgagcugcuggugcugcuggagaacgagagaacccuggacuaccacgacagcaacgugaagaaccuguacgagaaggugagaagccagcugaagaacaacgccaaggaggugggcaacggcugcuucgaguucuaccacaagugcgacaacaccugcauggagagcgugaagaacggcaccuacgacuaccccaaguacagcgaggaggccaagcugaacagagaggagaucgacggcgugaagcuggagagcaccagaaucuaccagauccuggccaucuacagcaccgccgccagcagccuggugcugguggugagccugggcgccaucagcuucuggaugugcagcaacggcagccugcagugcagaaucugcaucuga

SEQ ID NO: 165248 - RNA, 1701 nt, Artificial Sequence; identical to SEQ ID NO: 163893
  derived and/or modified CDS sequence (opt4) from hemagglutinin__InfluenzaA__ADJ80704

SEQ ID NO: 165249 - RNA, 1701 nt, Artificial Sequence
  derived and/or modified CDS sequence (opt4) from hemagglutinin__InfluenzaA__ADJ80714
augaaggccauccugguggugcugcuguacaccuucgccaccgccaacgccgacacccugugcaucggcuaccacgccaacaacagcaccgacaccguggacaccgugcuggagaagaacgugaccgugacccacagcgugaaccugcuggaggacaagcacaacggcaagcugugcaagcugagaggcgccgccccccugcaccugggcaagugcaacaucgccggcuggauccugggcaaccccgagugcgagagccugagcaccgccagcagcuggagcuacaucguggagaccagcagcagcgacaacggcaccugcuaccccggcgacuucaucgacuacgaggagcugagagagcagcugagcagcgugagcagcuucgagagauucgagaucuuccccaagaccagcagcuggcccaaccacgacagcaacaagggcgugaccgccgccugcccccacgccggcgccaagagcuucuacaagaaccugaucuggcuggugaagaagggcaacagcuaccccaagcugagcaagagcuacaucaacgacaagggcaaggaggugcuggugcuguggggcauccaccaccccagcaccagcgccgaccagcagagccuguaccagaacgccgacgccuacguguucgugggcaccagcagauacagcaagaaguucaagcccgagaucgccaucagacccaaggugagagaccaggagggcagaaugaacuacuacuggacccugguggagcccggcgacaagaucaccuucgaggccaccggcaaccugguggugcccagauacgccuucgccauggagagaaacgccggcagcggcaucaucaucagcgacacccccgugcacgacugcaacaccaccugccagacccccaagggcgccaucaacaccagccugcccuuccagaacauccaccccaucaccaucggcaagugccccaaguacgugaagagcaccaagcugagacuggccaccggccugagaaacgugcccagcauccagagcagaggccuguucggcgccaucgccggcuucaucgagggcggcuggaccggcaugguggacggcugguacggcuaccaccaccagaacgagcagggcagcggcuacgccgccgaccugaagagcacccagaacgccaucgacaagaucaccaacaaggugaacagcgugaucgagaagaugaacacccaguucaccgccgugggcaaggaguucaaccaccuggagaagagaaucgagaaccugaacaagaagguggacgacggcuuccuggacaucuggaccuacaacgccgagcugcuggugcugcuggagaacgagagaacccuggacuaccacgacagcaacgugaagaaccuguacgagaaggugagaagccagcugaagaacaacgccaaggagaucggcaacggcugcuucgaguucuaccacaagugcgacaacaccugcauggagagcgugaagaacggcaccuacgacuaccccaaguacagcgaggaggccaagcugaacagagaggagaucgacggcgugaagcuggagagcaccagaaucuaccagauccuggccaucuacagcaccguggccagcagccuggugcugguggugagccugggcgccaucagcuucuggaugugcagcaacggcagccugcagugcagaaucugcaucuga

SEQ ID NO: 165250 - RNA, 1701 nt, Artificial Sequence; identical to SEQ ID NO: 162729
  derived and/or modified CDS sequence (opt4) from hemagglutinin__InfluenzaA__ADJ80724

SEQ ID NO: 165251 - RNA, 1701 nt, Artificial Sequence; identical to SEQ ID NO: 163893
  derived and/or modified CDS sequence (opt4) from hemagglutinin__InfluenzaA__ADJ80734

SEQ ID NO: 165252 - RNA, 1701 nt, Artificial Sequence; identical to SEQ ID NO: 163893
  derived and/or modified CDS sequence (opt4) from hemagglutinin__InfluenzaA__ADJ80744

SEQ ID NO: 165253 - RNA, 1701 nt, Artificial Sequence; identical to SEQ ID NO: 163893
  derived and/or modified CDS sequence (opt4) from hemagglutinin__InfluenzaA__ADJ80754

SEQ ID NO: 165254 - RNA, 1701 nt, Artificial Sequence
  derived and/or modified CDS sequence (opt4) from hemagglutinin__InfluenzaA__ADJ80774
augaaggccauccugguggugcugcuguacaccuucgccaccgccaacgccgacacccugugcaucggcuaccacgccaacaacagcaccgacaccguggacaccgugcuggagaagaacgugaccgugacccacagcgugaacauccuggaggacaagcacaacggcaagcugugcaagcugagaggcguggccccccugcaccugggcaagugcaacaucgccggcuggauccugggcaaccccgagugcgagagccugagcaccgccaacagcuggagcuacaucguggagaccagcagcagcgacaacggcaccugcuaccccggcgacuucaucgacuacgaggagcugagagagcagcugagcagcgugagcagcuucgagagauucgagaucuuccccaagaccagcagcuggcccaaccacgacagcaacaagggcgugaccgccgccugcccccacgccggcgccaagagcuucuacaagaaccugaucuggcuggugaagaagggcaacagcuaccccaagcugagcaagagcuacaucaacgacaagggcaaggaggugcuggugcuguggggcauccaccaccccagcaccagcgccgaccagcagagccuguaccagaacgccgacgccuacguguucgugggcagcagcagauacagcaagaaguucaagcccgagaucgccaucagacccaaggugagagaccaggagggcagaaugaacuacuacuggacccugguggagcccggcgacaagaucaccuucgaggccaccggcaaccugguggugcccagauacgccuucgccauggagagaaacgccggcagcggcaucaucaucagcgacacccccgugcacgacugcaacaccaccugccagacccccaagggcgccaucaacaccagccugcccuuccagaacauccaccccaucaccaucggcaagugccccaaguacgugaagagcaccaagcugagacuggccaccggccugagaaacgugcccagcauccagagcagaggccuguucggcgccaucgccggcuucaucgagggcggcuggaccggcaugguggacggcugguacggcuaccaccaccagaacgagcagggcagcggcuacgccgccgaccugaagagcacccagaacgccaucgacgagaucaccaacaaggugaacagcgugaucgagaagaugaacacccaguucaccgccgugggcaaggaguucaaccaccuggagaagagaaucgagaaccugaacaagaagguggacgacggcuuccuggacaucuggaccuacaacgccgagcugcuggugcugcuggagaacgagagaacccuggacuaccacgacagcaacgugaagaaccuguacgagaaggugagaagccagcugaagaacaacgccaaggaggugggcaacggcugcuucgaguucuaccacaagugcgacaacaccugcauggagagcgugaagaacggcaccuacgacuaccccaaguacagcgaggaggccaagcugaacagagaggagaucgacggcgugaagcuggagagcaccagaaucuaccagauccuggccaucuacagcaccgccgccagcagccuggugcugguggugagccugggcgccaucagcuucuggaugugcagcaacggcagccugcagugcagaaucugcaucuga

SEQ ID NO: 165255 - RNA, 1701 nt, Artificial Sequence
  derived and/or modified CDS sequence (opt4) from hemagglutinin__InfluenzaA__ADJ80784
augaaggccauccugguggugcugcuguacaccuucgccaccgccaacgccgacacccugugcaucggcuaccacgccaacaacagcaccgacaccguggacaccgugcuggagaagaacgugaccgugacccacagcgugaaccugcuggaggacaagcacaacggcaagcugugcaagcugagaggcguggccccccugcaccugggcaagugcaacaucgccggcuggauccugggcaaccccgagugcgagagccugagcaccgccagcagcuggagcuacaucguggagaccagcagcagcgacaacggcaccugcuaccccggcgacuucaucgacuacgaggagcugagagagcagcugagcagcgugagcagcuucgagagauucgagaucuuccccaagaccagcagcuggcccaaccacgacagcaacaagggcgugaccgccgccugcccccacgccggcgccaagagcuucuacaagaaccugaucuggcuggugaagaagggcaacagcuaccccaagcugagcaagagcuacaucaacgacaagggcaaggaggugcuggugcuguggggcauccaccaccccagcaccagcgccgaccagcagagccuguaccagaacgccgacgccuacguguucgugggcaccagcagauacagcaagaaguucaagcccgagaucgccaucagacccaaggugagagaccaggagggcagaaugaacuacuacuggacccugguggagcccggcgacaagaucaccuucgaggccaccggcaaccugguggugcccagauacgccuucgccauggagagaaacgccggcagcggcaucaucaucagcgacacccccgugcacgacugcaacaccaccugccagacccccaagggcgccaucaacaccagccugcccuuccacaacauccaccccaucaccaucggcaagugccccaaguacgugaagagcaccaagcugagacuggccaccggccugagaaacgugcccagcauccagagcagaggccuguucggcgccaucgccggcuucaucgagggcggcuggaccggcaugguggacggcugguacggcuaccaccaccagaacgagcagggcagcggcuacgccgccgaccugaagagcacccagaacgccaucgacaagaucaccaacaaggugaacagcgugaucgagaagaugaacacccaguucaccgccgugggcaaggaguucaaccaccuggagaagagaaucgagaaccugaacaagaagguggacgacggcuuccuggacaucuggaccuacaacgccgagcugcuggugcugcuggagaacgagagaacccuggacuaccacgacagcaacgugaagaaccuguacgagaaggugagaagccagcugaagaacaacgccaaggagaucggcaacggcugcuucgaguucuaccacaagugcgacaacaccugcauggagagcgugaagaacggcaccuacgacuaccccaaguacagcgaggaggccaagcugaacagagaggagaucgacggcgugaagcuggagagcaccagaaucuaccagauccuggccaucuacagcaccguggccagcagccuggugcugguggugagccugggcgccaucagcuucuggaugugcagcaacggcagccugcagugcagaaucugcaucuga

SEQ ID NO: 165256 - RNA, 1701 nt, Artificial Sequence; identical to SEQ ID NO: 163893
  derived and/or modified CDS sequence (opt4) from hemagglutinin__InfluenzaA__ADJ80794

SEQ ID NO: 165257 - RNA, 1701 nt, Artificial Sequence; identical to SEQ ID NO: 164731
  derived and/or modified CDS sequence (opt4) from hemagglutinin__InfluenzaA__ADJ80804

SEQ ID NO: 165258 - RNA, 1701 nt, Artificial Sequence
  derived and/or modified CDS sequence (opt4) from hemagglutinin__InfluenzaA__ADJ80814
augaaggccauccugguggugcugcuguacaccuucgccaccgccaacgccgacacccugugcaucggcuaccacgccaacaacagcaccgacaccguggacaccgugcuggagaagaacgugaccgugacccacagcgugaaccugcuggaggacaagcacaacggcaagcugugcaagcugagaggcguggccccccugcaccugggcaagugcaacaucgccggcuggauccugggcaaccccgagugcgagagccugagcaccgccagcagcuggagcuacaucguggagaccagcagcagcgacaacggcaccugcuaccccggcgacuucaucgacuacgaggagcugagagagcagcugagcagcgugagcagcuucgagagauucgagaucuuccccaagaccagcagcuggcccaaccacgacagcaacaagggcgugaccgccgccugccccagagccggcgccaagagcuucuacaagaaccugaucuggcuggugaagaagggcaacagcuaccccaagcugagcaagagcuacaucaacgacaagggcaaggaggugcuggugcuguggggcauccaccaccccagcaccagcgccgaccagcagagccuguaccagaacgccgacgccuacguguucgugggcaccagcagauacagcaagaaguucaagcccgagaucgccaucagacccaaggugagagaccaggagggcagaaugaacuacuacuggacccugguggagcccggcgacaagaucaccuucgaggccaccggcaaccugguggugcccagauacgccuucgccaucgagagaaacgccggcagcggcaucaucaucagcgacacccccgugcacgacugcaacaccaccugccagacccccaagggcgccaucaacaccagccugcccuuccagaacauccaccccaucaccaucggcaagugccccaaguacgugaagagcaccaagcugagacuggccaccggccugagaaacgugcccagcauccagagcagaggccuguucggcgccaucgccggcuucaucgagggcggcuggaccggcaugguggacggcugguacggcuaccaccaccagaacgagcagggcagcggcuacgccgccgaccugaagagcacccagaacgccaucgacaagaucaccaacaaggugaacagcgugaucgagaagaugaacacccaguucaccgccgugggcaaggaguucaaccaccuggagaagagaaucgagaaccugaacaagaagguggacgacggcuuccuggacaucuggaccuacaacgccgagcugcuggugcugcuggagaacgagagaacccuggacuaccacgacagcaacgugaagaaccuguacgagaaggugagaagccagcugaagaacaacgccaaggagaucggcaacggcugcuucgaguucuaccacaagugcgacaacaccugcauggagagcgugaagaacggcaccuacgacuaccccaaguacagcgaggaggccaagcugaacagagaggagaucgacggcgugaagcuggagagcaccagaaucuaccagauccuggccaucuacagcaccguggccagcagccuggugcugguggugagccugggcgccaucagcuucuggaugugcagcaacggcagccugcagugcagaaucugcaucuga

SEQ ID NO: 165259 - RNA, 1701 nt, Artificial Sequence
  derived and/or modified CDS sequence (opt4) from hemagglutinin__InfluenzaA__ADJ80834
augaaggccauccugguggugcugcuguacaccuucgccaccgccaacgccgacacccugugcaucggcuaccacgccaacaacagcaccgacaccguggacaccgugcuggagaagaacgugaccgugacccacagcgugaaccugcuggaggacaagcacaacggcaagcugugcaagcugagaggcguggccccccugcaccugggcaagugcaacaucgccggcuggauccugggcaaccccgagugcgagagccugagcaccgccagcagcuggagcuacaucguggagaccagcagcagcgacaacggcaccugcuaccccggcgacuucaucgacuacgaggagcugagagagcagcugagcagcgugagcagcuucgagagauucgagaucuuccccaagaccagcagcuggcccaaccacgacagcaacaagggcgugaccgccgccugcccccacgccggcgccaagagcuucuacaagaaccugaucuggcuggugaagaagggcaacagcuaccccaagcugagcaagagcuacaucaacgacaagggcaaggaggugcuggugcuguggggcauccaccaccccagcaccagcaccgaccagcagagccuguaccagaacgccgacgccuacguguucgugggcaccagcagauacagcaagaaguucaagcccgagaucgccaucagacccaaggugagagaccaggagggcagaaugaacuacuacuggacccugguggagcccggcgacaagaucaccuucgaggccaccggcaaccugguggugcccagauacgccuucgccauggagagaaacagcggcagcggcaucaucaucagcgacacccccgugcacuacugcaacaccaccugccagacccccaagggcgccaucaacaccagccugcccuuccagaacauccaccccaucaccaucggcaagugccccaaguacgugaagagcaccaagcugagacuggccaccggccugagaaacgugcccagcauccagagcagaggccuguucggcgccaucgccggcuucaucgagggcggcuggaccggcaugguggacggcugguacggcuaccaccaccagaacgagcagggcagcggcuacgccgccgaccugaagagcacccagaacgccaucgacgagaucaccaacaaggugaacagcgugaucgagaagaugaacacccaguucaccgccgugggcaaggaguucaaccaccuggagaagagaaucgagaaccugaacaagaagguggacgacggcuuccuggacaucuggaccuacaacgccgagcugcuggugcugcuggagaacgagagaacccuggacuaccacgacagcaacgugaagaaccuguacgagaaggugagaagccagcugaagaacaacgccaaggagaucggcaacggcugcuucgaguucuaccacaagugcgacaacaccugcauggagagcgugaagaacggcaccuacgacuaccccaaguacagcgaggaggccaagcugaacagagaggagaucgacggcgugaagcuggagagcaccagaaucuaccagauccuggccaucuacagcaccguggccagcagccuggugcugguggugagccugggcgccaucagcuucuggaugugcagcaacggcagccugcagugcagaaucugcaucuga

SEQ ID NO: 165260 - RNA, 1701 nt, Artificial Sequence; identical to SEQ ID NO: 164931
  derived and/or modified CDS sequence (opt4) from hemagglutinin__InfluenzaA__ADJ80848

SEQ ID NO: 165261 - RNA, 1701 nt, Artificial Sequence
  derived and/or modified CDS sequence (opt4) from hemagglutinin__InfluenzaA__ADJ80858
augaagaccauccugguggugcugcuguacaccuucgccaccgccaacgccgacacccugugcaucggcuaccacgccaacaacagcaccgacaccguggacaccgugcuggagaagaacgugaccgugacccacagcgugaaccugcuggaggacaagcacaacggcaagcugugcaagcugagaggcguggccccccugcaccugggcaagugcaacaucgccggcuggauccugggcaaccccgagugcgagagccugagcaccgccagcagcuggagcuacaucguggagaccagcagcagcgacaacggcaccugcuaccccggcgacuucaucgacuacgaggagcugagagagcagcugagcagcgugagcagcuucgagagauucgagaucuuccccaagaccagcagcuggcccaaccacgacagcaacaagggcgugaccgccgccugcccccacgccggcgccaagagcuucuacaagaaccugaucuggcuggugaagaagggcaacagcuaccccaagcugagcaagagcuacaucaacgacaagggcaaggaggugcuggugcuguggggcauccaccaccccagcaccagcgccgaccagcagagccuguaccagaacgccgacgccuacguguucgugggcaccagcagauacagcaagaaguucaagcccgagaucgccaucagacccaaggugagagaccaggagggcagaaugaacuacuacuggacccugguggagcccggcgacaagaucaccuucgaggccaccggcaaccugguggugcccagauacgccuucgccauggagagaaacgccggcagcggcaucaucaucagcgacacccccgugcacgacugcaacaccaccugccagacccccaagggcgccaucaacaccagccugcccuuccagaacauccaccccaucaccaucggcaagugccccaaguacgugaagagcaccaagcugagacuggccaccggccugagaaacgugcccagcauccagagcagaggccuguucggcgccaucgccggcuucaucgagggcggcuggaccggcaugguggacggcugguacggcuaccaccaccagaacgagcagggcagcggcuacgccgccgaccugaagagcacccagaacgccaucgacaagaucaccaacaaggugaacagcgugaucgagaagaugaacacccaguucaccgccgugggcaaggaguucaaccaccuggagaagagaaucgagaaccugaacaagaagguggacgacggcuuccuggacaucuggaccuacaacgccgagcugcuggugcugcuggagaacgagagaacccuggacuaccacgacagcaacgugaagaaccuguacgagaaggugagaagccagcugaagaacaacgccaaggagaucggcaacggcugcuucgaguucuaccacaagugcgacaacaccugcauggagagcgugaagaacggcaccuacgacuaccccaaguacagcgaggaggccaagcugaacagagaggagaucgacggcgugaagcuggagagcaccagaaucuaccagauccuggccaucuacagcaccguggccagcagccuggugcugguggugagccugggcgccaucagcuucuggaugugcagcaacggcagccugcagugcagaaucugcaucuga

SEQ ID NO: 165262 - RNA, 1701 nt, Artificial Sequence
  derived and/or modified CDS sequence (opt4) from hemagglutinin__InfluenzaA__ADJ80868
augaaggccauccugguggugcugcuguacaccuucgccaccgccaacgccgacacccugugcaucggcuaccacgccaacaacagcaccgacaccguggacaccgugcuggagaagaacgugaccgugacccacagcgugaaccugcuggaggacaagcacaacggcaagcugugcaagcugagaggcguggccccccugcaccugggcaagugcaacaucgccggcuggauccugggcaaccccgagugcgagagccugagcaccgccagcagcuggagcuacaucguggagaccagcagcagcgacaacggcaccugcuaccccggcgacuucaucgacuacgaggagcugagagagcagcugagcagcgugagcagcuucgagagauucgagaucuuccccaagaccagcagcuggcccaaccacgacagcaacaagggcgugaccgccgccugccccaacgccggcgccaagagcuucuacaagaaccugaucuggcuggugaagaagggcaacagcuaccccaagcugagcaagagcuacaucaacgacaagggcaaggaggugcuggugcuguggggcauccaccaccccagcaccagcgccgaccagcagagccuguaccagaacgccgacgccuacguguucgugggcaccagcagauacagcaagaaguucaagcccgagaucgccaucagacccaaggugagagaccaggagggcagaaugaacuacuacuggacccugguggagcccggcggcaagaucaccuucgaggccaccggcaaccugguggugcccagauacgccuucgccauggagagaaacgccggcagcggcaucaucaucagcgacacccccgugcacgacugcaacaccaccugccagacccccaagggcgccaucaacaccagccugcccuuccagaacauccaccccaucaccaucggcaagugccccaaguacgugaagagcaccaagcugagacuggccaccggccugagaaacgugcccagcauccagagcagaggccuguucggcgccaucgccggcuucaucgagggcggcuggaccggcaugguggacggcugguacggcuaccaccaccagaacgagcagggcagcggcuacgccgccgaccugaagagcacccagaacgccaucgacaagaucaccaacaaggugaacagcgugaucgagaagaugaacacccaguucaccgccgugggcaaggaguucaaccaccuggagaagagaaucgagaaccugaacaagaagguggacgacggcuuccuggacaucuggaccuacaacgccgagcugcuggugcugcuggagaacgagagaacccuggacuaccacgacagcaacgugaagaaccuguacgagaaggugagaagccagcugaagaacaacgccaaggagaucggcaacggcugcuucgaguucuaccacaagugcgacaacaccugcauggagagcgugaagaacggcaccuacgacuaccccaaguacagcgaggaggccaagcugaacagagaggagaucgacggcgugaagcuggagagcaccagaaucuaccagauccuggccaucuacagcaccguggccagcagccuggugcugguggugagccugggcgccaucagcuucuggaugugcagcaacggcagccugcagugcagaaucugcaucuga

SEQ ID NO: 165263 - RNA, 1701 nt, Artificial Sequence; identical to SEQ ID NO: 163893
  derived and/or modified CDS sequence (opt4) from hemagglutinin__InfluenzaA__ADJ80883

SEQ ID NO: 165264 - RNA, 1701 nt, Artificial Sequence; identical to SEQ ID NO: 163893
  derived and/or modified CDS sequence (opt4) from hemagglutinin__InfluenzaA__ADJ80893

SEQ ID NO: 165265 - RNA, 1701 nt, Artificial Sequence; identical to SEQ ID NO: 163893
  derived and/or modified CDS sequence (opt4) from hemagglutinin__InfluenzaA__ADJ80910

SEQ ID NO: 165266 - RNA, 1701 nt, Artificial Sequence; identical to SEQ ID NO: 162729
  derived and/or modified CDS sequence (opt4) from hemagglutinin__InfluenzaA__ADJ80927

SEQ ID NO: 165267 - RNA, 1701 nt, Artificial Sequence
  derived and/or modified CDS sequence (opt4) from hemagglutinin__InfluenzaA__ADJ80937
augaaggccauccugguggugcugcuguacaccuucgccaccgccaacgccgacacccugugcaucggcuaccacgccaacaacagcaccgacaccguggacaccgugcuggagaagaacgugaccgugacccacagcgugaaccugcuggaggacaagcacaacggcaagcugugcaagcugagaggcguggccccccugcaccugggcaagugcaacaucgccggcuggauccugggcaaccccgagugcgagagccugagcaccgccagcagcuggagcuacaucguggagaccagcagcagcgacaacggcaccugcuaccccggcgacuucaucgacuacgaggagcugagagagcagcugagcagcgugagcagcuucgagagauucgagaucuuccccaagaccagcagcuggcccaaccacgacagcaacaagggcgugaccgccgccugcccccacgccggcgccaagagcuucuacaagaaccugaucuggcuggugaagaagggcaacagcuaccccaagcugagcaagagcuacaucaacgacaagggcaaggaggugcuggugcuguggggcauccaccaccccagcaccagcgccgaccagcagagccuguaccagaacgccgacgccuacgccuucgugggcaccagcagauacagcaagaaguucaagcccgagaucgccaucagacccaaggugagagaccaggagggcagaaugaacuacuacuggacccugguggagcccggcgacaagaucaccuucgaggccaccggcaaccugguggugcccagauacgccuucgccauggagagaaacgccggcagcggcaucaucaucagcgacacccccgugcacaacugcaacaccaccugccagacccccaagggcgccaucaacaccagccugcccuuccagaacauccaccccaucaccaucggcaagugccccaaguacgugaagagcaccaagcugagacuggccaccggccugagaaacgugcccagcauccagagcagaggccuguucggcgccaucgccggcuucaucgagggcggcuggaccggcaugguggacggcugguacggcuaccaccaccagaacgagcagggcagcggcuacgccgccgaccugaagagcacccagaacgccaucgacgagaucaccaacaaggugaacagcgugaucgagaagaugaacacccaguucaccgccgugggcaaggaguucaaccaccuggagaagagaaucgagaaccugaacaagaagguggacgacggcuuccuggacaucuggaccuacaacgccgagcugcuggugcugcuggagaacgagagaacccuggacuaccacgacagcaacgugaagagccuguacgagaaggugagaagccagcugaagaacaacgccaaggagaucggcaacggcugcuucgaguucuaccacaagugcgacaacaccugcauggagagcgugaagaacggcaccuacgacuaccccaaguacagcgaggaggccaagcugaacagagaggagaucgacggcgugaagcuggagagcaccagaaucuaccagauccuggccaucuacagcaccguggccagcagccuggugcugguggugagccugggcgccaucagcuucuggaugugcagcaacggcagccugcagugcagaaucugcaucuga

SEQ ID NO: 165268 - RNA, 1701 nt, Artificial Sequence; identical to SEQ ID NO: 163893
  derived and/or modified CDS sequence (opt4) from hemagglutinin__InfluenzaA__ADJ80947

SEQ ID NO: 165269 - RNA, 1701 nt, Artificial Sequence; identical to SEQ ID NO: 163893
  derived and/or modified CDS sequence (opt4) from hemagglutinin__InfluenzaA__ADJ80967

SEQ ID NO: 165270 - RNA, 1701 nt, Artificial Sequence; identical to SEQ ID NO: 163893
  derived and/or modified CDS sequence (opt4) from hemagglutinin__InfluenzaA__ADJ80977

SEQ ID NO: 165271 - RNA, 1701 nt, Artificial Sequence
  derived and/or modified CDS sequence (opt4) from hemagglutinin__InfluenzaA__ADJ80993
augaaggccauccugguggugcugcuguacaccuucgccaccgccaacgccgacacccugugcaucggcuaccacgccaacaacagcaccgacaccguggacaccgugcuggagaagaacgugaccgugacccacagcgugaaccugcuggaggacaagcacaacggcaagcugugcaagcugagaggcguggccccccugcaccugggcaagugcaacaucgccggcuggauccugggcaaccccgagugcgagagccugagcaccgccagcagcuggagcuacaucguggagaccagcagcagcgacaacggcaccugcuaccccggcgacuucaucgacuacgaggagcugagagagcagcugagcagcgugagcagcuucgagagauucgagaucuuccccaagaccagcagcuggcccaaccacgacagcaacaagggcgugaccgccgccugccccaacgccggcgccaagagcuucuacaagaaccugaucuggcuggugaagaagggcaacagcuaccccaagcugagcaagagcuacaucaacgacaagggcaaggaggugcuggugcuguggggcauccaccaccccagcaccagcgccgaccagcagagccuguaccagaacgccgacgccuacguguucgugggcaccagcagauacagcaagaaguucaagcccgagaucgccaucagacccaaggugagagaccaggagggcagaaugaacuacuacuggacccugguggagcccggcgacaagaucaccuucgaggccaccggcaaccugguggugcccagauacgccuucgccauggagagaaacgccggcagcggcaucaucaucagcgacacccccgugcacgacugcaacaccaccugccagacccccaagggcgccaucaacaccagccugcccuuccagaacauccaccccaucaccaucggcaagugccccaaguacgugaagagcaccaagcugagacuggccaccggccugagaaacgugcccagcauccagagcagaggccuguucggcgccaucgccggcuucaucgagggcggcuggaccggcaugguggacggcugguacggcuaccaccaccagaacgagcagggcagcggcuacgccgccgaccugaagagcacccagaacgccaucgacaagaucaccaacaaggugaacagcgugaucgagaagaugaacacccaguucaccgccgugggcaaggaguucaaccaccuggagaagagaaucgagaaccugaacaagaagguggacgacggcuuccuggacaucuggaccuacaacgccgagcugcuggugcugcuggagaacgagagaacccuggacuaccacgacagcaacgugaagaaccuguacgagaaggugagaagccagcugaagaacaacgccaaggagaucggcaacggcugcuucgaguucuaccacaagugcgacaacaccugcauggagagcgugaagaacggcaccuacgacuaccccaaguacagcgaggaggccaagcugaacagagaggagaucgacggcgugaagcuggagagcaccagaaucuaccagauccuggccaucuacagcaccguggccagcagccuggugcugguggugagccugggcgccaucagcuucuggaugugcagcaacggcagccugcagugcagaaucugcaucuga

SEQ ID NO: 165272 - RNA, 1701 nt, Artificial Sequence
  derived and/or modified CDS sequence (opt4) from hemagglutinin__InfluenzaA__ADJ81003
augaaggccauccugguggugcugcuguacaccuucgccaccgccaacgccgacacccugugcaucggcuaccacgccaacaacagcaccgacaccguggacaccgugcuggagaagaacgugaccgugacccacagcgugaaccugcuggaggacaagcacaacggcaagcugugcaagcugagaggcguggccccccugcaccugggcaagugcaacaucgccggcuggauccugggcaaccccgagugcgagagccugagcaccgccagcagcuggagcuacaucguggagaccagcagcagcgacaacggcaccugcuaccccggcgacuucaucgacuacgaggagcugagagagcagcugagcagcgugagcagcuucgagagauucgagaucuuccccaagaccagcagcuggcccaaccacgacagcaacaagggcgugaccgccgccugcccccacgccggcgccaagagcuucuacaagaaccugaucuggcuggugaagaagggcaacagcuaccccaagcugagcaagagcuacaucaacgacaagggcaaggaggugcuggugcuguggggcauccaccaccccagcaccagcgccgaccagcagagccuguaccagaacgccgacgccuacguguucgugggcaccagcagauacagcaagaaguucaagcccgagaucgccaucagacccaaggugagagaccaggagggcagaaugaacuacuacuggacccugguggagcccggcgacaagaucaccuucgaggccaccggcaaccugguggugcccagauacgccuucgccauggagagaaacgccggcagcggcaucaucaucagcgacacccccgugcacgacugcaacaccaccugccagacccccaagggcgccaucaacaccagccugcccuuccagaacauccaccccaucaccaucggcaagugccccaaguacgugaagagcaccaagcugagacuggccaccggccugagaaacgugcccagcauccagagcagaggccuguucggcgccaucgccggcuucaucgagggcggcuggaccggcaugguggacggcugguacggcuaccaccaccagaacgagcagggcagcggcuacgccgccgaccugaagagcacccagaacgccaucgacaagaucaccaacaaggugaacagcgugaucgagaagaugaacacccaguucaccgccgugggcaaggaguucaaccaccuggagaagagaaucgagaaccugaacaagaagguggacgacggcuuccuggacaucuggaccuacaacgccgagcugcuggugcugcuggagaacgagagaacccuggacuaccacgacagcaacgugaagaaccuguacgagaaggugagaagccagcugaagaacaacgccaaggagaucggcaacggcugcuucgaguucuaccacaagugcgacaacaccugcauggagagcgugaagaacggcaccuacgacuaccccaaguacagcgaggaggccaagcugaacagagagaagaucgacggcgugaagcuggagagcaccagaaucuaccagauccuggccaucuacagcaccguggccagcagccuggugcugguggugagccugggcgccaucagcuucuggaugugcagcaacggcagccugcagugcagaaucugcaucuga

SEQ ID NO: 165273 - RNA, 1701 nt, Artificial Sequence; identical to SEQ ID NO: 164931
  derived and/or modified CDS sequence (opt4) from hemagglutinin__InfluenzaA__ADJ81013

SEQ ID NO: 165274 - RNA, 1701 nt, Artificial Sequence
  derived and/or modified CDS sequence (opt4) from hemagglutinin__InfluenzaA__ADJ81023
augaaggccauccugguggugcugcuguacaccuucgccaccgccaacgccgacacccugugcaucggcuaccacgccaacaacagcaccgacaccguggacaccgugcuggagaagaacgugaccgugacccacagcgugaaccugcuggaggacaagcacaacggcaagcugugcaagcugagaggcguggccccccugcaccugggcaagugcaacaucgccggcuggauccugggcaaccccgagugcgagagccugagcaccgccagcagcuggagcuacaucguggagaccagcagcagcgacaacggcaccugcuaccccggcgacuucaucgacuacgaggagcugagagagcagcugagcagcgugagcagcuucgagagauucgagauguuccccaagaccagcagcuggcccaaccacgacagcaacaagggcgugaccgccgccugcccccacgccggcgccaagagcuucuacaagaaccugaucuggcuggugaagaagggcaacagcuaccccaagcugaacaagagcuacaucaacgacaagggcaaggaggugcuggugcuguggggcauccaccaccccagcaccagcgccgaccagcagagccuguaccagaacgccgacgccuacguguucgugggcaccagcagauacagcaagaaguucaagcccgagaucgccaucagacccaaggugagagaccaggagggcagaaugaacuacuacuggacccugguggagcccggcgacaagaucaccuucgaggccaccggcaaccugguggugcccagauacgccuucgccauggagagaaacgccggcagcggcaucaucaucagcgacacccccgugcacgacugcaacaccaccugccagacccccaagggcgccaucaacaccagccugcccuuccagaacauccaccccaucaccaucggcaagugccccaaguacgugaagagcaccaagcugagacuggccaccggccugagaaacgugcccagcauccagagcagaggccuguucggcgccaucgccggcuucaucgagggcggcuggaccggcaugguggacggcugguacggcuaccaccaccagaacgagcagggcagcggcuacgccgccgaccugaagagcacccagaacgccaucgacgagaucaccaacaaggugaacagcgugaucgagaagaugaacacccaguucaccgccgugggcaaggaguucaaccaccuggagaagagaaucgagaaccugaacaagaagguggacgacggcuuccuggacaucuggaccuacaacgccgagcugcuggugcugcuggagaacgagagaacccuggacuaccacgacagcaacgugaagaaccuguacgagaaggugagaagccagcugaagaacaacgccaaggagaucggcaacggcugcuucgaguucuaccacaagugcgacaacaccugcauggagagcgugaagaacggcaccuacgacuaccccaaguacagcgaggaggccaagcugaacagagaggagaucgacggcgugaagcuggagagcaccagaaucuaccagauccuggccaucuacagcaccguggccagcagccuggugcugguggugagccugggcgccaucagcuucuggaugugcagcaacggcagccugcagugcagaaucugcaucuga

SEQ ID NO: 165275 - RNA, 1701 nt, Artificial Sequence; identical to SEQ ID NO: 163893
  derived and/or modified CDS sequence (opt4) from hemagglutinin__InfluenzaA__ADJ81033

SEQ ID NO: 165276 - RNA, 1701 nt, Artificial Sequence; identical to SEQ ID NO: 162729
  derived and/or modified CDS sequence (opt4) from hemagglutinin__InfluenzaA__ADJ81043

SEQ ID NO: 165277 - RNA, 1701 nt, Artificial Sequence
  derived and/or modified CDS sequence (opt4) from hemagglutinin__InfluenzaA__ADJ81053
augaaggccauccugguggugcugcuguacaccuucaccaccgccaacgccgacacccugugcaucggcuaccacgccaacaacagcaccgacaccguggacaccgugcuggagaagaacgugaccgugacccacagcgugaaccugcuggaggacaagcacaacggcaagcugugcaagcugagaggcguggccccccugcaccugggcaagugcaacaucgccggcuggauccugggcaaccccgagugcgagagccugagcaccgccagcagcuggagcuacaucguggagaccagcagcagcgacaacggcaccugcuaccccggcgacuucaucgacuacgaggagcugagagagcagcugagcagcgugagcagcuucgagagauucgagaucuuccccaagaccagcagcuggcccaaccacgacagcaacaagggcgugaccgccgccugcccccacgccggcgccaagagcuucuacaagaaccugaucuggcuggugaagaagggcaacagcuaccccaagcugagcaagagcuacaucaacgacaagggcaaggaggugcuggugcuguggggcauccaccaccccagcaccagcgccgaccagcagagccuguaccagaacgccgacgccuacguguucgugggcaccagcagauacagcaagaaguucaagcccgagaucgccaucagacccaaggugagagaccaggagggcagaaugaacuacuacuggacccugguggagcccggcgacaagaucaccuucgaggccaccggcaaccugguggugcccagauacgccuucgccauggagagaaacgccggcagcggcaucaucaucagcgacacccccgugcacgacugcaacaccaccugccagacccccaagggcgccaucaacaccagccugcccuuccagaacauccaccccaucaccaucggcaagugccccaaguacgugaagagcaccaagcugagacuggccaccggccugagaaacgugcccagcauccagagcagaggccuguucggcgccaucgccggcuucaucgagggcggcuggaccggcaugguggacggcugguacggcuaccaccaccagaacgagcagggcagcggcuacgccgccgaccugaagagcacccagaacgccaucgacaagaucaccaacaaggugaacagcgugaucgagaagaugaacacccaguucaccgccgugggcaaggaguucaaccaccuggagaagagaaucgagaaccugaacaagaagguggacgacggcuuccuggacaucuggaccuacaacgccgagcugcuggugcugcuggagaacgagagaacccuggacuaccacgacagcaacgugaagaaccuguacgagaaggugagaagccagcugaagaacaacgccaaggagaucggcaacggcugcuucgaguucuaccacaagugcgacaacaccugcauggagagcgugaagaacggcaccuacgacuaccccaaguacagcgaggaggccaagcugaacagagaggagaucgacggcgugaagcuggagagcaccagaaucuaccagauccuggccaucuacagcaccguggccagcagccuggugcugguggugagccugggcgccaucagcuucuggaugugcagcaacggcagccugcagugcagaaucugcaucuga

SEQ ID NO: 165278 - RNA, 1701 nt, Artificial Sequence; identical to SEQ ID NO: 163893
  derived and/or modified CDS sequence (opt4) from hemagglutinin__InfluenzaA__ADJ81063

SEQ ID NO: 165279 - RNA, 1701 nt, Artificial Sequence; identical to SEQ ID NO: 163673
  derived and/or modified CDS sequence (opt4) from hemagglutinin__InfluenzaA__ADJ84772

SEQ ID NO: 165280 - RNA, 1701 nt, Artificial Sequence
  derived and/or modified CDS sequence (opt4) from hemagglutinin__InfluenzaA__ADJ88782
augaagaccaucaucgcccugagcuacaugcugugccugguguucgcccagaagcugcccggcaacgacaacagcaccgccacccugugccugggccaccacgccgugcccaacggcaccaucgugaagaccaucaccaacgaccagaucgaggugaccaacgccaccgagcuggugcagagcagcagcaccggcgagaucugcgacagcccccaccagauccuggacggcgagaacugcacccugaucgacgcccugcugggcgacccccagugcgacggcuuccagaacaagaagugggaccuguucguggagagaagcaaggccuacagcaacugcuaccccuacgacgugcccgacuacgccagccugagaagccugaucgccagcagcggcacccuggaguucaacaacgagagcuucaacuggaccggcgugacccagaacggcaccagcagcgccugcaucagaagaagcaacaacagcuucuucagcagacugaacuggcugacccaccugaaguucaaguaccccgcccugaacgugaccaugcccaacaacgagcaguucgacaagcuguacaucuggggcgugcaccaccccggcaccgacaacgaccagaucuuccuguacgcccaggccagcggcagaaucaccgugagcaccaagagaagccagcagaccgugauccccaacaucggcagcagacccagagugagaaacauccccagcagaaucagcaucuacuggaccaucgugaagcccggcgacauccugcugaucaacagcaccggcaaccugaucgcccccagaggcuacuucaagaucagaagcggcaagagcagcaucaugagaagcgacgcccccaucggcaagugcaacagcgagugcaucacccccaacggcagcauccccaacgacaagcccuuccagaacgugaacagaaucaccuacggcgccugccccagauacgugaagcagaacacccugaagcuggccaccggcaugagaaacgugcccgagaagcagaccagaggcaucuucggcgccaucgccggcuucaucgagaacggcugggagggcaugguggacggcugguacggcuucagacaccagaacagcgagggcagaggccaggccgccgaccugaagagcacccaggccgccaucgaccagaucaacggcaagcugaacagacugaucggcaagaccaacgagaaguuccaccagaucgagaaggaguucagcgagguggagggcagaauccaggaccuggagaaguacguggaggacaccaagaucgaccuguggagcuacaacgccgagcugcugguggcccuggagaaccagcacaccaucgaccugaccgacagcgagaugaacaagcuguucgagaagaccaagaagcagcugggcgagaacgccgaggacaugggcaacggcugcuucaagaucuaccacaagugcgacaacgccugcaucggcagcaucagaaacggcaccuacgaccacgacguguacagagacgaggcccugaacaacagauuccagaucaagggcguggagcugaagagcggcuacaaggacuggauccuguggaucagcuucgccaucagcugcuuccugcugugcguggcccugcugggcuucaucaugugggccugccagaagggcaacaucagaugcaacaucugcaucuga

SEQ ID NO: 165281 - RNA, 1701 nt, Artificial Sequence
  derived and/or modified CDS sequence (opt4) from hemagglutinin__InfluenzaA__ADK21733
augaaggccauccugguggugcugcuguacaccuucgccaccgccaacgccgacacccugugcaucggcuaccacgccaacaacagcaccgacaccguggacaccgugcuggagaagaacgugaccgugacccacagcgugaaccugcuggaggacaagcacaacggcaagcugugcaagcugagaggcguggccccccugcaccugggcaagugcaacaucgccggcuggauccugggcaaccccgagugcgagagccugagcaccgccagcagcuggagcuacaucguggagaccagcagcagcgacaacggcaccugcuaccccggcgacuucaucgacuacgaggagcugagagagcagcugagcagcgugagcagcuucgagagauucgagaucuuccccaagaccagcagcuggcccaaccacgacagcaacaagggcgugaccgccgccugcccccacgccggcgccaagagcuucuacaagaaccugaucuggcuggugaagaagggcaacagcuaccccaagcugagcaagagcuacaucaacgacaagggcaaggaggugcuggugcuguggggcauccaccaccccagcaccagcaccgaccagcagagccuguaccagaacgccgacgccuacguguucgugggcaccagcagauacagcaagaaguucaagcccgagaucgccaucagacccaaggugagagaccaggagggcagaaugaacuacuacuggacccugguggagcccggcgacaagaucaccuucgaggccaccggcaaccugguggugcccagauacgccuucgccauggagagaaacgccggcagcggcaucaucaucagcgacacccccgcccacgacugcaacaccaccugccagacccccaagggcgccaucaacaccagccugcccuuccagaacauccaccccaucaccaucggcaagugccccaaguacgugaagagcaccaagcugagacuggccaccggccugagaaacgugcccagcauccagagcagaggccuguucggcgccaucgccggcuucaucgagggcggcuggaccggcaugguggacggcugguacggcuaccaccaccagaacgagcagggcagcggcuacgccgccgaccugaagagcacccagaacgccaucgacaagaucaccaacaaggugaacagcgugaucgagaagaugaacacccaguucaccgccgugggcaaggaguucaaccaccuggagaagagaaucgagaaccugaacaagaagguggacgacggcuuccuggacaucuggaccuacaacgccgagcugcuggugcugcuggagaacgagagaacccuggacuaccacgacagcaacgugaagaaccuguacgagaaggugagaagccagcugaagaacaacgccaaggagaucggcaacggcugcuucgaguucuaccacaagugcgacaacaccugcauggagagcgugaagaacggcaccuacgacuaccccaaguacagcgaggaggccaagcugaacagagaggagaucgacggcgugaagcuggagagcaccagaaucuaccagauccuggccaucuacagcaccguggccagcagccuggugcugguggugagccugggcgccaucagcuucuggaugugcagcaacggcagccugcagugcagaaucugcaucuga

SEQ ID NO: 165282 - RNA, 1701 nt, Artificial Sequence
  derived and/or modified CDS sequence (opt4) from hemagglutinin__InfluenzaA__ADK21743
augaaggccauccugguggugcugcuguacaccuucgccaccgccaacgccgacacccugugcaucggcuaccacgccaacaacagcaccgacaccguggacaccgugcuggagaagaacgugaccgugacccacagcgugaaccugcuggaggacaagcacaacggcaagcugugcaagcugagaggcguggccccccugcaccugggcaagugcaacaucgccggcuggauccugggcaaccccgagugcgagagccugagcaccgccagcagcuggagcuacaucguggagaccagcagcagcgacaacggcaccugcuaccccggcgacuucaucgacuacgaggagcugagagagcagcugagcagcgugagcagcuucgagagauucgagaucuuccccaagaccagcagcuggcccaaccacgacagcaacaagggcgugaccgccgccugcccccacgccggcgccaagagcuucuacaagaaccugaucuggcuggugaagaagggcaacagcuaccccaagaucagcaacagcuacaucaacgacaagggcaaggaggugcuggugcuguggggcauccaccaccccagcaccagcgccgaccagcagagccuguaccagaacgccgacgccuacguguucgugggcaccagcagauacagcaagaaguucaagcccgagaucgccaucagacccaaggugagagaccaggagggcagaaugaacuacuacuggacccugguggagcccggcgacaagaucaccuucgaggccaccggcaaccugguggugcccagauacgccuucgccauggagagaaacgccggcagcggcaucaucaucagcgacacccccgcccacgacugcaacaccaccugccagacccccaagggcgccaucaacaccagccugcccuuccagaacauccaccccaucaccaucggcaagugccccaaguacgugaagagcaccaagcugagacuggccaccggccugagaaacgugcccagcauccagagcagaggccuguucggcgccaucgccggcuucaucgagggcggcuggaccggcaugguggacggcugguacggcuaccaccaccagaacgagcagggcagcggcuacgccgccgaccugaagagcacccagaacgccaucgacgagaucaccaacaaggugaacagcgugaucgagaagaugaacacccaguucaccgccgugggcaaggaguucaaccaccuggagaagagaaucgagaaccugaacaagaagguggacgacggcuuccuggacaucuggaccuacaacgccgagcugcuggugcugcuggagaacgagagaacccuggacuaccacgacagcaacgugaagaaccuguacgagaaggugagaagccagcugaagaacaacgccaaggagaucggcaacggcugcuucgaguucuaccacaagugcgacaacaccugcauggagagcgugaagaacggcaccuacgacuaccccaaguacagcgaggaggccaagcugaacagagaggagaucgacggcgugaagcuggagagcaccagaaucuaccagauccuggccaucuacagcaccguggccagcagccuggugcugguggugagccugggcgccaucagcuucuggaugugcagcaacggcagccugcagugcagaaucugcaucuga

SEQ ID NO: 165283 - RNA, 1701 nt, Artificial Sequence
  derived and/or modified CDS sequence (opt4) from hemagglutinin__InfluenzaA__ADK21753
augaaggccauccugguggugcugcuguacaccuucgccaccgccaacgccgacacccugugcaucggcuaccacgccaacaacagcaccgacaccguggacaccgugcuggagaagaacgugaccgugacccacagcgugaaccugcuggaggacaagcacaacggcaagcugugcaagcugagaggcguggccccccugcaccugggcaagugcaacaucgccggcuggauccugggcaaccccgagugcgagagccugagcaccgccagcagcuggagcuacaucguggagaccagcagcagcgacaacggcaccugcuaccccggcgacuucaucgacuacgaggagcugagagagcagcugagcagcgugagcagcuucgagagauucgagaucuuccccaagaccagcagcuggcccaaccacgacagcaacaagggcgugaccgccgccugcccccacgccggcgccaagagcuucuacaagaaccugaucuggcuggugaagaagggcaacagcuaccccaagcugagcaagagcuacaucaacgacaagggcaaggaggugcuggugcuguggggcauccaccaccccagcaccagcgccgaccagcagagccuguaccagaacgccgacgccuacguguucgugggcaccagcagauacagcaagaaguucaagcccgagaucgccaucagacccaaggugagagaccaggagggcagaaugaacuacuacuggacccugguggagcccggcgacaagaucaccuucgaggccaccggcaaccugguggugcccagauacgccuucgccauggagggcaacgccggcagcggcaucaucaucagcgacacccccgugcacgacugcaacaccaccugccagacccccaagggcgccaucaacaccagccugcccuuccagaacauccaccccaucaccaucggcaagugccccaaguacgugaagagcaccaagcugagacuggccaccggccugagaaacgugcccagcauccagagcagaggccuguucggcgccaucgccggcuucaucgagggcggcuggaccggcaugguggacggcugguacggcuaccaccaccagaacgagcagggcagcggcuacgccgccgaccugaagagcacccagaacgccaucgacaagaucaccaacaaggugaacagcgugaucgagaagaugaacacccaguucaccgccgugggcaaggaguucaaccaccuggagaagagaaucgagaaccugaacaagaagguggacgacggcuuccuggacaucuggaccuacaacgccgagcugcuggugcugcuggagaacgagagaacccuggacuaccacgacagcaacgugaagaaccuguacgagaaggugagaagccagcugaagaacaacgccaaggagaucggcaacggcugcuucgaguucuaccacaagugcgacaacaccugcauggagagcgugaagaacggcaccuacgacuaccccaaguacagcgaggaggccaagcugaacagagaggagaucgacggcgugaagcuggagagcaccagaaucuaccagauccuggccaucuacagcaccguggccagcagccuggugcugguggugagccugggcgccaucagcuucuggaugugcagcaacggcagccugcagugcagaaucugcaucuga

SEQ ID NO: 165284 - RNA, 1701 nt, Artificial Sequence
  derived and/or modified CDS sequence (opt4) from hemagglutinin__InfluenzaA__ADK21763
augaaggccauccugguggugcugcuguacaccuucgccaccgccaacgccgacacccugugcaucggcuaccacgccaacaacagcaccgacaccguggacaccgugcuggagaagaacgugaccgugacccacagcgugaaccugcuggaggacaagcacaacggcaagcugugcaagcugagaggcguggccccccugcaccugggcaagugcaacaucgccggcuggauccugggcaaccccgagugcgagagccugagcaccgccagcagcuggagcuacaucguggagaccagcagcagcgacaacggcaccugcuaccccggcgacuucaucgacuacgaggagcugagagagcagcugagcagcgugagcagcuucgagagauucgagaucuuccccaagaccagcagcuggcccaaccacgacagcaacaagggcgugaccgccgccugcccccacgccggcgccaagagcuucuacaagaaccugaucuggcuggugaagaagggcaacagcuaccccaagcugagcaagagcuacaucaacgacaagggcaaggaggugcuggugcuguggggcauccaccaccccagcaccagcgccgaccagcagagccuguaccagaacgccgacgccuacguguucgugggcaccagcaaguacagcaagaaguucaagcccgagaucgccaucagacccaaggugagagaccaggagggcagaaugaacuacuacuggacccugguggagcccggcgacaagaucaccuucgaggccaccggcaaccugguggugcccagauacgccuucgccauggagagaaacgccggcagcggcaucaucaucagcgacacccccgugcacgacugcaacaccaccugccagacccccaagggcgccaucaacaccagccugcccuuccagaacauccaccccaucaccaucggcaagugccccaaguacgugaagagcaccaagcugagacuggccaccggccugagaaacgugcccagcauccagagcagaggccuguucggcgccaucgccggcuucaucgagggcggcuggaccggcaugguggacggcugguacggcuaccaccaccagaacgagcagggcagcggcuacgccgccgaccugaagagcacccagaacgccaucgacgagaucaccaacaaggugaacagcgugaucgagaagaugaacacccaguucaccgccgugggcaaggaguucaaccaccuggagaagagaaucgagaaccugaacaagaagguggacgacggcuuccuggacaucuggaccuacaacgccgagcugcuggugcugcuggagaacgagagaacccuggacuaccacgacagcaacgugaagaaccuguacgagaaggugagaagccagcugaagaacaacgccaaggagaucggcaacggcugcuucgaguucuaccacaagugcgacaacaccugcauggagagcgugaagaacggcaccuacgacuaccccaaguacagcgaggaggccaagcugaacagagaggagaucgacggcgugaagcuggagagcaccagaaucuaccagauccuggccaucuacagcaccguggccagcagccuggugcugguggugagccugggcgccaucagcuucuggaugugcagcaacggcagccugcagugcagaaucugcaucuga

SEQ ID NO: 165285 - RNA, 1701 nt, Artificial Sequence; identical to SEQ ID NO: 163893
  derived and/or modified CDS sequence (opt4) from hemagglutinin__InfluenzaA__ADK21773

SEQ ID NO: 165286 - RNA, 1701 nt, Artificial Sequence; identical to SEQ ID NO: 163893
  derived and/or modified CDS sequence (opt4) from hemagglutinin__InfluenzaA__ADK21783

SEQ ID NO: 165287 - RNA, 1701 nt, Artificial Sequence; identical to SEQ ID NO: 162729
  derived and/or modified CDS sequence (opt4) from hemagglutinin__InfluenzaA__ADK21813

SEQ ID NO: 165288 - RNA, 1701 nt, Artificial Sequence; identical to SEQ ID NO: 164149
  derived and/or modified CDS sequence (opt4) from hemagglutinin__InfluenzaA__ADK21823

SEQ ID NO: 165289 - RNA, 1701 nt, Artificial Sequence
  derived and/or modified CDS sequence (opt4) from hemagglutinin__InfluenzaA__ADK21833
augaaggccauccugguggugcugcuguacaccuucgccaccgccaacgccgacacccugugcaucggcuaccacgccaacaacagcaccgacaccguggacaccgugcuggagaagaacgugaccgugacccacagcgugaaccugcuggaggacaagcacaacggcaagcugugcaagcugagaggcguggccccccugcaccugggcaagugcaacaucgccggcuggauccugggcaaccccgagugcgagagccugagcaccgccagcagcuggagcuacaucguggagaccagcagcagcgacaacggcaccugcuaccccggcgacuucaucgacuacgaggagcugagagagcagcugagcagcgugagcagcuucgagagauucgagaucuuccccaagaccagcagcuggcccaaccacgacagcaacaagggcgugaccgccgccugcccccacgccggcgccaagagcuucuacaagaaccugaucuggcuggugaagaagggcaacagcuaccccaagcugagcaagagcuacaucaacgacaagggcaaggaggugcuggugcuguggggcauccaccaccccagcaccagcgccgaccagcagagccuguaccagaacgccgacgccuacguguucgugggcaccagcagauacagcaagaaguucaagcccgagaucgccaucagacccaaggugagagaccaggagggcagaaugaacuacuacuggacccugguggagcccggcgacaagaucaccuucgaggccaccggcaaccugguggugcccagauacgccuucgccauggagagaaacgccggcagcggcaucaucaucagcgacacccccgugagagacugcaacaccaccugccagacccccaagggcgccaucaacaccagccugcccuuccagaacauccaccccaucaccaucggcaagugccccaaguacgugaagagcaccaagcugagacuggccaccggccugagaaacgugcccagcauccagagcagaggccuguucggcgccaucgccggcuucaucgagggcggcuggaccggcaugguggacggcugguacggcuaccaccaccagaacgagcagggcagcggcuacgccgccgaccugaagagcacccagaacgccaucgacgagaucaccaacaaggugaacagcgugaucgagaagaugaacacccaguucaccgccgugggcaaggaguucaaccaccuggagaagagaaucgagaaccugaacaagaagguggacgacggcuuccuggacaucuggaccuacaacgccgagcugcuggugcugcuggagaacgagagaacccuggacuaccacgacagcaacgugaagaaccuguacgagaaggugagaagccagcugaagaacaacgccaaggagaucggcaacggcugcuucgaguucuaccacaagugcgacaacaccugcauggagagcgugaagaacggcaccuacgacuaccccaaguacagcgaggaggccaagcugaacagagaggagaucgacggcgugaagcuggagagcaccagaaucuaccagauccuggccaucuacagcaccguggccagcagccuggugcugguggugagccugggcgccaucagcuucuggaugugcagcaacggcagccugcagugcagaaucugcaucuga

SEQ ID NO: 165290 - RNA, 1701 nt, Artificial Sequence; identical to SEQ ID NO: 163893
  derived and/or modified CDS sequence (opt4) from hemagglutinin__InfluenzaA__ADK21843

SEQ ID NO: 165291 - RNA, 1701 nt, Artificial Sequence; identical to SEQ ID NO: 163082
  derived and/or modified CDS sequence (opt4) from hemagglutinin__InfluenzaA__ADK21853

SEQ ID NO: 165292 - RNA, 1701 nt, Artificial Sequence; identical to SEQ ID NO: 164378
  derived and/or modified CDS sequence (opt4) from hemagglutinin__InfluenzaA__ADK21863

SEQ ID NO: 165293 - RNA, 1701 nt, Artificial Sequence; identical to SEQ ID NO: 163176
  derived and/or modified CDS sequence (opt4) from hemagglutinin__InfluenzaA__ADK21873

SEQ ID NO: 165294 - RNA, 1701 nt, Artificial Sequence
  derived and/or modified CDS sequence (opt4) from hemagglutinin__InfluenzaA__ADK21883
augaaggccauccugguggugcugcuguacaccuucgccaccgccaacgccgacacccugugcaucggcuaccacgccaacaacagcaccgacaccguggacaccgugcuggagaagaacgugaccgugacccacagcgugaaccugcuggaggacaagcacaacggcaagcugugcaagcugagaggcguggccccccugcaccugggcaagugcaacaucgccggcuggauccugggcaaccccgagugcgagagccugagcaccgccagcagcuggagcuacaucguggagaccagcagcagcgacaacggcaccugcuaccccggcgacuucaucgacuacgaggagcugagagagcagcugagcagcgugagcagcuucgagagauucgagaucuuccccaagaccagcagcuggcccaaccacgacagcaacaagggcgugaccgccgccugcccccacgccggcgccaagagcuucuacaagaaccugaucuggcuggugaagaagggcaacagcuaccccaagcugagcaagagcuacaucaacgacaagggcaaggaggugcuggugcuguggggcauccaccaccccagcaccagcgccgaccagcagagccuguaccagaacgccgacgccuacguguucgugggcaccagcagauacagcaagaaguucaagcccgagaucgccaucagacccaaggugagagaccaggagggcagaaugaacuacuacuggacccugguggagcccggcgacaagaucaccuucgaggccaccggcaaccugguggugcccaaguacgccuucgccauggagagaaacgccggcagcggcaucaucaucagcgacacccccgugcacgacugcaacaccaccugccagacccccaagggcgccaucaacaccagccugcccuuccagaacauccaccccaucaccaucggcaagugccccaaguacgugaagagcaccaagcugagacuggccaccggccugagaaacauccccagcauccagagcagaggccuguucggcgccaucgccggcuucaucgagggcggcuggaccggcaugguggacggcugguacggcuaccaccaccagaacgagcagggcagcggcuacgccgccgaccugaagagcacccagaacgccaucgacgagaucaccaacaaggugaacagcgugaucgagaagaugaacacccaguucaccgccgugggcaaggaguucaaccaccuggagaagagaaucgagaaccugaacaagaagguggacgacggcuuccuggacaucuggaccuacaacgccgagcugcuggugcugcuggagaacgagagaacccuggacuaccacgacagcaacgugaagaaccuguacgagaaggugagaagccagcugaagaacaacgccaaggagaucggcaacggcugcuucgaguucuaccacaagugcgacaacaccugcauggagagcgugaagaacggcaccuacgacuaccccaaguacagcgaggaggccaagcugaacagagaggagaucgacggcgugaagcuggagagcaccagaaucuaccagauccuggccaucuacagcaccguggccagcagccuggugcugguggugagccugggcgccaucagcuucuggaugugcagcaacggcagccugcagugcagaaucugcaucuga

SEQ ID NO: 165295 - RNA, 1701 nt, Artificial Sequence; identical to SEQ ID NO: 162729
  derived and/or modified CDS sequence (opt4) from hemagglutinin__InfluenzaA__ADK21893

SEQ ID NO: 165296 - RNA, 1701 nt, Artificial Sequence; identical to SEQ ID NO: 164326
  derived and/or modified CDS sequence (opt4) from hemagglutinin__InfluenzaA__ADK21903

SEQ ID NO: 165297 - RNA, 1701 nt, Artificial Sequence; identical to SEQ ID NO: 164439
  derived and/or modified CDS sequence (opt4) from hemagglutinin__InfluenzaA__ADK21913

SEQ ID NO: 165298 - RNA, 1701 nt, Artificial Sequence
  derived and/or modified CDS sequence (opt4) from hemagglutinin__InfluenzaA__ADK21923
augaaggccauccugguggugcugcuguacaccuucgccaccgccaacgccgacacccugugcaucggcuaccacgccaacaacagcaccgacaccguggacaccgugcuggagaagaacgugaccgugacccacagcgugaacauccuggaggacaagcacaacggcaagcugugcaagcugagaggcguggccccccugcaccugggcaagugcaacaucgccggcuggauccugggcaaccccgagugcgagagccugagcaccgccagcagcuggagcuacaucguggagaccagcagcagcgacaacggcaccugcuaccccggcgacuucaucgacuacgaggagcugagagagcagcugagcagcgugagcagcuucgagagauucgagaucuuccccaagaccagcagcuggcccaaccacgacagcaacaagggcgugaccgccgccugcccccacgccggcgccaagagcuucuacaagaaccugaucuggcuggugaagaagggcaacagcuaccccaagcugagcaagagcuacaucaacgacaagggcaaggaggugcuggugcuguggggcauccaccaccccagcaccagcgccgaccagcagagccuguaccagaacgccgacgccuacguguucgugggcaccagcagauacagcaagaaguucaagcccgagaucgccaucagacccaaggugagagaccaggagggcagaaugaacuacuacuggacccugguggagcccggcgacaagaucaccuucgaggccaccggcaaccugguggugcccagauacgccuucgccauggagagaaacgccggcagcggcaucaucaucagcgacacccccgugcacgacugcaacaccaccugccagacccccaagggcgccaucaacaccagccugcccuuccagaacauccaccccaucaccaucggcaagugccccaaguacgugaagagcaccaagcugagacuggccaccggccugagaaacgugcccagcauccagagcagaggccuguucggcgccaucgccggcuucaucgagggcggcuggaccggcaugguggacggcugguacggcuaccaccaccagaacgagcagggcagcggcuacgccgccgaccugaagagcacccagaacgccaucgacgagaucaccaacaaggugaacagcgugaucgagaagaugaacacccaguucaccgccgugggcaaggaguucaaccaccuggagaagagaaucgagaaccugaacaagaagguggacgacggcuuccuggacaucuggaccuacaacgccgagcugcuggugcugcuggagaacgagagaacccuggacuaccacgacagcaacgugaagaaccuguacgagaaggccagaagccagcugaagaacaacgccaaggagaucggcaacggcugcuucgaguucuaccacaagugcgacaacaccugcauggagagcgugaagaacggcaccuacgacuaccccaaguacagcgaggaggccaagcugaacagagagaagaucgacggcgugaagcuggagagcaccagaaucuaccagauccuggccaucuacagcaccguggccagcacccuggugcugguggugagccugggcgccaucagcuucuggaugugcagcaacggcagccugcagugcagaaucugcaucuga

SEQ ID NO: 165299 - RNA, 1701 nt, Artificial Sequence
  derived and/or modified CDS sequence (opt4) from hemagglutinin__InfluenzaA__ADK21933
augaaggccauccugguggugcugcuguacaccuucgccaccgccaacgccgacacccugugcaucggcuaccacgccaacaacagcaccgacaccguggacaccgugcuggagaagaacgugaccgugacccacagcguggaccugcuggaggacaagcacaacggcaagcugugcaagcugagaggcguggccccccugcaccugggcaagugcaacaucgccggcuggauccugggcaaccccgagugcgagagccugagcaccgccagcagcuggagcuacaucguggagaccagcagcagcgacaacggcaccugcuaccccggcgacuucaucgacuacgaggagcugagagagcagcugagcagcgugagcagcuucgagagauucgagaucuuccccaagaccagcagcuggcccaaccacgacagcaacaagggcgugaccgccgccugccccaacgccggcgccaagagcuucuacaagaaccugaucuggcuggugaagaagggcaacagcuaccccaagcugagcaagagcuacaucaacgacaagggcaaggaggugcuggugcuguggggcauccaccaccccagcaccagcgccgaccagcagagccuguaccagaacgccgacgccuacguguucgugggcaccagcagauacagcaagaaguucaagcccgagaucgccaucagacccaaggugagagaccaggagggcagaaugaacuacuacuggacccugguggagcccggcgacaagaucaccuucgaggccaccggcaaccugguggugcccagauacgccuucgccauggagagaaacgccggcagcggcaucaucaucagcgacacccccgugcacgacugcaacaccaccugccagacccccaagggcgccaucaacaccagccugcccuuccagaacauccaccccaucaccaucggcaagugccccaaguacgugaagagcaccaagcugagacuggccaccggccugagaaacgugcccagcauccagagcagaggccuguucggcgccaucgccggcuucaucgagggcggcuggaccggcaugguggacggcugguacggcuaccaccaccagaacgagcagggcagcggcuacgccgccgaccugaagagcacccagaacgccaucgacgagaucaccaacaaggugaacagcgugaucgagaagaugaacacccaguucaccgccgugggcaaggaguucaaccaccuggagaagagaaucgagaaccugaacaagaagguggacgacggcuuccuggacaucuggaccuacaacgccgagcugcuggugcugcuggagaacgagagaacccuggacuaccacgacagcaacgugaagaaccuguacgagaaggugagaagccagcugaagaacaacgccaaggagaucggcaacggcugcuucgaguucuaccacaagugcgacaacaccugcauggagagcgugaagaacggcaccuacgacuaccccaaguacagcgaggaggccaagcugaacagagaggagaucgacggcgugaagcuggagagcaccagaaucuaccagauccuggccaucuacagcaccguggccagcagccuggugcugguggugagccugggcgccaucagcuucuggaugugcagcaacggcagccugcagugcagaaucugcaucuga

SEQ ID NO: 165300 - RNA, 1701 nt, Artificial Sequence; identical to SEQ ID NO: 162729
  derived and/or modified CDS sequence (opt4) from hemagglutinin__InfluenzaA__ADK21943

SEQ ID NO: 165301 - RNA, 1701 nt, Artificial Sequence
  derived and/or modified CDS sequence (opt4) from hemagglutinin__InfluenzaA__ADK21953
augaaggccauccugguggugcugcuguacaccuucgccaccgccaacgccgacacccugugcaucggcuaccacgccaacaacagcaccgacaccguggacaccgugcuggagaagaacgugaccgugacccacagcgugaaccugcuggaggacaagcacaacggcaagcugugcaagcugagaggcguggccccccugcaccugggcaagugcaacaucgccggcuggauccugggcaaccccgagugcgagagccugagcaccgccagcagcuggagcuacaucguggagaccagcagcagcgacaacggcaccugcuaccccggcgacuucaucgaccacgaggagcugagagagcagcugagcagcgugagcagcuucgagagauucgagaucuuccccaagaccagcagcuggcccaaccacgacagcaacaagggcgugaccgccgccugcccccacgccggcgccaagagcuucuacaagaaccugaucuggcuggugaagaagggcaacagcuaccccaagcugagcaagagcuacaucaacgacaagggcaaggaggugcuggugcugugggccauccaccaccccagcaccagcgccgaccagcagagccuguaccagaacgccgacgccuacguguucgugggcaccagcagauacagcaagaaguucaagcccgagaucgccaucagacccaaggugagagaccaggagggcagaaugaacuacuacuggacccugguggagcccggcgacaagaucaccuucgaggccaccggcaaccugguggugcccagauacgccuucgccauggagagaaacgccggcagcggcaucaucaucagcgacacccccgugcacgacugcaacaccaccugccagacccccaagggcgccaucaacaccagccugcccuuccagaacauccaccccaucaccaucggcaagugccccaaguacgugaagagcaccaagcugagacuggccaccggccugagaaacgugcccagcauccagagcagaggccuguucggcgccaucgccggcuucaucgagggcggcuggaccggcaugguggacggcugguacggcuaccaccaccagaacgagcagggcagcggcuacgccgccgaccugaagagcacccagaacgccaucgacgagaucaccaacaaggugaacagcgugaucgagaagaugaacacccaguucaccgccgugggcaaggaguucaaccaccuggagaagagaaucgagaaccugaacaagaagguggacgacggcuuccuggacaucuggaccuacaacgccgagcugcuggugcugcuggagaacgagagaacccuggacuaccacgacagcaacgugaagaaccuguacgagaaggugagaagccagcugaagaacaacgccaaggagaucggcaacggcugcuucgaguucuaccacaagugcgacaacaccugcauggagagcgugaagaacggcaccuacgacuaccccaaguacagcgaggaggccaagcugaacagagaggagaucgacggcgugaagcuggagagcaccagaaucuaccagauccuggccaucuacagcaccguggccagcagccuggugcugguggugagccugggcgccaucagcuucuggaugugcagcaacggcagccugcagugcagaaucugcaucuga

SEQ ID NO: 165302 - RNA, 1701 nt, Artificial Sequence; identical to SEQ ID NO: 164916
  derived and/or modified CDS sequence (opt4) from hemagglutinin__InfluenzaA__ADK32390

SEQ ID NO: 165303 - RNA, 1701 nt, Artificial Sequence; identical to SEQ ID NO: 164916
  derived and/or modified CDS sequence (opt4) from hemagglutinin__InfluenzaA__ADK32400

SEQ ID NO: 165304 - RNA, 1701 nt, Artificial Sequence
  derived and/or modified CDS sequence (opt4) from hemagglutinin__InfluenzaA__ADK32420
augaaggccauccugguggugcugcuguacaccuucgccaccgccaacgccgacacccugugcaucggcuaccacgccaacaacagcaccgacaccguggacaccgugcuggagaagaacgugaccgugacccacagcgugaaccugcuggaggacaagcacaacggcaagcugugcaagcugagaggcguggccccccugcaccugggcaagugcaacaucgccggcuggauccugggcaaccccgagugcgagagccugagcaccgccagcagcuggagcuacaucguggagaccagcagcagcgacaacggcaccugcuaccccggcgacuucaucgacuacgaggagcugagagagcagcugagcagcgugagcagcuucgagagauucgagaucuuccccaagaccagcagcuggcccaaccacgacagcaacaagggcgugaccgccgccugcccccacgccggcgccaagagcuucuacaagaaccugaucuggcuggugaagaagggcaacagcuaccccaagcugagcaagagcuacaucaacgacaagggcaaggaggugcuggugcuguggggcauccaccaccccagcaccagcgccgaccagcagagccuguaccagaacgccgacgccuacguguucgugggcaccagcagauacagcaagaaguucaagcccgagaucgccaucagacccaaggugagagagcaggagggcagaaugaacuacuacuggacccugguggagcccggcgacaagaucaccuucgaggccaccggcaaccugguggugcccagauacgccuucgccauggagagaaacgccggcagcggcaucaucaucagcgacacccccgugcacgacugcaacaccaccugccagacccccaagggcgccaucaacaccagccugcccuuccagaacauccacagcaucaccaucggcaagugccccaaguacgugaagagcaccaagcugagacuggccaccggccugagaaacgugcccagcauccagagcagaggccuguucggcgccaucgccggcuucaucgagggcggcuggaccggcaugguggacggcugguacggcuaccaccaccagaacgagcagggcagcggcuacgccgccgaccugaagagcacccagaacgccaucgacgagaucaccaacaaggugaacagcgugaucgagaagaugaacacccaguucaccgccgugggcaaggaguucaaccaccuggagaagagaaucgagaaccugaacaagaagguggacgacggcuuccuggacaucuggaccuacaacgccgagcugcuggugcugcuggagaacgagagaacccuggacuaccacgacagcaacgugaagaaccuguacgagaaggugagaaaccagcugaagaacaacgccaaggagaucggcaacggcugcuucgaguucuaccacaagugcgacaacaccugcauggagagcgugaagaacggcaccuacgacuaccccaaguacagcgaggaggccaagcugaacagagaggagaucgacggcgugaagcuggagagcaccagaaucuaccagauccuggccaucuacagcaccguggccagcagccuggugcugguggugagccugggcgccaucagcuucuggaugugcagcaacggcagccugcagugcagaaucugcaucuga

SEQ ID NO: 165305 - RNA, 1701 nt, Artificial Sequence; identical to SEQ ID NO: 164281
  derived and/or modified CDS sequence (opt4) from hemagglutinin__InfluenzaA__ADK32430

SEQ ID NO: 165306 - RNA, 1701 nt, Artificial Sequence
  derived and/or modified CDS sequence (opt4) from hemagglutinin__InfluenzaA__ADK32440
augaaggccauccugguggugcugcuguacaccuucgccaccgccaacgccgacacccugugcaucggcuaccacgccaacaacagcaccgacaccguggacaccgugcuggagaagaacgugaccgugacccacagcgugaaccugcuggaggacaagcacaacggcaagcugugcaagcugagaggcguggccccccugcaccugggcaagugcaacaucgccggcuggauccugggcaaccccgagugcgagagccugagcaccgccagcagcuggagcuacaucguggagaccagcagcagcgacaacggcaccugcuaccccggcgacuucaucgacuacgaggagcugagagagcagcugagcagcgugagcagcuucgagagauucgagaucuuccccaagaccagcagcuggcccaaccacgacagcaacaagggcgugaccgccgccugcccccacgccggcgccaagagcuucuacaagaaccugaucuggcuggugaagaagggcaacagcuaccccaagcugagcaagagcuacaucaacgacaagggcaaggaggugcuggugcuguggggcauccaccaccccagcaccagcgccgaccagcagagccuguaccagaacgccgacgccuacguguucgugggcaccagcagauacagcaagaaguucaagcccgagaucgccaucagacccaaggugagagaccaggagggcagaaugaacuacuacuggacccugguggagcccggcgacaagaucaccuucgaggccaccggcaaccugguggugcccagauacgccuucgccauggagagaaacgccggcagcggcaucaucaucagcgacacccccgugcacgacugcaacaccaccugccagacccccaagggcgccaucaacaccagccugcccuuccagaacauccaccccaucaccaucggcaagugccccaaguacgugaagagcaccaagcugagacuggccaccggccugagaaacgugcccagcauccagagcagaggccuguucggcgccaucgccggcuucaucgagggcggcuggaccggcaugguggacggcugguacggcuaccaccaccagaacgagcagggcagcggcuacgccgccgaccugaagagcacccagaacgccaucgacggcaucaccaacaaggugaacagcgugaucgagaagaugaacacccaguucaccgccgugggcaaggaguucaaccaccuggagaagagaaucgagaaccugaacaagaagguggacgacggcuuccuggacaucuggaccuacaacgccgagcugcuggugcugcuggagaacgagagaacccuggacuaccacgacagcaacgugaagaaccuguacgagaaggugagaagccagcugaagaacaacgccaaggagaucggcaacggcugcuucgaguucuaccacaagugcgacaacaccugcauggagagcgugaagaacggcaccuacgacuaccccaaguacagcgaggaggccaagcugaacagagaggagaucgacggcgugaagcuggagagcaccagaaucuaccagauccuggccaucuacagcaccguggccagcagccuggugcugguggugagccugggcgccaucagcuucuggaugugcagcaacggcagccugcagugcagaaucugcaucuga

SEQ ID NO: 165307 - RNA, 1701 nt, Artificial Sequence
  derived and/or modified CDS sequence (opt4) from hemagglutinin__InfluenzaA__ADK32450
augaaggccauccugguggugcugcuguacaccuucgccaccgccaacgccgacacccugugcaucggcuaccacgccaacaacagcaccgacaccguggacaccgugcuggagaagaacgugaccgugacccacagcgugaacauccuggaggacaagcacaacggcaagcugugcaagcugagaggcguggccccccugcaccugggcaagugcaacaucgccggcuggauccugggcaaccccgagugcgagagccugagcaccgccagcagcuggagcuacaucguggagaccagcagcagcgacaacggcaccugcuaccccggcgacuucaucgacuacgaggagcugagagagcagcugagcagcgugagcagcuucgagagauucgagaucuuccccaagaccagcagcuggcccaaccacgacagcaacaagggcgugaccgccgccugcccccacgccggcgccaagagcuucuacaagaaccugaucuggcuggugaagaagggcaacagcuaccccaagcugagcaagagcuacaucaacgacaagggcaaggaggugcuggugcuguggggcauccaccaccccagcaccagcgccgaccagcagagccuguaccagaacgccgacgccuacguguucgugggcagcagcagauacagcaagaaguucaagcccgagaucgccaucagacccaaggugagagaccaggagggcagaaugaacuacuacuggacccugguggagcccggcgacaagaucaccuucgaggccaccggcaaccugguggugcccagauacgccuucgccauggagagaaacgccggcagcggcaucaucaucagcgacgcccccgugcacgacugcaacaccaccugccagacccccaagggcgccaucaacaccagccugcccuuccagaacauccaccccaucaccaucggcaagugccccaaguacgugaagagcaccaagcugagacuggccaccggccugagaaacgugcccagcauccagagcagaggccuguucggcgccaucgccggcuucaucgagggcggcuggaccggcaugguggacggcugguacggcuaccaccaccagaacgagcagggcagcggcuacgccgccgaccugaagagcacccagaacgccaucgacgagaucaccaacaaggugaacagcgugaucgagaagaugaacacccaguucaccgccgugggcaaggaguucaaccaccuggagaagagaaucgagaaccugaacaagaagguggacgacggcuuccuggacaucuggaccuacaacgccgagcugcuggugcugcuggagaacgagagaacccuggacuaccacgacagcaacgugaagaaccuguacgagaaggugagaagccagcugaagaacaacgccaaggaggugggcaacggcugcuucgaguucuaccacaagugcgacaacaccugcauggagagcgugaagaacggcaccuacgacuaccccaaguacagcgaggaggccaagcugaacagagaggagaucgacggcgugaagcuggagagcaccagaaucuaccagauccuggccaucuacagcaccgccgccagcagccuggugcugguggugagccugggcgccaucagcuucuggaugugcagcaacggcagccugcagugcagaaucugcaucuga

SEQ ID NO: 165308 - RNA, 1701 nt, Artificial Sequence
  derived and/or modified CDS sequence (opt4) from hemagglutinin__InfluenzaA__ADK32460
augaaggccauccugguggugcugcuguacaccuucgccaccgccaacgccgacacccugugcaucggcuaccacgccaacaacagcaccgacaccguggacaccgugcuggagaagaacgugaccgugacccacagcgugaaccugcuggaggacaagcacaacggcaagcugugcaagcugagaggcguggccccccugcaccugggcaagugcaacaucgccggcuggauccugggcaaccccgagugcgagagccugagcaccgccagcagcuggagcuacaucguggagaccagcagcagcgacaacggcaccugcuaccccggcgacuucaucgacuacgaggagcugagagagcagcugagcagcgugagcagcuucgagagauucgagaucuuccccaagaccagcagcuggcccaaccacgacagcaacaagggcgugaccgccgccugcccccacgccggcgccaagagcuucuacaagaaccugaucuggcuggugaagaagggcaacagcuaccccaagcugagcaagagcuacaucaacgacaagggcaaggaggugcuggugcuguggggcauccaccaccccagcaccagcgccgaccagcagagccuguaccagaacgccgacgccuacgccuucgugggcaccagcagauacagcaagaaguucaagcccgagaucgccaucagacccaaggugagagaccaggagggcagaaugaacuacuacuggacccugguggagcccggcgacaagaucaccuucgaggccaccggcaaccugguggugcccagauacgccuucgccauggagagaaacgccggcagcggcaucaucaucagcgacacccccgugcacgacugcaacaccaccugccagacccccaagggcgccaucaacaccagccugcccuuccagaacauccaccccaucaccaucggcaagugccccaaguacgugaagagcaccaagcugagacuggccaccggccugagaaacgugcccagcauccagagcagaggccuguucggcgccaucgccggcuucaucgagggcggcuggaccggcaugguggacggcugguacggcuaccaccaccagaacgagcagggcagcggcuacgccgccgaccugaagagcacccagaacgccaucgacgagaucaccaacaaggugaacagcgugaucgagaagaugaacacccaguucaccgccgugggcaaggaguucaaccaccuggagaagagaaucgagaaccugaacaagaagguggacgacggcuuccuggacaucuggaccuacaacgccgagcugcuggugcugcuggagaacgagagaacccuggacuaccacgacagcaacgugaagaaccuguacgagaaggugagaagccagcugaagaacaacgccaaggagaucggcaacggcugcuucgaguucuaccacaagugcgacaacaccugcauggagagcgugaagaacggcaccuacgacuaccccaaguacagcgaggaggccaagcugaacagagaggagaucgacggcgugaagcuggagagcaccagaaucuaccagauccuggccaucuacagcaccguggccagcagccuggugcugguggugagccugggcgccaucagcuucuggaugugcagcaacggcagccugcagugcagaaucugcaucuga

SEQ ID NO: 165309 - RNA, 1701 nt, Artificial Sequence; identical to SEQ ID NO: 163893
  derived and/or modified CDS sequence (opt4) from hemagglutinin__InfluenzaA__ADK32470

SEQ ID NO: 165310 - RNA, 1701 nt, Artificial Sequence
  derived and/or modified CDS sequence (opt4) from hemagglutinin__InfluenzaA__ADK32480
augaaggccauccugguggugcugcuguacaccuucgccaccgccaacgccgacacccugugcaucggcuaccacgccaacaacagcaccgacaccguggacaccgugcuggagaagaacgugaccgugacccacagcgugaaccugcuggaggacaagcacaacggcaagcugugcaagcugagaggcguggccccccugcaccugggcaagugcaacaucgccggcuggauccugggcaaccccgagugcgagagccugagcaccgccagcagcuggagcuacaucguggagaccagcagcagcgacaacggcaccugcuaccccggcgacuucaucgacuacgaggagcugagagagcagcugagcagcgugagcagcuucgagagauucgagaucuuccccaagaccagcagcuggcccaaccacgacagcaacaagggcgugaccgccgccugcccccacgccggcgccaagagcuucuacaagaaccugaucuggcuggugaagaagggcaacagcuaccccaagcugagcaagagcuacaucaacgacaagggcaaggaggugcuggugcuguggggcauccaccaccccagcaccagcgccgaccagcagagccuguaccagaacgccgacgccuacguguucgugggcaccagcagauacagcaagaaguucaagcccgagaucgccaucagacccaaggugagagaccaggagggcagaaugaacuacuacuggacccugguggagcccggcgacaagaucaccuucgaggccaccggcaaccugguggugcccagauacgccuucgccauggagagaaacgccggcagcggcaucaucaucagcgacacccccgcccacgacugcaacaccaccugccagacccccaagggcgccaucaacaccagccugcccuuccagaacauccaccccaucaccaucggcaagugccccaaguacgugaagagcaccaagcugagacuggccaccggccugagaaacgugcccagcauccagagcagaggccuguucggcgccaucgccggcuucaucgagggcggcuggaccggcaugguggacggcugguacggcuaccaccaccagaacgagcagggcagcggcuacgccgccgaccugaagagcacccagaacgccaucgacaagaucaccaacaaggugaacagcgugaucgagaagaugaacacccaguucaccgccgugggcaaggaguucaaccaccuggagaagagaaucgagaaccugaacaagaagguggacgacggcuuccuggacaucuggaccuacaacgccgagcugcuggugcugcuggagaacgagagaacccuggacuaccacgacagcaacgugaagaaccuguacgagaaggugagaagccagcugaagaacaacgccaaggagaucggcaacggcugcuucgaguucuaccacaagugcgacaacaccugcauggagagcgugaagaacggcaccuacgacuaccccaaguacagcgaggaggccaagcugaacagagaggagaucgacggcgugaagcuggagagcaccagaaucuaccagauccuggccaucuacagcaccguggccagcagccuggugcugguggugagccugggcgccaucagcuucuggaugugcagcaacggcagccugcagugcagaaucugcaucuga

SEQ ID NO: 165311 - RNA, 1701 nt, Artificial Sequence; identical to SEQ ID NO: 163893
  derived and/or modified CDS sequence (opt4) from hemagglutinin__InfluenzaA__ADK32490

SEQ ID NO: 165312 - RNA, 1701 nt, Artificial Sequence; identical to SEQ ID NO: 163893
  derived and/or modified CDS sequence (opt4) from hemagglutinin__InfluenzaA__ADK32502

SEQ ID NO: 165313 - RNA, 1701 nt, Artificial Sequence; identical to SEQ ID NO: 164365
  derived and/or modified CDS sequence (opt4) from hemagglutinin__InfluenzaA__ADK32637

SEQ ID NO: 165314 - RNA, 1701 nt, Artificial Sequence; identical to SEQ ID NO: 163893
  derived and/or modified CDS sequence (opt4) from hemagglutinin__InfluenzaA__ADK32647

SEQ ID NO: 165315 - RNA, 1701 nt, Artificial Sequence; identical to SEQ ID NO: 164057
  derived and/or modified CDS sequence (opt4) from hemagglutinin__InfluenzaA__ADK32657

SEQ ID NO: 165316 - RNA, 1701 nt, Artificial Sequence; identical to SEQ ID NO: 164281
  derived and/or modified CDS sequence (opt4) from hemagglutinin__InfluenzaA__ADK32677

SEQ ID NO: 165317 - RNA, 1701 nt, Artificial Sequence
  derived and/or modified CDS sequence (opt4) from hemagglutinin__InfluenzaA__ADK32687
augaaggccauccugguggugcugcuguacaccuucgccaccgccaacgccgacacccugugcaucggcuaccacgccaacaacagcaccgacaccguggacaccgugcuggagaagaacgugaccgugacccacagcgugaaccugcuggaggacaagcacaacggcaagcugugcaagcugagaggcguggccccccugcaccugggcaagugcaacaucgccggcuggauccugggcaaccccgagugcgagagccugagcaccgccagcagcuggagcuacaucguggagaccagcagcagcgacaacggcaccugcuaccccggcgacuucaucgacuacgaggagcugagagagcagcugagcagcgugagcagcuucgagagauucgagaucuuccccaagaccagcagcuggcccaaccacgacagcaacaagggcgugaccgccgccugcccccacgccggcgccaagaacuucuacaagaaccugaucuggcuggugaagaagggcaacagcuaccccaagcugagcaagagcuacaucaacgacaagggcaaggaggugcuggugcuguggggcauccaccaccccagcaccagcgccgaccagcagagccuguaccagaacgccgacgccuacguguucgugggcaccagcagauacagcaagaaguucaagcccgagaucgccaucagacccaaggugagagaccaggagggcagaaugaacuacuacuggacccugguggagcccggcgacaagaucaccuucgaggccaccggcaaccugguggugcccagauacgccuucgccauggagagaaacgccggcagcggcaucaucaucagcgacacccccgugcacgacugcaacaccaccugccagacccccaagggcgccaucaacaccagccugcccuuccagaacauccaccccaucaccaucggcaagugccccaaguacgugaagagcaccaagcugagacuggccaccggccugagaaacgugcccagcauccagagcagaggccuguucggcgccaucgccggcuucaucgagggcggcuggaccggcaugguggacggcugguacggcuaccaccaccagaacgagcagggcagcggcuacgccgccgaccugaagagcacccagaacgccaucgacaagaucaccaacaaggugaacagcgugaucgagaagaugaacacccaguucaccgccgugggcaaggaguucaaccaccuggagaagagaaucgagaaccugaacaagaagguggacgacggcuuccuggacaucuggaccuacaacgccgagcugcuggugcugcuggagaacgagagaacccuggacuaccacgacagcaacgugaagaaccuguacgagaaggugagaagccagcugaagaacaacgccaaggagaucggcaacggcugcuucgaguucuaccacaagugcgacaacaccugcauggagagcgugaagaacggcaccuacgacuaccccaaguacagcgaggaggccaagcugaacagagaggagaucgacggcgugaagcuggagagcaccagaaucuaccagauccuggccaucuacagcaccguggccagcagccuggugcugguggugagccugggcgccaucagcuucuggaugugcagcaacggcagccugcagugcagaaucugcaucuga

SEQ ID NO: 165318 - RNA, 1701 nt, Artificial Sequence; identical to SEQ ID NO: 164520
  derived and/or modified CDS sequence (opt4) from hemagglutinin__InfluenzaA__ADK32697

SEQ ID NO: 165319 - RNA, 1701 nt, Artificial Sequence; identical to SEQ ID NO: 163893
  derived and/or modified CDS sequence (opt4) from hemagglutinin__InfluenzaA__ADK32776

SEQ ID NO: 165320 - RNA, 1701 nt, Artificial Sequence; identical to SEQ ID NO: 164281
  derived and/or modified CDS sequence (opt4) from hemagglutinin__InfluenzaA__ADK33621

SEQ ID NO: 165321 - RNA, 1701 nt, Artificial Sequence
  derived and/or modified CDS sequence (opt4) from hemagglutinin__InfluenzaA__ADK33631
augaaggccauccugguggugcugcuguacaccuucgccaccgccaacgccgacacccugugcaucggcuaccacgccaacaacagcaccgacaccguggacaccgugcuggagaagaacgugaccgugacccacagcgugaaccugcuggaggugaagcacaacggcaagcugugcaagcugagaggcguggccccccugcaccugggcaagugcaacaucgccggcuggauccugggcaaccccgagugcgagagccugagcaccgccagcagcuggagcuacaucguggagaccagcagcagcgacaacggcaccugcuaccccggcgacuucaucaacuacgaggagcugagagagcagcugagcagcgugagcagcuucgagagauucgagaucuuccccaagaccagcagcuggcccaaccacgacagcaacaagggcgugaccgccgccugcccccacgccggcgccaagagcuucuacaagaaccugaucuggcuggugaagaagggcaacagcuaccccaagcugagcaagagcuacaucaacgacaagggcaaggaggugcuggugcuguggggcauccaccaccccagcaccagcgccgaccagcagagccuguaccagaacgccgacgccuacguguucgugggcaccagcagauacagcaagaaguucaagcccgagaucgccaucagacccaaggugagagaccaggagggcagaaugaacuacuacuggacccugguggagcccggcgacaagaucaccuucgaggccaccggcaaccugguggugcccagauacgccuucgccauggagagaaacgccggcagcggcaucaucaucagcgacacccccgugcacgacugcaacaccaccugccagacccccaagggcgccaucaacaccagccugcccuuccagaacauccaccccaucaccaucggcaagugccccaaguacgugaagagcaccaagcugagacuggccaccggccugagaaacgugcccagcauccagagcagaggccuguucggcgccaucgccggcuucaucgagggcggcuggaccggcaugguggacggcugguacggcuaccaccaccagaacgagcagggcagcggcuacgccgccgaccugaagagcacccagaacgccaucgacaagaucaccaacaaggugaacagcgugaucgagaagaugaacacccaguucaccgccgugggcaaggaguucaaccaccuggagaagagaaucgagaaccugaacaagaagguggacgacggcuuccuggacaucuggaccuacaacgccgagcugcuggugcugcuggagaacgagagaacccuggacuaccacgacagcaacgugaagaaccuguacgagaaggugagaagccagcugaagaacaacgccaaggagaucggcaacggcugcuucgaguucuaccacaagugcgacaacaccugcauggagagcgugaagaacggcaccuacgacuaccccaaguacagcgaggaggccaagcugaacagagaggagaucgacggcgugaagcuggagagcaccagaaucuaccagauccuggccaucuacagcaccguggccagcagccuggugcugguggugagccugggcgccaucagcuucuggaugugcagcaacggcagccugcagugcagaaucugcaucuga

SEQ ID NO: 165322 - RNA, 1701 nt, Artificial Sequence; identical to SEQ ID NO: 164281
  derived and/or modified CDS sequence (opt4) from hemagglutinin__InfluenzaA__ADK33641

SEQ ID NO: 165323 - RNA, 1701 nt, Artificial Sequence; identical to SEQ ID NO: 163893
  derived and/or modified CDS sequence (opt4) from hemagglutinin__InfluenzaA__ADK33651

SEQ ID NO: 165324 - RNA, 1701 nt, Artificial Sequence; identical to SEQ ID NO: 163893
  derived and/or modified CDS sequence (opt4) from hemagglutinin__InfluenzaA__ADK33661

SEQ ID NO: 165325 - RNA, 1701 nt, Artificial Sequence; identical to SEQ ID NO: 163893
  derived and/or modified CDS sequence (opt4) from hemagglutinin__InfluenzaA__ADK33671

SEQ ID NO: 165326 - RNA, 1701 nt, Artificial Sequence
  derived and/or modified CDS sequence (opt4) from hemagglutinin__InfluenzaA__ADK33681
augaaggccauccugguggugcugcuguacaccuucgccaccgccaacgccgacacccugugcaucggcuaccacgccaacaacagcaccgacaccguggacaccgugcuggagaagaacgugaccgugacccacagcgugaaccugcuggaggacaagcacaacggcaagcugugcaagcugagaggcguggccccccugcaccugggcaagugcaacaucgccggcuggauccugggcaaccccgagugcgagagccugagcaccgccagcagcuggagcuacaucguggagaccagcagcagcgacaacggcaccugcuaccccggcgacuucaucgacuacgaggagcugagagagcagcugagcagcgugagcagcuucgagagauucgagaucuuccccaagaccagcagcuggcccaaccacgacagcaacaagggcgugaccgccgccugcccccacgccggcgccaagagcuucuacaagaaccugaucuggcuggugaagaagggcaacagcuaccccaagcugagcaagagcuacaucaacgacaagggcaaggaggugcuggugcuguggggcauccaccaccccagcaccagcgccgaccagcagagccuguaccagaacgccgacgccuacguguucgugggcaccagcagauacagcaagaaguucaagcccgagaucgccaucagacccaaggugagagaccaggagggcagaaugaacuacuacuggacccugguggagcccggcgacaagaucaccuucgaggccaccggcaaccugguggugcccagauacgccuucgccauggagagaaacgccggcagcggcaucaucaucagcgacacccccgugcacgacugcaacaccaccugccagacccccaagggcgccaucaacaccagccugcccuuccagaacauccaccccaucaccaucggcaagugccccaaguacgugaagagcaccaagcugagacuggccaccggccugagaaacgugcccagcauccagagcagaggccuguucggcgccaucgccggcuucaucgagggcggcuggaccggcaugguggacggcugguacggcuaccaccaccagaacgagcagggcagcggcuacgccgccgaccugaagagcacccagaacgccaucgacgagaucaccaacaaggugaacagcgugaucgagaagaugaacacccaguucaccgccgugggcaaggaguucaaccaccuggagaagagaaucgagaaccugaacaagaagguggacgacggcuuccuggacaucuggaccuacaacgccgagcugcuggugcugcuggagaacgagagaacccuggacuaccacgacagcaacgugaagaagcuguacgagaaggugagaagccagcugaagaacaacgccaaggagaucggcaacggcugcuucgaguucuaccacaagugcgacaacaccugcauggagagcgugaagaacggcaccuacgacuaccccaaguacagcgaggaggccaagcugaacagagaggagaucgacggcgugaagcuggagagcaccagaaucuaccagauccuggccaucuacagcaccguggccagcagccuggugcugguggugagccugggcgccaucagcuucuggaugugcagcaacggcagccugcagugcagaaucugcaucuga

SEQ ID NO: 165327 - RNA, 1701 nt, Artificial Sequence; identical to SEQ ID NO: 164342
  derived and/or modified CDS sequence (opt4) from hemagglutinin__InfluenzaA__ADK33691

SEQ ID NO: 165328 - RNA, 1701 nt, Artificial Sequence
  derived and/or modified CDS sequence (opt4) from hemagglutinin__InfluenzaA__ADK33701
augaaggccauccugguggugcugcuguacaccuucgccaccgccaacgccgacacccugugcaucggcuaccacgccaacaacagcaccgacaccguggacaccgugcuggagaagaacgugaccgugacccacagcgugaaccugcuggaggacaagcacaacggcaagcugugcaagcugagaggcguggccccccugcaccugggcaagugcaacaucgccggcuggauccugggcaaccccgagugcgagagccugagcaccgccagcagcuggagcuacaucguggagaccagcagcagcgacaacggcaccugcuaccccggcgacuucaucgacuacgaggagcugagagagcagcugagcagcgugagcagcuucgagagauucgagaucuuccccaagaccagcagcuggcccaaccacgacagcaacaagggcgugaccgccgccugcccccacgccggcgccaagagcuucuacaagaaccugaucuggcuggugaagaagggcaacagcuaccccaagcugagcaagagcuacaucaacgacaagggcaaggaggugcuggugcuguggggcauccaccaccccagcaccagcgccgaccagcagagccuguaccagaacgccgacgccuacguguucgugggcaccagcagauacagcaagaaguucaagcccgagaucgccaucagacccaaggugagagaccaggagggcagaaugaacuacuacuggacccugguggagcccggcgacaagaucaccuucgaggccaccggcaaccugguggugcccagauacgccuucgccauggagagaaacgccggcagcggcaucaucaucagcgacacccccgugcacgacugcaacaccaccugccagacccccaagggcgccaucaacaccagccugcccuuccagaacauccaccccaucaccaucggcaagugccccaaguacgugaagagcaccaagcugagacuggccaccggccugagaaacgugcccagcauccagagcagaggccuguucggcgccaucgccggcuucaucgagggcggcuggaccggcaugguggacggcugguacggcuaccaccaccagaacgagcagggcagcggcuacgccgccgaccugaagagcacccagaacgccaucgacaagaucaccaacaaggugaacagcgugaucgagaagaugaacacccaguucaccgccgugggcaaggaguucaaccaccuggagaagagaaucgagaaccugaacaagaagguggacgacggcuuccuggacaucuggaccuacaacgccgagcugcuggugcugcuggagaacgagagaacccuggacuaccacgacagcaacgugaagaaccuguacgagaaggugagaagccagcugaagaacaacgccaaggagaucggcaacggcugcuucgaguucuaccacaagugcgacaacaccugcauggagagcgugaagaacggcaccuacgacuaccccaaguacagcgaggaggccaagcugaacagagaggagaucgacggcgugaagcuggagagcaccagaguguaccagauccuggccaucuacagcaccguggccagcagccuggugcugguggugagccugggcgccaucagcuucuggaugugcagcaacggcagccugcagugcagaaucugcaucuga

SEQ ID NO: 165329 - RNA, 1701 nt, Artificial Sequence
  derived and/or modified CDS sequence (opt4) from hemagglutinin__InfluenzaA__ADK33711
augaaggccauccugguggugcugcuguacaccuucgccaccgccaacgccgacacccugugcaucggcuaccacgccaacaacagcaccgacaccguggacaccgugcuggagaagaacgugaccgugacccacagcgugaaccugcuggaggacaagcacaacggcaagcugugcaagcugagaggcguggccccccugcaccugggcaagugcaacaucgccggcuggauccugggcaaccccgagugcgagagccugagcaccgccagcagcuggagcuacaucguggagaccagcagcagcgacaacggcaccugcuaccccggcgacuucaucgacuacgaggagcugagagagcagcugagcagcgugagcagcuucgagagauucgagaucuuccccaagaccagcagcuggcccaaccacgacagcaacaagggcgugaccgccgccugcccccacgccggcgccaagagcuucuacaagaaccugaucuggcuggugaagaagggcaacagcuaccccaagcugagcaagagcuacaucaacgacaagggcaaggagauccuggugcuguggggcauccaccaccccagcaccagcgccgaccagcagagccuguaccagaacgccgacgccuacguguucgugggcaccagcagauacagcaagaaguucaagcccgagaucgccaucagacccaaggugagagaccaggagggcagaaugaacuacuacuggacccugguggagcccggcgacaagaucaccuucgaggccaccggcaaccugguggugcccagauacgccuucgccauggagagaaacgccggcagcggcaucaucaucagcgacacccccgugcacgacugcaacaccaccugccagacccccaagggcgccaucaacaccagccugcccuuccagaacauccaccccaucaccaucggcaagugccccaaguacgugaagagcaccaagcugagacuggccaccggccugagaaacauccccagcauccagagcagaggccuguucggcgccaucgccggcuucaucgagggcggcuggaccggcaugguggacggcugguacggcuaccaccaccagaacgagcagggcagcggcuacgccgccgaccugaagagcacccagaacgccaucgacgagaucaccaacaaggugaacagcgugaucgagaagaugaacacccaguucaccgccgugggcaaggaguucaaccaccuggagaagagaaucgagaaccugaacaagaagguggacgacggcuuccuggacaucuggaccuacaacgccgagcugcuggugcugcuggagaacgagagaacccuggacuaccacgacagcaacgugaagaaccuguacgagaaggugagaagccagcugaagaacaacgccaaggagaucggcaacggcugcuucgaguucuaccacaagugcgacaacaccugcauggagagcgugaagaacggcaccuacgacuaccccaaguacagcgaggaggccaagcugaacagagaggagaucgacggcgugaagcuggagagcaccagaaucuaccagauccuggccaucuacagcaccguggccagcagccuggugcugguggugagccugggcgccaucagcuucuggaugugcagcaacggcagccugcagugcagaaucugcaucuga

SEQ ID NO: 165330 - RNA, 1701 nt, Artificial Sequence
  derived and/or modified CDS sequence (opt4) from hemagglutinin__InfluenzaA__ADK33721
augaaggccauccugguggugcugcuguacaccuucgugaccgccaacgccgacacccugugcaucggcuaccacgccaacaacagcaccgacaccguggacaccgugcuggagaagaacgugaccgugacccacagcgugaaccugcuggaggacaagcacaacggcaagcugugcaagcugagaggcguggccccccugcaccugggcaagugcaacaucgccggcuggauccugggcaaccccgagugcgagagccugagcaccgccagcagcuggagcuacaucguggagaccagcagcagcgacaacggcaccugcuaccccggcgacuucaucgacuacgaggagcugagagagcagcugagcagcgugagcagcuucgagagauucgagaucuuccccaagaccagcagcuggcccaaccacgacagcaacaagggcgugaccgccgccugcccccacgccggcgccaagagcuucuacaagaaccugaucuggcuggugaagaagggcaacagcuaccccaagcugagcaagagcuacaucaacgacaagggcaaggaggugcuggugcuguggggcauccaccaccccagcaccagcgccgaccagcagagccuguaccagaacgccgacgccuacguguucgugggcaccagcagauacagcaagaaguucaagcccgagaucgccaucagacccaaggugagagaccaggagggcagaaugaacuacuacuggacccugguggagcccggcgacaagaucaccuucgaggccaccggcaaccugguggugcccagauacgccuucgccauggagagaaacgccggcagcggcaucaucaucagcgacacccccgugcacgacugcaacaccaccugccagacccccaagggcgccaucaacaccagccugcccuuccagaacauccaccccaucaccaucggcaagugccccaaguacgugaagagcaccaagcugagacuggccaccggccugagaaacgugcccagcauccagagcagaggccuguucggcgccaucgccggcuucaucgagggcggcuggaccggcaugguggacggcugguacggcuaccaccaccagaacgagcagggcagcggcuacgccgccgaccugaagagcacccagcacgccaucgacgagaucaccaacaaggugaacagcgugaucgagaagaugaacacccaguucaccgccgugggcaaggaguucaaccaccuggagaagagaaucgagaaccugaacaagaagguggacgacggcuuccuggacaucuggaccuacaacgccgagcugcuggugcugcuggagaacgagagaacccuggacuaccacgacagcaacgugaagaaccuguacgagaaggugagaagccagcugaagaacaacgccaaggagaucggcaacggcugcuucgaguucuaccacaagugcgacaacaccugcauggagagcgugaagaacggcaccuacgacuaccccaaguacagcgaggaggccaagcugaacagagaggagaucgacggcgugaagcuggagagcaccagaaucuaccagauccuggccaucuacagcaccguggccagcagccuggugcugguggugagccugggcgccaucagcuucuggaugugcagcaacggcagccugcagugcagaaucugcaucuga

SEQ ID NO: 165331 - RNA, 1701 nt, Artificial Sequence
  derived and/or modified CDS sequence (opt4) from hemagglutinin__InfluenzaA__ADK33731
augaaggccacccugguggugcugcuguacaccuucgccaccgccaacgccgacacccugugcaucggcuaccacgccaacaacagcaccgacaccguggacaccgugcuggagaagaacgugaccgugacccacagcgugaaccugcuggaggacaagcacaacggcaagcugugcaagcugagaggcguggccccccugcaccugggcaagugcaacaucgccggcuggauccugggcaaccccgagugcgagagccugagcaccgccagcagcuggagcuacaucguggagaccagcagcagcggcaacggcaccugcuaccccggcgacuucaucgacuacgaggagcugagagagcagcugagcagcgugagcagcuucgagagauucgagaucuuccccaagaccagcagcuggcccaaccacgacagcaacaagggcgugaccgccgccugcccccacgccggcgccaagagcuucuacaagaaccugaucuggcuggugaagaagggcaacagcuaccccaagcugagcaagagcuacaucaacgacaagggcaaggaggugcuggugcuguggggcauccaccaccccagcaccagcgccgaccagcagagccuguaccagaacgccgacgccuacgccuucgugggcaccagcagauacagcaagaaguucaagcccgagaucgccaucagacccaaggugagagaccaggagggcagaaugaacuacuacuggacccugguggagcccggcgacaagaucaccuucgaggccaccggcaaccugcuggugcccagauacgccuucgccauggagagaaacgccggcagcggcaucaucaucagcgacacccccgugcacgacugcaacaccaccugccagacccccaagggcgccaucaacaccagccugcccuuccagaacauccaccccaucaccaucggcaagugccccaaguacgugaagagcaccaagcugagacuggccaccggccugagaaacgugcccagcauccagagcagaggccuguucggcgccaucgccggcuucaucgagggcggcuggaccggcaugguggacggcugguacggcuaccaccaccagaacgagcagggcagcggcuacgccgccgaccugaagagcacccagaacgccaucgacgagaucaccaacaaggugaacagcgugaucgagaagaugaacacccaguucaccgccgugggcaaggaguucaaccaccuggagaagagaaucgagaaccugaacaagaagguggacgacggcuuccuggacaucuggaccuacaacgccgagcugcuggugcugcuggagaacgagagaacccuggacuaccacgacagcaacgugaagaaccuguacgagaaggugagaagccagcugaagaacaacgccaaggagaucggcaacggcugcuucgaguucuaccacaagugcgacaacaccugcauggagagcgugaagaacggcaccuacgacuaccccaaguacagcgaggaggccaagcugaacagagaggagaucgacggcgugaagcuggagagcaccagaaucuaccagauccuggccaucuacagcaccguggccagcagccuggugcugguggugagccugggcgccaucagcuucuggaugugcagcaacggcagccugcagugcagaaucugcaucuga

SEQ ID NO: 165332 - RNA, 1701 nt, Artificial Sequence; identical to SEQ ID NO: 164896
  derived and/or modified CDS sequence (opt4) from hemagglutinin__InfluenzaA__ADK33741

SEQ ID NO: 165333 - RNA, 1701 nt, Artificial Sequence; identical to SEQ ID NO: 162729
  derived and/or modified CDS sequence (opt4) from hemagglutinin__InfluenzaA__ADK33751

SEQ ID NO: 165334 - RNA, 1701 nt, Artificial Sequence
  derived and/or modified CDS sequence (opt4) from hemagglutinin__InfluenzaA__ADK33761
augaaggccauccugguggugcugcuguacaccuucgccaccgccaacgccgacacccugugcaucggcuaccacgccaacaacagcaccgacaccguggacaccgugcuggagaagaacgugaccgugacccacagcgugaaccugcuggaggacaagcacaacggcaagcugugcaagcugagaggcguggccccccugcaccugggcaagugcaacaucgccggcuggauccugggcaaccccgagugcgagagccugagcaccgccagcagcuggagcuacaucguggagaccagcagcagcgacaacggcaccugcuaccccggcgacuucaucgacuacgaggagcugagagagcagcugagcagcgugagcagcuucgagagauucgagaucuuccccaagaccagcagcuggcccaaccacgacagcaacaagggcgugaccgccgccugcccccacgccggcgccaagagcuucuacaagaaccugaucuggcuggugaagaagggcaacagcuaccccaagcugagcaagagcuacaucaacgacaagggcaaggaggugcuggugcuguggggcauccaccaccccagcaccagcgccgaccagcagagccuguaccagaacgccgacgccuacguguucgugggcaccagcagauacagcaagaaguucaagcccgagaucgccaucagacccaaggugagagaccaggagggcagaaugaacuacuacuggacccugguggagcccggcgacaagaucaccuucgaggccaccggcaaccugguggugcccagauacgccuucgccauggagagaaacgccggcagcggcaucaucaucagcgacacccccgugcacgacugcaacaccaccugccagacccccaagggcgccaucaacaccagccugcccuuccagaacauccaccccaucaccaucggcaagugccccaaguacgugaagagcaccaagcugagccuggccaccggccugagaaacgugcccagcauccagagcagaggccuguucggcgccaucgccggcuucaucgagggcggcuggaccggcaugguggacggcugguacggcuaccaccaccagaacgagcagggcagcggcuacgccgccgaccugaagagcacccagaacgccaucgacgagaucaccaacaaggugaacagcgugaucgagaagaugaacacccaguucaccgccgugggcaaggaguucaaccaccuggagaagagaaucgagaaccugaacaagaagguggacgacggcuuccuggacaucuggaccuacaacgccgagcugcuggugcugcuggagaacgagagaacccuggacuaccacgacagcaacgugaagaaccuguacgagaaggugagaagccagcugaagaacaacgccaaggagaucggcaacggcugcuucgaguucuaccacaagugcgacaacaccugcauggagagcgugaagaacggcaccuacgacuaccccaaguacagcgaggaggccaagcugaacagagaggagaucgacggcgugaagcuggagagcaccagaaucuaccagauccuggccaucuacagcaccguggccagcagccuggugcugguggugagccugggcgccaucagcuucuggaugugcagcaacggcagccugcagugcagaaucugcaucuga

SEQ ID NO: 165335 - RNA, 1701 nt, Artificial Sequence; identical to SEQ ID NO: 163893
  derived and/or modified CDS sequence (opt4) from hemagglutinin__InfluenzaA__ADK33771

SEQ ID NO: 165336 - RNA, 1701 nt, Artificial Sequence; identical to SEQ ID NO: 163893
  derived and/or modified CDS sequence (opt4) from hemagglutinin__InfluenzaA__ADK33781

SEQ ID NO: 165337 - RNA, 1701 nt, Artificial Sequence; identical to SEQ ID NO: 163830
  derived and/or modified CDS sequence (opt4) from hemagglutinin__InfluenzaA__ADK33791

SEQ ID NO: 165338 - RNA, 1701 nt, Artificial Sequence; identical to SEQ ID NO: 165328
  derived and/or modified CDS sequence (opt4) from hemagglutinin__InfluenzaA__ADK33801

SEQ ID NO: 165339 - RNA, 1701 nt, Artificial Sequence
  derived and/or modified CDS sequence (opt4) from hemagglutinin__InfluenzaA__ADK33811
augaaggccauccugguggugcugcuguacaccuucgccaccgccaacgccgacacccugugcaucggcuaccacgccaacaacagcaccgacaccguggacaccgugcuggagaagaacgugaccgugacccacagcgugaaccugcuggaggacaagcacaacggcaagcugugcaagcugagaggcguggccccccugcaccugggcaagugcaacaucgccggcuggauccugggcaaccccgagugcgagagccugagcaccgccagcagcuggagcuacaucguggagaccagcagcagcgacaacggcaccugcuaccccggcgacuucaucgacuacgaggagcugagagagcagcugagcagcgugagcagcuucgagagauucgagaucuuccccaagaccagcagcuggcccaaccacgacagcaacaagggcgugaccgccgccugcccccacgccggcgccaagagcuucuacaagaaccugaucuggcuggugaagaagggcaacagcuaccccaagcugagcaagagcuacaucaacgacaagggcaaggaggugcuggugcuguggggcauccaccaccccagcaccagcgccgaccagcagagccuguaccagaacgccgacgccuacguguucgugggcaccagcagauacagcaagaaguucaagcccgagaucgccaucagacccaaggugagagaccaggagggcagaaugaacuacuacuggacccugguggagcccggcgacaagaucaccuucgaggccaccggcaaccugguggugcccagauacgccuucgccauggagagaaacgccggcagcggcaucaucaucagcgacacccccgugcacgacugcaacaccaccugccagacccccaagggcgccaucaacaccagccugcccuuccagaacauccaccccaucaccaucggcaagugccccaaguacgugaagagcaccaagcugagacuggccaccggccugagaaacgugcccagcauccagagcagaggccuguucggcgccaucgccggcuucaucgagggcggcuggaccggcaugguggacggcugguacggcuaccaccaccagaacgagcagggcagcggcuacgccgccgaccugaagagcacccagcacgccaucgacgagaucaccaacaaggugaacagcgugaucgagaagaugaacacccaguucaccgccgugggcaaggaguucaaccaccuggagaagagaaucgagaaccugaacaagaagguggacgacggcuuccuggacaucuggaccuacaacgccgagcugcuggugcugcuggagaacgagagaacccuggacuaccacgacagcaacgugaagaaccuguacgagaaggugagaagccagcugaagaacaacgccaaggagaucggcaacggcugcuucgaguucuaccacaagugcgacaacaccugcauggagagcgugaagaacggcaccuacgacuaccccaaguacagcgaggaggccaagcugaacagagaggagaucgacggcaucaagcuggagagcaccagaaucuaccagauccuggccaucuacagcaccguggccagcagccuggugcugguggugagccugggcgccaucagcuucuggaugugcagcaacggcagccugcagugcagaaucugcaucuga

SEQ ID NO: 165340 - RNA, 1701 nt, Artificial Sequence
  derived and/or modified CDS sequence (opt4) from hemagglutinin__InfluenzaA__ADK33821
augaaggccauccugguggugcugcuguacaccuucgccaccgccaacgccgacacccugugcaucggcuaccacgccaacaacagcaccgacaccguggacaccgugcuggagaagaacgugaccgugacccacagcgugaaccugcuggaggacaagcacaacggcaagcugugcaagcugagaggcguggccccccugcaccugggcaagugcaacaucgccggcuggauccugggcaaccccgagugcgagagccugagcaccgccagcagcuggagcuacaucguggagaccagcagcagcgacaacggcaccugcuaccccggcgacuucaucgacuacgaggagcugagagagcagcugagcagcgugagcagcuucgagagauucgagaucuuccccaagaccagcagcuggcccaaccacgacagcaacaagggcgugaccgccgccugcccccacgccggcgccaagagcuucuacaagaaccugaucuggcuggugaagaagggcaacagcuaccccaagcugagcaagagcuacaucaacgacaagggcaaggaggugcuggugcuguggggcauccaccaccccagcaccagcgccgaccagcagagccuguaccagaacgccgacgccuacguguucgugggcaccagcagauacagcaagaaguucaagcccgagaucgccaucagacccaaggugagagaccaggagggcagaaugaacuacuacuggacccugguggagcccggcgacaagaucaccuucgaggccaccggcaaccugguggugcccagauacgccuucaccauggagagaaacgccggcagcggcaucaucaucagcgacacccccgugcacgacugcaacaccaccugccagacccccaagggcgccaucaacaccagccugcccuuccagaacauccaccccaucaccaucggcaagugccccaaguacgugaagagcaccaagcugagacuggccaccggccugagaaacgugcccagcauccagagcagaggccuguucggcgccaucgccggcuucaucgagggcggcuggaccggcaugguggacggcugguacggcuaccaccaccagaacgagcagggcagcggcuacgccgccgaccugaagagcacccagaacgccaucgacgagaucaccaacaaggugaacagcgugaucgagaagaugaacacccaguucaccgccgugggcaaggaguucaaccaccuggagaagagaaucgagaaccugaacaagaagguggacgacggcuuccuggacaucuggaccuacaacgccgagcugcuggugcugcuggagaacgagagaacccuggacuaccacgacagcaacgugaagaaccuguacgagaaggugagaaaccagcugaagaacaacgccaaggagaucggcaacggcugcuucgaguucuaccacaagugcgacaacaccugcauggagagcgugaagaacggcaccuacgacuaccccaaguacagcgaggaggccaagcugaacagagaggagaucgacggcgugaagcuggagagcaccagaaucuaccagauccuggccaucuacagcaccguggccagcagccuggugcuggccgugagccugggcgccaucagcuucuggaugugcagcaacggcagccugcagugcagaaucugcaucuga

SEQ ID NO: 165341 - RNA, 1701 nt, Artificial Sequence
  derived and/or modified CDS sequence (opt4) from hemagglutinin__InfluenzaA__ADK33831
augaaggccauccugguggugcugcuguacaccuucgccaccgccaacgccgacacccugugcaucggcuaccacgccaacaacagcaccgacaccguggacaccgugcuggagaagaacgugaccgugacccacagcgugaaccugcuggaggacaagcacaacggcaagcugugcaagcugagaggcaucgccccccugcaccugggcaagugcaacaucgccggcuggauccugggcaaccccgagugcgagagccugagcaccgccagcagcuggagcuacaucguggagaccagcagcagcgacaacggcaccugcuaccccggcgacuucaucgacuacgaggagcugagagagcagcugagcagcgugagcagcuucgagagauucgagaucuuccccaacaccagcagcuggcccaaccacgacagcaacaagggcgugaccgccgccugcccccacgccggcgccaagagcuucuacaagaaccugaucuggcuggugaagaagggcaacagcuaccccaagcugagcaagagcuacaucaacgacaagggcaaggaggugcuggugcuguggggcauccaccaccccagcaccagcgccgaccagcagagccuguaccagaacgccgacgccuacguguucgugggcaccagcagauacagcaagaaguucaagcccgagaucgccaucagacccaaggugagagaccaggagggcagaaugaacuacuacuggacccugguggagcccggcgacaagaucaccuucgaggccaccggcaaccugguggugcccagauacgccuucgccauggagagaaacgccggcagcggcaucaucaucagcgacacccccgugcacgacugcaacaccaccugccagacccccaagggcgccaucaacaccagccugcccuuccagaacauccaccccaucaccaucggcaagugccccaaguacgugaagagcaccaagcugagacuggccaccggccugagaaacgugcccagcauccagagcagaggccuguucggcgccaucgccggcuucaucgagggcggcuggaccggcaugguggacggcugguacggcuaccaccaccagaacgagcagggcagcggcuacgccgccgaccugaagagcacccagaacgccaucgacgagaucaccaacaaggugaacagcgugaucgagaagaugaacacccaguucaccgccgugggcaaggaguucaaccaccuggagaagagaaucgagaaccugaacaagaagguggacgacggcuuccuggacaucuggaccuacaacgccgagcugcuggugcugcuggagaacgagagaacccuggacuaccacgacagcaacgugaagaaccuguacgagaaggugagaagccagcugaagaacaacgccaaggagaucggcaacggcugcuucgaguucuaccacaagugcgacaacaccugcauggagagcgugaagaacggcaccuacgacuaccccaaguacagcgaggaggccaagcugaacagagaggagaucgacggcgugaagcuggagagcaccagaaucuaccagauccuggccaucuacagcaccguggccagcagccuggugcugguggugagccugggcgccaucagcuucuggaugugcagcaacggcagccugcagugcagaaucugcaucuga

SEQ ID NO: 165342 - RNA, 1701 nt, Artificial Sequence; identical to SEQ ID NO: 164149
  derived and/or modified CDS sequence (opt4) from hemagglutinin__InfluenzaA__ADK33841

SEQ ID NO: 165343 - RNA, 1701 nt, Artificial Sequence; identical to SEQ ID NO: 164896
  derived and/or modified CDS sequence (opt4) from hemagglutinin__InfluenzaA__ADK33851

SEQ ID NO: 165344 - RNA, 1701 nt, Artificial Sequence; identical to SEQ ID NO: 162729
  derived and/or modified CDS sequence (opt4) from hemagglutinin__InfluenzaA__ADK33861

SEQ ID NO: 165345 - RNA, 1701 nt, Artificial Sequence
  derived and/or modified CDS sequence (opt4) from hemagglutinin__InfluenzaA__ADK33871
augaaggccauccugguggugcugcuguacaccuucgccaccgccaacgccgacacccugugcaucggcuaccacgccaacaacagcaccgacaccguggacaccgugcuggagaagaacgugaccgugacccacagcgugaaccugcuggaggacaagcacaacggcaagcugugcaagcugagaggcguggccccccugcaccugggcaagugcaacaucgccggcuggauccugggcaaccccgagugcgagagccugagcaccgccagcagcuggagcuacaucguggagaccagcagcagcgacaacggcaccugcuaccccggcgacuucaucgacuacgaggagcugagagagcagcugagcagcgugagcagcuucgagagauucgagaucuuccccaagaccagcagcuggcccaaccacgacagcaacaagggcgugaccgccgccugcccccacgccggcgccaagagcuucuacaagaaccugaucuggcuggugaagaagggcaacagcuaccccaagcugagcaagagcuacaucaacgacaagggcaaggaggugcuggugcuguggggcauccaccaccccagcaccagcgccgaccagcagagccuguaccagaacgccgacgccuacguguucgugggcaccagcagauacagcaagaaguucaagcccgagaucgccaucagacccaaggugagagagcaggagggcagaaugaacuacuacuggacccugguggagcccggcgacaagaucaccuucgaggccaccggcaaccuggugauccccagauacgccuucgccauggagagaaacgccggcagcggcaucaucaucagcgacacccccgugcacgacugcaacaccaccugccagacccccaagggcgccaucaacaccagccugcccuuccagaacauccaccccaucaccaucggcaagugccccaaguacgugaagagcaccaagcugagacuggccaccggccugagaaacgugcccagcauccagagcagaggccuguucggcgccaucgccggcuucaucgagggcggcuggaccggcaugguggacggcugguacggcuaccaccaccagaacgagcagggcagcggcuacgccgccgaccugaagagcacccagaacgccaucgacgagaucaccaacaaggugaacagcgugaucgagaagaugaacacccaguucaccgccgugggcaaggaguucaaccaccuggagaagagaaucgagaaccugaacaagaagguggacgacggcuuccuggacaucuggaccuacaacgccgagcugcuggugcugcuggagaacgagagaacccuggacuaccacgacagcaacgugaagaaccuguacgagaaggugagaagccagcugaagaacaacgccaaggagaucggcaacggcugcuucgaguucuaccacaagugcgacaacaccugcauggagagcgugaagaacggcaccuacgacuaccccaaguacagcgaggaggccaagcugaacagagaggagaucgacggcgugaagcuggagagcaccagaaucuaccagauccuggccaucuacagcaccguggccagcagccuggugcugcuggugagccugggcgccaucagcuucuggaugugcagcaacggcagccugcagugcagaaucugcaucuga

SEQ ID NO: 165346 - RNA, 1701 nt, Artificial Sequence
  derived and/or modified CDS sequence (opt4) from hemagglutinin__InfluenzaA__ADK33881
augaaggccauccugguggugcugcuguacaccuucgccaccgccaacgccgacacccugugcaucggcuaccacgccaacaacagcaccgacaccguggacaccgugcuggagaagaacgugaccgugacccacagcgugaacauccuggaggacaagcacaacggcaagcugugcaagcugagaggcguggccccccugcaccugggcaagugcaacaucgccggcuggauccugggcaaccccgagugcgagagccugagcaccgccagcagcuggagcuacaucguggagaccagcagcagcgacaacggcaccugcuaccccggcgacuucaucgacuacgaggagcugagagagcagcugagcagcgugagcagcuucgagagauucgagaucuuccccaagaccagcagcuggcccaaccacgacagcaacaagggcgugaccgccgccugcccccacgccggcgccaagagcuucuacaagaaccugaucuggcuggugaagaagggcaacagcuaccccaagcugagcaagagcuacaucaacgacaagggcaaggaggugcuggugcuguggggcauccaccaccccagcaccagcgccgaccagcagagccuguaccagaacgccgacgccuacguguucgugggcaccagcagauacagcaagaaguucaagcccgagaucgccaucagacccaaggugagagaccaggagggcagaaugaacuacuacuggacccugguggagcccggcgacaagaucaccuucgaggccaccggcaaccugguggugcccagauacgccuucgccauggagagaaacgccggcagcggcaucaucaucagcgacacccccgugcacgacugcaacaccaccugccagacccccaagggcgccaucaacaccagccugcccuuccagaacauccaccccaucaccaucggcaagugccccaaguacgugaagagcaccaagcugagacuggccaccggccugagaaacgugcccagcauccagagcagaggccuguucggcgccaucgccggcuucaucgagggcggcuggaccggcaugguggacggcugguacggcuaccaccaccagaacgagcagggcagcggcuacgccgccgaccugaagagcacccagaacgccaucgacgagaucaccaacaaggugaacagcgugaucgagaagaugaacacccaguucaccgccgugggcaaggaguucaaccaccuggagaagagaaucgagaaccugaacaagaagguggacgacggcuuccuggacaucuggaccuacaacgccgagcugcuggugcugcuggagaacgagagaacccuggacuaccacgacagcaacgugaagaaccuguacgagaaggugagaagccagcugaagaacaacgccaaggagaucggcaacggcugcuucgaguucuaccacaagugcgacaacaccugcauggagagcgugaagaacggcaccuacgacuaccccaaguacagcgaggaggccaagcugaacagagaggagaucgacggcgugaagcuggagagcaccaagaucuaccagauccuggccaucuacagcaccguggccagcagccuggugcugguggugagccugggcgccaucagcuucuggaugugcagcaacggcagccugcagugcagaaucugcaucuga

SEQ ID NO: 165347 - RNA, 1701 nt, Artificial Sequence
  derived and/or modified CDS sequence (opt4) from hemagglutinin__InfluenzaA__ADK33891
augaaggccauccugguggugcugcuguacaccuucgccaccgccaacgccgacacccugugcaucggcuaccacgccaacaacagcaccgacaccguggacaccgugcuggagaagaacgugaccgugacccacagcgugaaccugcuggaggacaagcacaacggcaagcugugcaagcugagaggcaucgccccccugcaccugggcaagugcaacaucgccggcuggauccugggcaaccccgagugcgagagccugagcaccgccagcagcuggagcuacaucguggagaccagcagcagcgacaacggcaccugcuaccccggcgacuucaucgacuacgaggagcugagagagcagcugagcagcgugagcagcuucgagagauucgagaucuuccccaagaccagcagcuggcccaaccacgacagcaacaagggcgugaccgccgccugcccccacgccggcgccaagagcuucuacaagaaccugaucuggcuggugaagaagggcaacagcuaccccaagcugagcaagagcuacaucaacgacaagggcaaggaggugcuggugcuguggggcauccaccaccccagcaccagcgccgaccagcagagccuguaccagaacgccgacgccuacguguucgugggcaccagcagauacagcaagaaguucaagcccgagaucgccaucagacccaaggugagagaccaggagggcagaaugaacuacuacuggacccugguggagcccggcgacaagaucaccuucgaggccaccggcaaccugguggugcccagauacgccuucgccauggagagaaacgccggcagcggcaucaucaucagcgacacccccgugcacgacugcaacaccaccugccagacccccaagggcgccaucaacaccagccugcccuuccagaacauccaccccaucaccaucggcaagugccccaaguacgugaagagcaccaagcugagacuggccaccggccugagaaacgugcccagcauccagagcagaggccuguucggcgccaucgccggcuucaucgagggcggcuggaccggcaugguggacggcugguacggcuaccaccaccagaacgagcagggcagcggcuacgccgccgaccugaagagcacccagaacgccaucgacgagaucaccaacaaggugaacagcgugaucgagaagaugaacacccaguucaccgccgugggcaaggaguucaaccaccuggagaagagaaucgagaaccugaacaagaagguggacgacggcuuccuggacaucuggaccuacaacgccgagcugcuggugcugcuggagaacgagagaacccuggacuaccacgacagcaacgugaagaaccuguacgagaaggugagaaaccagcugaagaacaacgccaaggagaucggcaacggcugcuucgaguucuaccacaagugcgacaacaccugcauggagagcgugaagaacggcaccuacgacuaccccaaguacagcgaggaggccaagcugaacagagaggagaucgacggcgugaagcuggagagcaccagaaucuaccagauccuggccaucuacagcaccguggccagcagccuggugcugguggugagccugggcgccaucagcuucuggaugugcagcaacggcagccugcagugcagaaucugcaucuga

SEQ ID NO: 165348 - RNA, 1701 nt, Artificial Sequence; identical to SEQ ID NO: 164896
  derived and/or modified CDS sequence (opt4) from hemagglutinin__InfluenzaA__ADK33901

SEQ ID NO: 165349 - RNA, 1701 nt, Artificial Sequence
  derived and/or modified CDS sequence (opt4) from hemagglutinin__InfluenzaA__ADK33911
augaaggccauccugguggugcugcuguacaccuucgccaccgccaacgccgacacccugugcaucggcuaccacgccaacaacagcaccgacaccguggacaccgugcuggagaagaacgugaccgugacccacagcgugaaccugcuggagggcaagcacaacggcaagcugugcaagcugagaggcguggccccccugcaccugggcaagugcaacaucgccggcuggauccugggcaaccccgagugcgagagccugagcaccgccagcagcuggagcuacaucguggagaccagcagcagcgacaacggcaccugcuaccccggcgacuucaucgacuacgaggagcugagagagcagcugagcagcgugagcagcuucgagagauucgagaucuuccccaagaccagcagcuggcccaaccacgacagcaacaagggcgugaccgccgccugcccccacgccggcgccaagagcuucuacaagaaccugaucuggcugaucaagaagggcaacagcuaccccaagcugagcaagagcuacaucaacgacaagggcaaggaggugcuggugcuguggggcauccaccaccccagcaccagcgccgaccagcagagccuguaccagaacgccgacgccuacguguucgugggcaccagcagauacagcaagaaguucaagcccgagaucgccaucagacccaaggugagagaccaggagggcagaaugaacuacuacuggacccugguggagcccggcgacaagaucaccuucgaggccaccggcaaccugguggugcccagauacgccuucgccauggagagaaacgccggcagcggcaucaucaucagcgacacccccgugcacgacugcaacaccaccugccagacccccaagggcgccaucaacaccagccugcccuuccagaacauccaccccaucaccaucggcaagugccccaaguacgugaagagcaccaagcugagacuggccaccggccugagaaacauccccagcauccagagcagaggccuguucggcgccaucgccggcuucaucgagggcggcuggaccggcaugguggacggcugguacggcuaccaccaccagaacgagcagggcagcggcuacgccgccgaccugaagagcacccagaacgccaucgacgagaucaccaacaaggugaacagcgugaucgagaagaugaacacccaguucaccgccgugggcaaggaguucaaccaccuggagaagagaaucgagaaccugaacaagaagguggacgacggcuuccuggacaucuggaccuacaacgccgagcugcuggugcugcuggagaacgagagaacccuggacuaccacgacagcaacgugaagaaccuguacgagaaggugagaagccagcugaagaacaacgccaaggagaucggcaacggcugcuucgaguucuaccacaagugcgacaacaccugcauggagagcgugaagaacggcaccuacgacuaccccaaguacagcgaggaggccaagcugaacagagaggagaucgacggcgugaagcuggagagcaccagaaucuaccagauccuggccaucuacagcaccguggccagcagccuggugcugguggugagccugggcgccaucagcuucuggaugugcagcaacggcagccugcagugcagaaucugcaucuga

SEQ ID NO: 165350 - RNA, 1701 nt, Artificial Sequence
  derived and/or modified CDS sequence (opt4) from hemagglutinin__InfluenzaA__ADK33931
augaaggccauccugguggugcugcuguacaccuucgccaccgccaacgccgacacccugugcaucggcuaccacgccaacaacagcaccgacaccguggacaccgugcuggagaagaacgugaccgugacccacagcgugaaccugcuggaggacaagcacaacggcaagcugugcaagcugagaggcguggccccccugcaccugggcaagugcaacaucgccggcuggauccugggcaaccccgagugcgagagccugagcaccgccagcagcuggagcuacaucguggagaccagcagcagcgacaacggcaccugcuaccccggcgacuucaucgacuacgaggagcugagagagcagcugagcagcgugagcagcuucgagagauucgagaucuuccccaagaccagcagcuggcccaaccacgacagcaacaagggcgugaccgccgccugcccccacgccggcgccaagagcuucuacaagaaccugaucuggcuggugaagaagggcaacagcuaccccaagcugagcaagagcuacaucaacgacaagggcaaggaggugcuggugcuguggggcauccaccaccccagcaccagcgccgaccagcagagccuguaccagaacgccgacgccuacguguucgugggcaccagcagauacagcaagaaguucaagcccgagaucgccaucagacccaaggugagagagcaggagggcagaaugaacuacuacuggacccugguggagcccggcgacaagaucaccuucgaggccaccggcaaccugguggugcccagauacgccuucgccauggagagaaacgccggcagcggcaucaucaucagcgacacccccgugcacgacugcaacaccaccugccagacccccaagggcgccaucaacaccagccugcccuuccagaacauccaccccaucaccaucggcaagugccccaaguacgugaagagcaccaagcugagacuggccaccggccugagaaacgugcccagcauccagagcagaggccuguucggcgccaucgccggcuucaucgagggcggcuggaccggcaugguggacggcugguacggcuaccaccaccagaacgagcagggcagcggcuacgccgccgaccugaagagcacccagaacgccaucgacgagaucaccaacaaggugaacagcgugaucgagaagaugaacacccaguucaccgccgugggcaaggaguucaaccaccuggagaagagaaucgagaaccugaacaagaagguggacgacggcuuccuggacaucuggaccuacaacgccgagcugcuggugcugcuggagaacgagagaacccuggacuaccacgacagcaacgugaagaaccuguacgagaaggugagaagccagcugaagaacaacgccaaggagaucggcaacggcugcuucgaguucuaccacaagugcgacaacaccugcauggagagcgugaagaacggcaccuacgacuaccccaaguacagcgaggaggccaagcugaacagagaggagaucgacggcgugaagcuggagagcaccagaaucuaccagauccuggccaucuacagcaccguggccagcagccuggugcugcuggugagccugggcgccaucagcuucuggaugugcagcaacggcagccugcagugcagaaucugcaucuga

SEQ ID NO: 165351 - RNA, 1701 nt, Artificial Sequence
  derived and/or modified CDS sequence (opt4) from hemagglutinin__InfluenzaA__ADK33941
augaaggccauccugguggugcugcuguacaccuucgccaccgccaacgccgacacccugugcaucggcuaccacgccaacaacagcaccgacaccguggacaccgugcuggagaagaacgugaccgugacccacagcgugaaccugcuggaggacaagcacaacggcaagcugugcaagcugagaggcguggccccccugcaccugggcaagugcaacaucgccggcuggauccugggcaaccccgagugcgagagccugagcaccgccagcagcuggagcuacaucguggagaccagcagcagcgacaacggcaccugcuaccccggcgacuucaucgacuacgaggagcugagagagcagcugagcagcgugagcagcuucgagagauucgagaucuuccccaagaccagcagcuggcccaaccacgacagcaacaagggcgugaccgccgccugcccccacgccggcgccaagagcuucuacaagaaccugaucuggcuggugaagaagggcaacagcuaccccaagcugagcaagagcuacaucaacgacaagggcaaggaggugcuggugcuguggggcauccaccaccccagcaccagcgccgaccagcagagccuguaccagaacgccgacgccuacguguucgugggcaccagcagauacagcaagaaguucaagcccgagaucgccaucagacccaaggugagagaccaggagggcagaaugaacuacuacuggacccugguggagcccggcgacaagaucaccuucgaggccaccggcaaccugguggugcccagauacgccuucgccauggagagaaacgccggcagcggcaucgugaucagcgacacccccgugcacgacugcaacaccaccugccagacccccaagggcgccaucaacaccagccugcccuuccagaacauccaccccaucaccaucggcaagugccccaaguacgugaagagcaccaagcugagacuggccaccggccugagaaacauccccagcauccagagcagaggccuguucggcgccaucgccggcuucaucgagggcggcuggaccggcaugguggacggcugguacggcuaccaccaccagaacgagcagggcagcggcuacgccgccgaccugaagagcacccagaacgccaucgacaagaucaccaacaaggugaacagcgugaucgagaagaugaacacccaguucaccgccgugggcaaggaguucaaccaccuggagaagagaaucgagaaccugaacaagaagguggacgacggcuuccuggacaucuggaccuacaacgccgagcugcuggugcugcuggagaacgagagaacccuggacuaccacgacagcaacgugaagaaccuguacgagaaggugagaagccagcugaagaacaacgccaaggagaucggcaacggcugcuucgaguucuaccacaagugcgacaacaccugcauggagagcgugaagaacggcaccuacgacuaccccaaguacagcgaggaggccaagcugaacagagaggagaucgacggcgugaagcuggagagcaccagaaucuaccagauccuggccaucuacagcaccguggccagcagccuggugcugguggugagccugggcgccaucagcuucuggaugugcagcaacggcagccugcagugcagaaucugcaucuga

SEQ ID NO: 165352 - RNA, 1701 nt, Artificial Sequence; identical to SEQ ID NO: 165349
  derived and/or modified CDS sequence (opt4) from hemagglutinin__InfluenzaA__ADK33951

SEQ ID NO: 165353 - RNA, 1701 nt, Artificial Sequence; identical to SEQ ID NO: 163893
  derived and/or modified CDS sequence (opt4) from hemagglutinin__InfluenzaA__ADK33961

SEQ ID NO: 165354 - RNA, 1701 nt, Artificial Sequence; identical to SEQ ID NO: 163673
  derived and/or modified CDS sequence (opt4) from hemagglutinin__InfluenzaA__ADK45312

SEQ ID NO: 165355 - RNA, 1701 nt, Artificial Sequence
  derived and/or modified CDS sequence (opt4) from hemagglutinin__InfluenzaA__ADK45410
augaagaccaucaucgcccugagcuacauccugugccugguguucgcccagaagcugcccggcaacgacaacagcaccgccacccugugccugggccaccacgccgugcccaacggcaccaucgugaagaccaucaccaacgaccagaucgaggugaccaacgccaccgagcuggugcagagcagcagcaccggcgagaucugcgacagcccccaccagauccuggacggcgagaacugcacccugaucgacgcccugcugggcgacccccagugcgacggcuuccagaacaagaagugggaccuguucguggagagaagcaaggcccacagcaacugcuaccccuacgacgugcccgacuacgccagccugagaagccugguggccagcagcggcacccuggaguucaacaacgagagcuucaacuggaccggcgugacccagaacggcaccagcagcgccugcaucagaagaagcaacaacagcuucuucagcagacugaacuggcugacccaccugaaguucaaguaccccgcccugaacgugaccaugcccaacaacgagcaguucgacaagcuguacaucuggggcgugcaccaccccggcaccgacaacgaccagaucuuccuguacgcccaggccagcggcagaaucaccgugagcaccaagagaagccagcagaccgugauccccaacaucggcagcagacccagagugagaaacauccccagcagaaucagcaucuacuggaccaucgugaagcccggcgacauccugcugaucaacagcaccggcaaccugaucgcccccagaggcuacuucaagaucagaagcggcaagagcagcaucaugagaagcgacgcccccaucggcaagugcaacagcgagugcaucacccccaacggcagcauccccaacgacaagcccuuccagaacgugaacagaaucaccuacggcgccugccccagauacgugaagcagaacacccugaagcuggccaccggcaugagaaacgugcccgagaagcagaccagaggcaucuucggcgccaucgccggcuucaucgagaacggcugggagggcaugguggacggcugguacggcuucagacaccagaacagcgagggcagaggccaggccgccgaccugaagagcacccaggccgccaucgaccagaucaacggcaagcugaacagacugaucggcaagaccaacgagaaguuccaccagaucgagaaggaguucagcgagguggagggcagaauccaggaccuggagaaguacguggaggacaccaagaucgaccuguggagcuacaacgccgagcugcugguggcccuggagaaccagcacaccaucgaccugaccgacagcgagaugaacaagcuguucgagaagaccaagaagcagcugagagagaacgccgaggacaugggcaacggcugcuucaagaucuaccacaagugcgacaacaccugcaucggcagcaucagaaacggcaccuacgaccacgacguguacagagacgaggcccugaacaacagauuccagaucaagggcguggagcugaagagcggcuacaaggacuggauccuguggaucagcuucgccaucagcugcuuccugcugugcguggcccugcugggcuucaucaugugggccugccagaagggcaacaucagaugcaacaucugcaucuga

SEQ ID NO: 165356 - RNA, 1701 nt, Artificial Sequence
  derived and/or modified CDS sequence (opt4) from hemagglutinin__InfluenzaA__ADK45421
augaagaccaucaucgcccugagcuacauccugugccugguguucgcccagaagcugcccggcaacgacaacagcaccgccacccugugccugggccaccacgccgugcccaacggcaccaucgugaagaccaucaccaacgaccagaucgaggugaccaacgccaccgagcuggugcagagcagcagcaccggcgagaucugcgacagcccccaccagauccuggacggcaagaacugcacccugaucgacgcccugcugggcgacccccagugcgacggcuuccagaacaagaagugggaccuguucguggagagaagcaaggccuacagcaacugcuaccccuacgacgugcccgacuacgccagccugagaagccugguggccagcagcggcacccuggaguucaacaacgagagcuucaacuggaccggcgugacccagaacggcaccagcagcgccugcaucagaagaagcaagaacagcuucuucagcagacugaacuggcugacccaccugaacuucaaguaccccgcccugaacgugaccaugcccaacaacgagcaguucgacaagcuguacaucuggggcgugcaccaccccggcaccgacaaggaccagaucuuccuguacgcccaggccagcggcagaaucaccgugagcaccaagagaagccagcagaccgugauccccaacaucggcagcagacccagaaucagaaacauccccagcagaaucagcaucuacuggaccaucgugaagcccggcgacauccugcugaucaacagcaccggcaaccugaucgcccccagaggcuacuucaagaucagaagcggcaagagcagcaucaugagaagcgacgcccccaucggcaagugcaacagcgagugcaucacccccaacggcagcauccccaacgacaagcccuuccagaacgugaacagaaucaccuacggcgccugccccagauacgugaagcagagcacccugaagcuggccaccggcaugagaaacgugcccgagaagcagaccagaggcaucuucggcgccaucgccggcuucaucgagaacggcugggagggcaugguggacggcugguacggcuucagacaccagaacagcgagggcagaggccaggccgccgaccugaagagcacccaggccgccaucgaccagaucaacggcaagcugaacagacugaucggcaagaccaacgagaaguuccaccagaucgagaaggaguucagcgagguggagggcagaauccaggaccuggagaaguacguggaggacaccaagaucgaccuguggagcuacaacgccgagcugcugguggcccuggagaaccagcacaccaucgaccugaccgacagcgagaugaacaagcuguucgagaagaccaagaagcagcugagagagaacgccgaggacaugggcaacggcugcuucaagaucuaccacaagugcgacaacgccugcaucggcagcaucagaaacggcaccuacgaccacgacguguacagagacgaggcccugaacaacagauuccagaucaagggcguggagcugaagagcggcuacaaggacuggauccuguggaucagcuucgccaucagcugcuuccugcugugcguggcccugcugggcuucaucaugugggccugccagaagggcaacaucagaugcaacaucugcaucuga

SEQ ID NO: 165357 - RNA, 1701 nt, Artificial Sequence
  derived and/or modified CDS sequence (opt4) from hemagglutinin__InfluenzaA__ADK45432
augaagaccaucaucgcccugagcuacacccugugccugguguucgcccagaagcugcccagaaacgacaacagcaccgccacccugugccugggccaccacgccgugcccaacggcaccaucgugaagaccaucaccaacgaccagaucgaggugaccaacgccaccgagcuggugcagagcagcagcaccggcgagaucugcgacaacccccaccagauccuggacggcgagaacugcacccugaucgacgcccugcugggcgacccccagugcgacggcuuccagaacaagaagugggaccuguucguggagagaagcaaggccuacagcaacugcuaccccuacgacgugcccgacuacgccagccugagaagccugguggccagcagcggcacccuggaguucaacaacgagagcuucaacuggaccggcgugacccagaacggcaccagcagcgccugcaucagaagaagcaacaacagcuucuucagcagacugaacuggcugacccaccugaaguucaaguaccccgcccugaacgugaccaugcccaacaacgagcaguucgacaagcuguacaucuggggcgugcaccaccccggcaccgacaacgaccagaucuuccuguacgcccaggccagcggcagaaucaccgugagcaccaagagaagccagcagaccgugauccccaacaucggcagcagacccagagugagaaacauccccagcagaaucagcaucuacuggaccaucgugaagcccggcgacauccugcugaucaacagcaccggcaaccugaucgcccccagaggcuacuucaagaucagaagcggcaagagcagcaucaugagaagcgacgcccccaucggcaagugcaacagcgagugcaucacccccaacggcagcauccccaacgacaagcccuuccagaacgugaacagaaucaccuacggcgccugccccagauacgugaagcagaacacccugaagcuggccaccggcaugagaaacgugcccgagaagcagaccagaggcaucuucggcgccaucgccggcuucaucgagaacggcugggagggcaugguggacggcugguacggcuucagacaccagaacagcgagggcagaggccaggccgccgaccugaagagcacccaggccgccaucgaccagaucaacggcaagcugaacagacugaucggcaagaccaacgagaaguuccaccagaucgagaaggaguucagcgagguggagggcagaauccaggaccuggagaaguacguggaggacaccaagaucgaccuguggagcuacaacgccgagcugcugguggcccuggagaaccagcacaccaucgaccugaccgacagcgagaugaacaagcuguucgagaagaccaagaagcagcugagagagaacgccgaggacaugggcaacggcugcuucaagaucuaccacaagugcgacaacgccugcaucggcagcaucagaaacggcaccuacgaccacgacguguacagagacgaggcccugaacaacagauuccagaucaagggcguggagcugaagagcggcuacaaggacuggauccuguggaucagcuucgccaucagcugcuuccugcugugcguggcccugcugggcuucaucaugugggccugccagaagggcaacaucagaugcaacaucugcaucuga

SEQ ID NO: 165358 - RNA, 1701 nt, Artificial Sequence; identical to SEQ ID NO: 162494
  derived and/or modified CDS sequence (opt4) from hemagglutinin__InfluenzaA__ADK45443

SEQ ID NO: 165359 - RNA, 1701 nt, Artificial Sequence; identical to SEQ ID NO: 164893
  derived and/or modified CDS sequence (opt4) from hemagglutinin__InfluenzaA__ADK48798

SEQ ID NO: 165360 - RNA, 1701 nt, Artificial Sequence; identical to SEQ ID NO: 163893
  derived and/or modified CDS sequence (opt4) from hemagglutinin__InfluenzaA__ADK62683

SEQ ID NO: 165361 - RNA, 1701 nt, Artificial Sequence
  derived and/or modified CDS sequence (opt4) from hemagglutinin__InfluenzaA__ADK62693
augaaggccauccugguggugcugcuguacaccuucgccaccgccaacgccgacacccugugcaucggcuaccacgccaacaacagcaccgacaccguggacaccgugcuggagaagaacgugaccgugacccacagcgugaaccugcuggaggacaagcacaacggcaagcugugcaagcugagaggcguggccccccugcaccugggcaagugcaacaucgccggcuggauccugggcaaccccgagugcggcagccugagcaccgccagcagcuggagcuacaucguggagaccagcagcagcgacaacggcaccugcuaccccggcgacuucaucgacuacgaggagcugagagagcagcugagcagcgugagcagcuucgagagauucgagaucuuccccaagaccagcagcuggcccaaccacgacagcaacaagggcgugaccgccgccugcccccacgccggcgccaagagcuucuacaagaaccugaucuggcuggugaagaagggcaacagcuaccccaagcugagcaagagcuacaucaacgacaagggcaaggaggugcuggugcuguggggcauccaccaccccagcaccagcgccgaccagcagagccuguaccagaacgccgacgccuacguguucgugggcaccagcagauacagcaagaaguucaagcccgagaucgccaucagacccaaggugagagagcaggagggcagaaugaacuacuacuggacccugguggagcccggcgacaagaucaccuucgaggccaccggcaaccugguggugcccagauacgccuucgccauggagagaaacgccggcagcggcaucaucaucagcgacacccccgugcacgacugcaacaccaccugccagacccccaagggcgccaucaacaccagccugcccuuccagaacgugcaccccaucaccaucggcaagugccccaaguacgugaagagcaccaagcugagacuggccaccggccugagaaacgugcccagcauccagagcagaggccuguucggcgccaucgccggcuucaucgagggcggcuggaccggcaugguggacggcugguacggcuaccaccaccagaacgagcagggcagcggcuacgccgccgaccugaagagcacccagaacgccaucgacgagaucaccaacaaggugaacagcgugaucgagaagaugaacacccaguucaccgccgugggcaaggaguucaaccaccuggagaagagaaucgagaaccugaacaagaagguggacgacggcuuccuggacaucuggaccuacaacgccgagcugcuggugcugcuggagaacgagagaacccuggacuaccacgacagcaacgugaagaaccuguacgagaaggugagaagccagcugaagaacaacgccaaggagaucggcaacggcugcuucgaguucuaccacaagugcgacaacaccugcauggagagcgugaagaacggcaccuacgacuaccccaaguacagcgaggaggccaagcugaacagagaggagaucgacggcgugaagcuggagagcaccagaaucuaccagauccuggccaucuacagcaccguggccagcagccuggugcugguggugagccugggcgccaucagcuucuggaugugcagcaacggcagccugcagugcagaaucugcaucuga

SEQ ID NO: 165362 - RNA, 1701 nt, Artificial Sequence; identical to SEQ ID NO: 163830
  derived and/or modified CDS sequence (opt4) from hemagglutinin__InfluenzaA__ADK62703

SEQ ID NO: 165363 - RNA, 1701 nt, Artificial Sequence
  derived and/or modified CDS sequence (opt4) from hemagglutinin__InfluenzaA__ADK64992
augaaggccauccugguggugcugcuguacaccuucgccaccgccaacgccgacacccugugcaucggcuaccacgccaacaacagcaccgacaccguggacaccgugcuggagaagaacgugaccgugacccacagcgugaaccugcuggaggacaagcacaacggcaagcugugcaagcugagaggcguggccccccugcaccugggcaagugcaacaucgccggcuggauccugggcaaccccgagugcgagagccugagcaccgccagcagcuggagcuacaucguggagaccagcagcagcgacaacggcaccugcuaccccggcgacuucaucgacuacgaggagcugagagagcagcugagcagcgugagcagcuucgagagauucgagaucuuccccaagaccagcagcuggcccaaccacgacagcaacaagggcgugaccgccgccugcccccacgccggcgccaagagcuucuacaagaaccugaucuggcuggugaagaagggcaacagcuaccccaagcugagcaagagcuacaucaacgacaagggcaaggaggugcuggugcuguggggcauccaccaccccagcaccagcgccgaccagcagagccuguaccagaacgccgacgccuacguguucgugggcaccagcagauacagcaagaaguucaagcccgagaucgccaucagacccaaggugagagaccaggagggcagaaugaacuacuacuggacccugguggagcccggcgacaagaucaccuucgaggccaccggcaaccugguggugcccagauacgccuucgccauggagagaaacgccggcagcggcaucaucaucagcgacacccccgugcacgacugcaacaccaccugccagacccccaagggcgccaucaacaccagccugcccuuccagaacauccaccccaucaccaucggcaagugccccaaguacgugaagagcaccaagcugagacuggccaccggccugagaaacgugcccagcauccagagcagaggccuguucggcgccaucgccggcuucaucgagggcggcuggaccggcaugguggacggcugguacggcuaccaccaccagaacgagcagggcagcggcuacgccgccgaccugaagagcacccagaacgccaucgacgagaucaccaacaaggugaacagcgugaucgagaagaugaacacccaguucaccgccgugggcaaggaguucaaccaccuggagaagagaaucgagaaccugaacaagaagguggacgacggcuuccuggacaucuggaccuacaacgccgagcugcuggugcugcuggagaacgagagaacccuggacuaccacgacagcaacgugaagaaccuguacgagaaggugagaagccagcugaagaacaacgccaaggagaucggcaacggcugcuucgaguucuaccacaagugcgacaacaccugcauggagagcgugaagaacggcaccuacgacuaccccaaguacagcgaggaggccaagcugaacagagaggagaucgacggcaucaagcuggagagcaccagaaucuaccagauccuggccaucuacagcaccguggccagcagccuggugcugguggugagccugggcgccaucagcuucuggaugugcagcaacggcagccugcaguacagaaucugcaucuga

SEQ ID NO: 165364 - RNA, 1701 nt, Artificial Sequence
  derived and/or modified CDS sequence (opt4) from hemagglutinin__InfluenzaA__ADK65001
augaaggccauccugguggugcugcuguacaccuucgccaccgccaacgccgacacccugugcaucggcuaccacgccaacaacagcaccgacaccguggacaccgugcuggagaagaacgugaccgugacccacagcgugaaccugcuggaggacaagcacaacggcaagcugugcaagcugggcggcguggccccccugcaccugggcaagugcaacaucgccggcuggauccugggcaaccccgagugcgagagccugagcaccgccagcagcuggagcuacaucguggagaccagcagcagcgacaacggcaccugcuaccccggcgacuucaucgacuacgaggagcugagagagcagcugagcagcgugagcagcuucgagagauucgagaucuuccccaagaccagcagcuggcccaaccacgacagcaacaagggcgugaccgccgccugcccccacgccggcgccaagagcuucuacaagaaccugaucuggcuggugaagaagggcaacagcuaccccaagcugagcaagagcuacaucaacgacaagggcaaggaggugcuggugcuguggggcauccaccaccccagcaccagcgccgaccagcagagccuguaccagaacgccgacgccuacguguucgugggcaccagcagauacagcaagaaguucaagcccgagaucgccaucagacccaaggugagagaccaggagggcagaaugaacuacuacuggacccugguggagcccggcgacaagaucaccuucgaggccaccggcaaccugguggugcccagauacgccuucgccauggagagaaacgccggcagcggcaucaucaucagcgacacccccgugcacgacugcaacaccaccugccagacccccaagggcgccaucaacaccagccugcccuuccagaacauccaccccaucaccaucggcaagugccccaaguacgugaagagcaccaagcugagacuggccaccggccugagaaacgugcccagcauccagagcagaggccuguucggcgccaucgccggcuucaucgagggcggcuggaccggcaugguggacggcugguacggcuaccaccaccagaacgagcagggcagcggcuacgccgccgaccugaagagcacccagaacgccaucgacgagaucaccaacaaggugaacagcgugaucgagaagaugaacacccaguucaccgccgugggcaaggaguucaaccaccuggagaagagaaucgagaaccugaacaagaagguggacgacggcuuccuggacaucuggaccuacaacgccgagcugcuggugcugcuggagaacgagagaacccuggacuaccacgacagcaacgugaagaaccuguacgagaaggugagaagccagcugaagaacaacgccaaggagaucggcaacggcugcuucgaguucuaccacaagugcgacaacaccugccuggagagcgugaagaacggcaccuacgacuaccccaaguacagcgaggaggccaagcugaacagagaggagaucgacggcgugaagcuggagagcaccagaaucuaccagauccuggccaucuacagcaccguggccagcagccuggugcugguggugagccugggcgccaucagcuucuggaugugcagcaacggcagccugcagugcagaaucugcaucuga

SEQ ID NO: 165365 - RNA, 1701 nt, Artificial Sequence
  derived and/or modified CDS sequence (opt4) from hemagglutinin__InfluenzaA__ADK65009
augaaggccauccugguggugcugcuguacaccuucgccaccgccaacgccgacacccugugcaucggcuaccacgccaacaacagcaccgacaccguggacaccgugcuggagaagaacgugaccgugacccacagcgugaaccugcuggaggacaagcacaacggcaagcugugcaagcugagaggcguggccccccugcaccugggcaagugcaacaucgccggcuggauccugggcaaccccgagugcgagagccugagcaccgccagcagcuggagcuacaucguggagaccagcagcagcgacaacggcaccugcuaccccggcgacuucaucgacuacgaggagcugagagagcagcugagcagcgugagcagcuucgagagauucgagaucuuccccaagaccagcagcuggcccaaccacgaccccaacaagggcgugaccgccgccugcccccacgccggcgccaagagcuucuacaagaaccugaucuggcuggugaagaagggcaacagcuaccccaagcugagcaagagcuacaucaacgacaagggcaaggaggugcuggugcuguggggcauccaccaccccagcaccagcgccgaccagcagagccuguaccagaacgccgacgccuacguguucgugggcaccagcagauacagcaagaaguucaagcccgagaucgccaucagacccaaggugagagaccaggagggcagaaugaacuacuacuggacccugguggagcccggcgacaagaucaccuucggcgccaccggcaaccugguggugcccagauacgccuucgccauggagagaaacgccggcagcggcaucaucaucagcgacacccccgugcacgacugcaacaccaccugccagacccccaagggcgccaucaacaccagccugcccuuccagaacauccaccccaucaccaucggcaagugccccaaguacgugaagagcaccaagcugagacuggccaccggccugagaaacgugcccagcauccagagcagaggccuguucggcgccaucgccggcuucaucgagggcggcuggaccggcaugguggacggcugguacggcuaccaccaccagaacgagcagggcagcggcuacgccgccgaccugaagagcacccagaacgccaucgacgagaucaccaacaaggugaacagcgugaucgagaagaugaacacccaguucaccgccgugggcaaggaguucaaccaccuggagaagagaaucgagaaccugaacaagaagguggacgacggcuuccuggacaucuggaccuacaacgccgagcugcuggugcugcuggagaacgagagaacccuggacuaccacgacagcaacgugaagaaccuguacgagaaggugagaagccagcugaagaacaacgccaaggagaucggcaacggcugcuucgaguucuaccacaagugcgacaacaccugcauggagagcgugaagaacggcaccuacgacuaccccaaguacagcgaggaggccaagcugaacagagaggagaucgacggcgugaagcuggagagcaccagaaucuaccagauccuggccaucuacagcaccguggccagcagccuggugcugguggugagccugggcgccaucagcuucuggaugugcagcaacggcagccugcagugcagaaucugcaucuga

SEQ ID NO: 165366 - RNA, 1701 nt, Artificial Sequence
  derived and/or modified CDS sequence (opt4) from hemagglutinin__InfluenzaA__ADK87287
augaagaccaucaucgcccugagcuacauccugugccugguguucgcccagaagcugcccggcaacgacaacagcaccgccacccugugccugggccaccacgccgugcccaacggcaccaucgugaagaccaucaccaacgaccagaucgaggugaccaacgccaccgagcuggugcagagcagcagcaccggcgagaucugcgacagcccccaccagauccuggacggcaagaacugcacccugaucgacgcccugcugggcgacccccagugcgacggcuuccagaacaagaagugggaccuguucguggagagaagcaaggccuacagcaacugcuaccccuacgacgugcccgacuacgccagccugagaagccugguggccagcagcggcacccuggaguucaacaacgagagcuucaacuggaccggcgugacccagaacggcaccagcagcgccugcaucagaagaagcaagaacagcuucuucagcagacugaacuggcugacccaccugaacuucaaguaccccgcccugaacgugaccaugcccaacaacgagcaguucgacaagcuguacaucuggggcgugcaccaccccggcaccgacaaggaccagaucuuccuguacgcccaggccagcggcagaaucaccgugagcaccaagagaagccagcagaccgccauccccaacaucggcagcagacccagagugagaaacauccccagcagaaucagcaucuacuggaccaucgugaagcccggcgacauccugcugaucaacagcaccggcaaccugaucgcccccagaggcuacuucaagaucagaagcggcaagagcagcaucaugagaagcgacgcccugaucggcaagugcaacagcgagugcaucacccccaacggcagcauccccaacgacaagcccuuccagaacgugaacagaaucaccuacggcgccugccccagauacgugaagcagaacacccugaagcuggccaccggcaugagaaacgugcccgagaagcagaccagaggcaucuucggcgccaucgccggcuucaucgagaacggcugggagggcaugguggacggcugguacggcuucagacaccagaacagcgagggcagaggccaggccgccgaccugaagagcacccaggccgccaucgaccagaucaacggcaagcugaacagacugaucggcaagaccaacgagaaguuccaccagaucgagaaggaguucagcgagguggagggcagaauccaggaccuggagaaguacguggaggacaccaagaucgaccuguggagcuacaacgccgagcugcugguggcccuggagaaccagcacaccaucgaccugaccgacagcgagaugaacaagcuguucgagaagaccaagaagcagcugagagagaacgccgaggacaugggcaacggcugcuucaagaucuaccacaagugcgacaacgccugcaucggcagcaucagaaacggcaccuacgaccacgacguguacagagacgaggcccugaacaacagauuccagaucaagggcguggagcugaagagcggcuacaaggacuggauccuguggaucagcuucgccaucagcugcuuccugcugugcguggcccugcugggcuucaucaugugggccugccagaagggcaacaucagaugcaacaucugcaucuga

SEQ ID NO: 165367 - RNA, 1701 nt, Artificial Sequence
  derived and/or modified CDS sequence (opt4) from hemagglutinin__InfluenzaA__ADK87288
augaagaccaucaucgcccugagcuacauccugugccugguguucgcccagaagcugcccggcaacgacaacagcaccgccacccugugccugggccaccacgccgugcccaacggcaccaucgugaagaccaucaccaacgaccagaucgaggugaccaacgccaccgagcuggugcagagcagcagcaccggcgagaucugcgacagcccccaccagauccuggacggcaagaacugcacccugaucgacgcccugcugggcgacccccagugcgacggcuuccagaacaagaagugggaccuguucguggagagaagcaaggccuacagcaacugcuaccccuacgacgugcccgacuacgccagccugagaagccugguggccagcagcggcacccuggaguucaacaacgagagcuucaacuggaccggcgugacccagaacggcaccagcagcgccugcaucagaagaagcaagaacagcuucuucagcagacugaacuggcugacccaccugaacuucaaguaccccgcccugaacgugaccaugcccaacaacgagcaguucgacaagcuguacaucuggggcgugcaccaccccggcaccgacaaggaccagaucuuccuguacgcccaggccaccggcagaaucaccgugagcaccaagagaagccagcagaccgccauccccaacaucggcagcagacccagagugagaaacauccccagcagaaucagcaucuacuggaccaucgugaagcccggcgacauccugcugaucaacagcaccggcaaccugaucgcccccagaggcuacuucaagaucagaagcggcaagagcagcaucaugagaagcgacgcccccaucggcaagugcaacagcgagugcaucacccccaacggcagcauccccaacgacaagcccuuccagaacgugaacagaaucaccuacggcgccugccccagauacgugaagcagaacacccugaagcuggccaccggcaugagaaacgugcccgagaagcagaccagaggcaucuucggcgccaucgccggcuucaucgagaacggcugggagggcaugguggacggcugguacggcuucagacaccagaacagcgagggcagaggccaggccgccgaccugaagagcacccaggccgccaucgaccagaucaacggcaagcugaacagacugaucggcaagaccaacgagaaguuccaccagaucgagaaggaguucagcgagguggagggcagaauccaggaccuggagaaguacguggaggacaccaagaucgaccuguggagcuacaacgccgagcugcugguggcccuggagaaccagcacaccaucgaccugaccgacagcgagaugaacaagcuguucgagaagaccaagaagcagcugagagagaacgccgaggacaugggcaacggcugcuucaagaucuaccacaagugcgacaacgccugcaucggcagcaucagaaacggcaccuacgaccacgacguguacagagacgaggcccugaacaacagauuccagaucaagggcguggagcugaagagcggcuacaaggacuggauccuguggaucagcuucgccaucagcugcuuccugcugugcguggcccugcugggcuucaucaugugggccugccagaagggcaacaucagaugcaacaucugcaucuga

SEQ ID NO: 165368 - RNA, 1701 nt, Artificial Sequence
  derived and/or modified CDS sequence (opt4) from hemagglutinin__InfluenzaA__ADK87289
augaagaccaucaucgcccugagcuacauccugugccugguguucgcccagaagcugcccggcaacgacaacagcaccgccacccugugccugggccaccacgccgugcccaacggcaccaucgugaagaccaucaccaacgaccagaucgaggugaccaacgccaccgagcuggugcagagcagcagcaccggcgagaucugcgacagcccccaccagauccuggacggcaagaacugcacccugaucgacgcccugcugggcgacccccagugcgacggcuuccagaacaagaagugggaccuguucguggagagaagcaaggccuacagcaacugcuaccccuacgacgugcccgacuacgccagccugagaagccugguggccagcagcggcacccugggcuucaacaacgagagcuucaacuggaccggcgugacccagaacggcaccagcagcgccugcaucagaagaagcaagaacagcuucuucagcagacugaacuggcugacccaccugaacuucaaguaccccgcccugaacgugaccaugcccaacaacgagcaguucgacaagcuguacaucuggggcgugcaccaccccggcaccgacaaggaccagaucuuccuguacgcccaggccagcggcagaaucaccgugagcaccaagagaagccagcagaccgccauccccaacaucggcagcagacccagagugagaaacauccccagcagaaucagcaucuacuggaccaucgugaagcccggcgacauccugcugaucaacagcaccggcaaccugaucgcccccagaggcuacuucaagaucagaagcggcaagagcagcaucaugagaagcgacgcccccaucggcaagugcaacagcgagugcaucacccccaacggcagcauccccaacgacaagcccuuccagaacgugaacagaaucaccuacggcgccugccccagauacgugaagcagaacacccugaagcuggccaccggcaugagaaacgugcccgagaagcagaccagaggcaucuucggcgccaucgccggcuucaucgagaacggcugggagggcaugguggacggcugguacggcuucagacaccagaacagcgagggcagaggccaggccgccgaccugaagagcacccaggccgccaucgaccagaucaacggcaagcugaacagacugaucggcaagaccaacgagaaguuccaccagaucgagaaggaguucagcgagguggagggcagaauccaggaccugggcaaguacguggaggacaccaagaucgaccuguggagcuacaacgccgagcugcugguggcccuggagaaccagcacaccaucgaccugaccgacagcgagaugaacaagcuguucgagaagaccaagaagcagcugagagagaacgccgaggacaugggcaacggcugcuucaagaucuaccacaagugcgacaacgccugcaucggcagcaucagaaacggcaccuacgaccacgacguguacagagacgaggcccugaacaacagauuccagaucaagggcguggagcugaagagcggcuacaaggacuggauccuguggaucagcuucgccaucagcugcuuccugcugugcguggcccugcugggcuucaucaugugggccugccagaagggcaacaucagaugcaacaucugcaucuga

SEQ ID NO: 165369 - RNA, 1701 nt, Artificial Sequence
  derived and/or modified CDS sequence (opt4) from hemagglutinin__InfluenzaA__ADK87291
augaagaccaucaucgcccugagcuacauccagugccugguguucgcccagaagcugcccggcaacgacaacagcaccgccacccugugccugggccaccacgccgugcccaacggcaccaucgugaagaccaucaccaacgaccagaucgaggugaccaacgccaccgagcuggugcagagcagcagcaccggcgagaucugcgacagcccccaccagauccuggacggcaagaacugcacccugaucgacgcccugcugggcgacccccagugcgacggcuuccagaacaagaagugggaccuguucguggagagaagcaaggccuacagcaacugcuaccccuacgacgugcccgacuacgccagccugagaagccugguggccagcagcggcacccuggaguucaacaacgagagcuucaacuggaccggcgugacccagaacggcaccagcagcgccugcaucagaagaagcaagaacagcuucuucagcagacugaacuggcugacccaccugaacuucaaguaccccgcccugaacgugaccaugcccaacaacgagcaguucgacaagcuguacaucuggggcgugcaccaccccggcaccgacaaggaccagaucagccuguacgcccaggccagcggcagaaucaccgugagcaccaagagaagccagcagaccgccauccccaacaucggcagcagacccagagugagaaacauccccagcagaaucagcaucuacuggaccaucgugaagcccggcgacauccugcugaucaacagcaccggcaaccugaucgcccccagaggcuacuucaagaucagaagcggcaagagcagcaucaugagaagcgacgcccccaucggcaagugcaacagcgagugcaucacccccaacggcagcauccccaacgacaagcccuuccagaacgugaacagaaucaccuacggcgccugccccagauacgugaagcagaacacccugaagcuggccaccggcaugagaaacgugcccgagaagcagaccagaggcaucuucggcgccaucgccggcuucaucgagaacggcugggagggcaugguggacggcugguacggcuucagacaccagaacagcgagggcagaggccaggccgccgaccugaagagcacccaggccgccaucgaccagaucaacggcaagcugaacagacugaucggcaagaccaacgagaaguuccaccagaucgagaaggaguucagcgagguggagggcagaauccaggaccugggcaaguacguggaggacaccaagaucgaccuguggagcuacaacgccgagcugcugguggcccuggagaaccagcacaccaucgaccugaccgacagcgagaugaacaagcuguucgagaagaccaagaagcagcugagagagaacgccgaggacaugggcaacggcugcuucaagaucuaccacaagugcgacaacgccugcaucggcagcaucagaaacggcaccuacgaccacgacguguacagagacgaggcccugaacaacagauuccagaucaagggcguggagcugaagagcggcuacaaggacuggauccuguggaucagcuucgccaucagcugcuuccugcugugcguggcccugcugggcuucaucaugugggccugccagaagggcaacaucagaugcaacaucugcaucuga

SEQ ID NO: 165370 - RNA, 1701 nt, Artificial Sequence
  derived and/or modified CDS sequence (opt4) from hemagglutinin__InfluenzaA__ADK87293
augaagaccaucaucgcccugagcuacauccugugccugguguucgcccagaagcugcccggcaacgacaacagcaccgccacccugugccugggccaccacgccgugcccaacggcaccaucgugaagaccaucaccaacgaccagaucgaggugaccaacgccaccgagcuggugcagagcagcagcaccggcgagaucugcgacagcccccaccagauccuggacggcaagaacugcacccugaucgacgcccugcugggcgacccccagugcgacggcuuccagaacaagaagugggaccuguucguggagagaagcaaggccuacagcaacugcuaccccuacgacgugcccgacuacgccagccugagaagccugguggccagcagcggcacccuggaguucaacaacgagagcuucaacuggaccggcgugacccaggacggcaccagcagcgccugcaucagaagaagcaagaacagcuucuucagcaagcugaacuggcugacccaccugaacuucaaguaccccgcccugaacgugaccaugcccaacaacgagcaguucgacaagcuguacaucuggggcgugcaccaccccggcaccgacaaggaccagaccuuccuguacgcccaggccagcggcagaaucaccgugagcaccaagagaagccagcagaccgccauccccaacaucggcagcagacccagagugagaaacauccccagcagaaucagcaucuacuggaccaucgugaagcccggcgacauccugcugaucaacagcaccggcaaccugaucgcccccagaggcuacuucaagaucagaagcggcaagagcagcaucaugagaagcgacgcccccaucggcaagugcaacagcgagugcaucacccccaacggcagcauccccaacgacaagcccuuccagaacgugaacagaaucaccuacggcgccugccccagauacgugaagcagaacacccugaagcuggccaccggcaugagaaacgugcccgagaagcagaccagaggcaucuucggcgccaucgccggcuucaucgagaacggcugggagggcaugguggacggcugguacggcuucagacaccagaacagcgagggcagaggccaggccgccgaccugaagagcacccaggccgccaucgaccagaucaacggcaagcugaacagacugaucggcaagaccaacgagaaguuccaccagaucgagaaggaguucagcgagguggagggcagaauccaggaccuggagaaguacguggaggacaccaagaucgaccuguggagcuacaacgccgagcugcugguggcccuggagaaccagcacaccaucgaccugaccgacagcgagaugagcaagcuguucgagaagaccaagaagcagcugagagagaacgccgaggacaugggcaacggcugcuucaagaucuaccacaagugcgacaacgccugcaucggcagcaucagaaacggcaccuacgaccacgacguguacagagacgaggcccugaacaacagauuccagaucaagggcguggagcugaagagcggcuacaaggacuggauccuguggaucagcuucgccaucagcugcuuccugcugugcguggcccugcugggcuucaucaugugggccugccagaagggcaacaucagaugcaacaucugcaucuga

SEQ ID NO: 165371 - RNA, 1701 nt, Artificial Sequence
  derived and/or modified CDS sequence (opt4) from hemagglutinin__InfluenzaA__ADK87295
augaagaccaucaucgcccugagcuacauccugugccugguguucgcccagaagcugcccggcaacgacaacagcaccgccacccugugccugggccaccacgccgugcccaacggcaccaucgugaagaccaucaccaacgaccagaucgaggugaccaacgccaccgagcuggugcagagcagcagcaccggcgagaucugcgacagcccccaccagauccuggacggcaagaacugcacccugaucgacgcccugcugggcgacccccagugcgacggcuuccagaacaagaagugggaccuguucguggagagaagcaaggccuacagcaacugcuaccccuacgacgugcccgacuacgccagccugagaagccugguggccagcagcggcagccuggaguucaacaacgagagcuucaacuggaccggcgugacccagaacggcaccagcagcgccugcaucagaagaagcaagaacagcuucuucagcagacugaacuggcugacccaccugaacuucaaguaccccgcccugaacgugaccaugcccaacaacgagcaguucgacaagcuguacaucuggggcgugcaccaccccggcaccgacaaggaccagaucuuccuguacgcccaggccagcggcagaaucaccgugagcaccaagagaagccagcagaccgccauccccaacaucggcagcagacccagagugagaaacauccccagcagaaucagcaucuacuggaccaucgugaagcccggcgacauccugcugaucaacagcaccggcaaccugaucgcccccagaggcuacuucaagaucagaagcggcaagagcagcaucaugagaagcgacgcccccaucggcaagugcaacagcgagugcaucacccccaacggcagcauccccaacgacaagcccuuccagaacgugaacagaaucaccuacggcgccugccccagauacgugaagcagaacacccugaagcuggccaccggcaugagaaacgugcccgagaagcagaccagaggcaucuucggcgccaucgccggcuucaucgagaacggcugggagggcaugguggacggcugguacggcuucagacaccagaacagcgagggcagaggccaggccgccgaccugaagagcacccaggccgccaucgaccagaucaacggcaagcugaacagacugaucggcaagaccaacgagaaguuccaccagaucgagaaggaguucagcgagguggagggcagaauccaggaccuggagaaguacguggaggacaccaagaucgaccuguggagcuacaacgccgagcugcugguggcccuggagaaccagcacaccaucgaccugaccgacagcgagaugaacaagcuguucgagaagaccaagaagcagcugagagagaacgccgaggacaugggcaacggcugcuucaagaucuaccacaagugcgacaacgccugcaucggcagcaucagaaacggcaccuacgaccacgacguguacagagacgaggcccugaacaacagauuccagaucaagggcguggagcugaagagcggcuacaaggacuggauccuguggaucagcuucgccaucagcugcuuccugcugugcguggcccugcugggcuucaucaugugggccugccagaagggcaacaucagaagaaacaucugcaucuga

SEQ ID NO: 165372 - RNA, 1701 nt, Artificial Sequence
  derived and/or modified CDS sequence (opt4) from hemagglutinin__InfluenzaA__ADK87296
augaaggccauccugguggugcugcuguacaccuucgccaccgccaacgccgacacccugugcaucggcuaccacgccaacaacagcaccgacaccguggacaccgugcuggagaagaacgugaccgugacccacagcgugaaccugcuggaggacaagcacaacggcaagcugugcaagcugagaggcguggccccccugcaccugggcaagugcaacaucgccggcuggauccugggcaaccccgagugcgagagccugagcaccgccagcagcuggagcuacaucguggagaccagcagcagcgacaacggcaccugcuaccccggcgacuucaucgacuacgaggagcugagagagcagcugagcagcgugagcagcuucgagagauucgagaucuuccccaagaccagcagcuggcccaaccacgaccccaacaagggcgugaccgccgccugcccccacgccggcgccaagagcuucuacaagaaccugaucuggcuggugaagaagggcaacagcuaccccaagcugagcaagagcuacaucaacgacaagggcaaggaggugcuggugcuguggggcauccaccaccccagcaccagcgccgaccagcagagccuguaccagaacgccgacgccuacguguucgugggcaccagcagauacagcaagaaguucaagcccgagaucgccaucagacccaaggugagagaccaggagggcagaaugaacuacuacuggacccugguggagcccggcgacaagaucaccuucgaggccaccggcaaccugguggugcccagaugcgccuucgccauggagagaaacgccggcagcggcaucaucaucagcgacacccccgugcacgacugcaacaccaccugccagacccccaagggcgccaucaacaccagccugcccuuccagaacauccaccccaucaccaucggcaagugccccaaguacgugaagagcaccaagcugagacuggccaccggccugagaaacgugcccagcauccagagcagaggccuguucggcgccaucgccggcuucaucgagggcggcuggaccggcaugguggacggcugguacggcuaccaccaccagaacgagcagggcagcggcuacgccgccgaccugaagagcacccagaacgccaucgacgagaucaccaacaaggugaacagcgugaucgagaagaugaacacccaguucaccgccgugggcaaggaguucaaccaccuggagaagagaaucgagaaccugaacaagaagguggacgacggcuuccuggacaucuggaccuacaacgccgagcugcuggugcugcuggagaacgagagaacccuggacuaccacgacagcaacgugaagaaccuguacgagaaggugagaagccagcugaagaacaacgccaaggagaucggcaacggcugcuucgaguucuaccacaagugcgacaacaccugcauggagagcgugaagaacggcaccuacgacuaccccaaguacagcgaggaggccaagcugaacagagaggagaucgacggcgugaagcuggagagcaccagaaucuaccagauccuggccaucuacagcaccguggccagcagccuggugcugguggugagccugggcgccaucagcuucuggaugugcagcaacggcagccugcagugcagaaucugcaucuga

SEQ ID NO: 165373 - RNA, 1701 nt, Artificial Sequence
  derived and/or modified CDS sequence (opt4) from hemagglutinin__InfluenzaA__ADK87298
augaaggccauccugguggugcugcuguacaccuucgccaccgccaacgccgacacccugugcaucggcuaccacgccaacaacagcaccgacaccguggacaccgugcuggagaagaacgugaccgugacccacagcgugaaccugcuggaggacaagcacaacggcaagcugugcaagcugagaggcguggccccccugcaccugggcaagugcaacaucgccggcuggauccugggcaaccccgagugcgagagccugagcaccgccagcagcuggagcuacaucguggagaccagcagcagcgacagcggcaccugcuaccccggcgacuucaucgacuacgaggagcugagagagcagcugagcagcgugagcagcuucgagagauucgagaucuuccccaagaccagcagcuggcccaaccacgaccccaacaagggcgugaccgccgccugcccccacgccggcgccaagagcuucuacaagaaccugaucuggcuggugaagaagggcaacagcuaccccaagcugagcaagagcuacaucaacgacaagggcaaggaggugcuggugcuguggggcauccaccaccccagcaccagcgccgaccagcagagccuguaccagaacgccgacgccuacguguucgugggcaccagcagauacagcaagaaguucaagcccgagaucgccaucagacccaaggugagagaccaggagggcagaaugaacuacuacuggacccugguggagcccggcgacaagaucaccuucgaggccaccggcaaccugguggugcccagauacgccuucgccauggagagaaacgccggcagcggcaacaucaucagcgacacccccgugcacgacugcaacaccaccugccagacccccaagggcgccaucaacaccagccugcccuuccagaacauccaccccaucaccaucggcaagugccccaaguacgugaagagcaccaagcugagacuggccaccggccugagaaacgugcccagcauccagagcagaggccuguucggcgccaucgccggcuucaucgagggcggcuggaccggcaugguggacggcugguacggcuaccaccaccagaacgagcagggcagcggcuacgccgccgaccugaagagcacccagaacgccaucgacgagaucaccaacaaggugaaccccgugaucgagaagaugaacacccaguucaccgccgugggcaaggaguucaaccaccuggagaagagaaucgagaaccugaacaagaagguggacgacggcuuccuggacaucuggaccuacaacgccgagcugcuggugcugcuggagaacgagagaacccuggacuaccacgacagcaacgugaagaaccuguacgagaaggugagaagccagcugaagaacaacgccaaggagaucggcaacggcugcuucgaguucuaccacaagugcgacaacaccugcauggagagcgugaagaacggcaccuacgacuaccccaaguacagcgaggaggccaagcugaacagagaggagaucgacggcgugaagcuggagagcaccagaaucuaccagauccuggccaucuacagcaccguggccagcagccuggugcugguggugagccugggcgccaucagcuucuggaugugcagcaacggcagccugcagugcagaaucugcaucuga

SEQ ID NO: 165374 - RNA, 1701 nt, Artificial Sequence
  derived and/or modified CDS sequence (opt4) from hemagglutinin__InfluenzaA__ADK87300
augaagaccaucaucgcccugagcuacauccugugcaugguguucgcccagaagcugcccggcaacgacaacagcaccgccacccugugccugggccaccacgccgugcccaacggcaccaucgugaagaccaucaccaacgaccagaucgaggugaccaacgccaccgagcuggugcagagcagcagcaccggcgagaucugcgacagcccccaccagauccuggacggcaagaacugcacccugaucgacgcccugcugggcgacccccagugcgacggcuuccagaacaagaagugggaccuguucguggagagaagcaaggccuacagcaacugcuaccccuacgacgugcccgacuacgccagccugagaagccugguggccagcagcggcacccuggaguucaacaacgagagcuucaacuggaccggcgugacccagaacggcaccagcagcgccugcaucagaagaagcaagaacagccuguucagcagacugaacuggcugacccaccugaacuucaaguaccccgcccugaacgugaccaugcccaacaacgagcaguucgacaagcuguacaucuggggcgugcaccaccccggcaccgacaaggaccagaucuuccuguacgcccaggccagcggcagaaucaccgugagcaccaagagaagccagcagaccgccauccccaacaucggcagcagacccagagugagaaacauccccagcagaaucagcaucuacuggaccaucgugaagcccggcgacauccugcugaucaacagcaccggcaaccugaucgcccccagaggcuacuucaagaucagaagcggcaagagcagcaucaugagaagcgacgcccccaucggcaagugcaacagcgagugcaucgcccccaacggcagcauccccaacgacaagagcuuccagaacgugaacagaaucaccuacggcgccugccccagauacgugaagcagaacacccugaagcuggccaccggcaugagaaacgugcccgagaagcagaccagaggcaucuucggcgccaucgccggcuucaucgagaacggcugggagggcaugguggacggcugguacggcuucagacaccagaacagcgagggcagaggccaggccgccgaccugaagagcacccaggccgccaucgaccagaucaacggcaagcugaacagacugaucggcaagaccaacgagaaguuccaccagaucgagaaggaguucagcgagguggagggcagaauccaggaccuggagaaguacguggaggacaccaagaucgaccuguggagcuacaacgccgagcugcugguggcccuggagaaccagcacaccaucgaccugaccgacagcgagaugaacaagcuguucgagaagaccaagaagcagcugagagagaacgccgaggacaugggcaacggcugcuucaagaucuaccacaagugcgacaacgccugcaucggcagcaucagaaacggcaccuacgaccacgacguguacagagacgaggcccugaacaacagauuccagaucaagggcguggagcugaagagcggcuacaaggacuggauccuguggaucagcuucgccaucagcugcuuccugcugugcguggcccugcugggcuucaucaugugggccugccagaagggcaacaucagaugcaacaucugcaucuga

SEQ ID NO: 165375 - RNA, 1701 nt, Artificial Sequence
  derived and/or modified CDS sequence (opt4) from hemagglutinin__InfluenzaA__ADK87302
augaagaccaucaucgcccugagcuacauccugugcaugguguucgcccagaagcugcccggcaacgacaacagcaccgccacccugugccugggccaccacgccgugcccaacggcaccaucgugaagaccaucaccaacgaccagaucgaggugaccaacgccaccgagcuggugcagagcagcagcaccggcgagaucugcgacagcccccaccagauccuggacggcaagaacugcacccugaucgacgcccugcugggcgacccccagugcgacggcuuccagaacaagaagugggaccuguucguggagagaagcaaggccuacagcaacugcuaccccuacgacgugcccgacuacgccagccugagaagccugguggccagcagcggcacccuggaguucaacaacgagagcuucaacuggaccggcgugacccagaacggcaccagcagcgccugcaucagaagaagcaagaacagcuucuucagcagacugaacuggcugacccaccugaacuucaaguaccccgcccugaacgugaccaugcccaacaacgagcaguucgacaagcuguacaucuggggcgugcaccaccccggcaccgacaaggaccagaucuuccuguacgcccaggccagcggcagaaucaccgugagcaccaagagaagccagcagaccgccauccccaacaucggcagcagacccagagugagaaacauccccagcagaaucagcaucuacuggaccaucgugaagcccggcgacauccugcugaucaacagcaccggcaaccugaucgcccccagaggcuacuucaagaucagaagcggcaagagcagcaucaugagaagcgacgcccccaucggcaagugcaacagcgagugcaucacccccaacggcagcauccccaacgacaagcccuuccagaacgugaacagaaucaccuacggcgccugccccagauacgugaagcagaacacccugaagcuggccaccggcaugagaaacgugcccgagaagcagaccagaggcaucuucggcgccaucgccggcuucaucgagaacggcugggagggcaugguggacggcugguacggcuucagacaccagaacagcgagggcagaggccaggccgccgaccugaagagcacccaggccgccaucgaccagaucaacggcaagcugaacagacugaucggcaagaccaacgagaaguuccaccagaucgagaaggaguucagcgagguggagggcagaauccaggaccuggagaaguacguggaggacaccaagaucgaccuguggagcuacaacgccgagcugcugguggcccuggagaaccagcacaccaucgaccugaccgacagcgagaugaacaagcuguucgagaagaccaagaagcagcugagagagaacgccgaggacaugggcaacggcugcuucaagaucuaccacaagugcgacaacgccugcaucggcagcaucagaaacggcaccuacgaccacgacguguacagagacgaggcccugaacaacagauuccagaucaagggcguggagcugaagagcggcuacaaggacuggauccuguggaucagcuucgccaucagcugcuuccugcugugcguggcccugcugggcuucaucaugugggccugccagaagggcaacaucagaugcgacaucugcaucuga

SEQ ID NO: 165376 - RNA, 1701 nt, Artificial Sequence
  derived and/or modified CDS sequence (opt4) from hemagglutinin__InfluenzaA__ADK87304
augaagaccaucaucgcccugagcuacauccugugccugguguucgcccagaagauccccggcaacgacaacagcaccgccacccugugccugggccaccacgccgugcccaacggcaccaucgugaagaccaucaccaacgaccagaucgaggugaccaacgccaccgagcuggugcagagcagcagcaccggcgagaucugcgacagcccccaccagauccuggacggcaagaacugcacccugaucgacgcccugcugggcgacccccagugcgacggcuuccagaacaagaagugggaccuguucguggagagaagcaaggccuacagcaacugcuaccccuacgacgugcccgacuacgccagccugagaagccugguggccagcagcggcacccuggaguucaacaacgagagcuucaacuggaccggcgugacccagaacggcaccagcagcgccugcaucagaagaagcaagaacagcuucuucagcagacugaacuggcugacccaccugaacuucaaguaccccgcccugaacgugaccaugcccaacaacgagcaguucgacaagcuguacaucuggggcgugcaccaccccggcaccgacaaggaccagaucuuccuguacgcccaggccagcggcagaaucaccgugagcaccaagagaagccagcagaccgccauccccaacaucggcagcagacccagagugagaaacauccccagcagaaucagcaucuacuggaccaucgugaagcccggcgacauccugcugaucaacagcaccggcaaccugaucgcccccagaggcuacuucaagaucagaagcggcaagagcagcaucaugagaagcgacgcccccaucggcaagugcaacagcggcugcaucacccccaacggcagcauccccaacgacaagcccuuccagaacgugaacagaaucaccuacggcgccugccccagauacgugaagcagaacacccugaagcuggccaccggcaugagaaacgugcccgagaagcagaccagaggcaucuucggcgccaucgccggcuucaucgagaacggcugggagggcaugguggacggcugguacggcuucagacaccagaacagcgagggcagaggccaggccgccgaccugaagagcacccaggccgccaucgaccagaucaacggcaagcugaacagacugaucggcaagaccaacgagaaguuccaccagaucgagaaggaguucagcgagguggagggcagaauccaggaccuggagaaguacguggaggacaccaagaucgaccuguggagcuacaacgccgagcugcugguggcccuggagaaccagcacaccaucgaccugaccgacagcgagaugaacaagcuguucgagaagaccaagaagcagcugagagagaacgccgaggacaugggcaacggcugcuucaagaucuaccacaagugcgacaacgccugcaucggcagcaucagaaacggcaccuacggccacgacguguacagagacgaggcccugaacaacagauuccagaucaagggcguggagcugaagagcggcuacaaggacugguuccuguggaucagcuucgccaucagcugcuuccugcugugcguggcccugcugggcuucaucaugugggccugccagaagggcaacaucagaugcaacaucugcaucuga

SEQ ID NO: 165377 - RNA, 1701 nt, Artificial Sequence
  derived and/or modified CDS sequence (opt4) from hemagglutinin__InfluenzaA__ADK87306
augaagaccaucaucgcccugagcuacauccugugccugguguucgcccagaagcugcccggcaacgacaacagcaccgccacccugugccugggccaccacgccgugcccaacggcaccaucgugaagaccaucaccaacgaccagaucgaggugaccaacgccgccgagcuggugcagagcagcagcaccggcgagaucugcgacagcccccaccagauccuggacggcaagaacugcacccugaucgacgcccugcugggcgacccccagugcgacggcuuccagaacaagaagugggaccuguucgugggcagaagcaaggccuacagcaacugcuaccccuacgacgugcccgacuacgccagccugagaagccugguggccagcagcggcacccuggaguucaacaacgagagcuucaacuggaccggcgugacccagaacggcaccagcagcgccugcaucagaagaagcaagaacagcuucuucagcagacugaacuggcugacccaccugaacuucaaguaccccgcccugaacgugaccaugcccaacaacgagcaguucgacaagcuguacaucuggggcgugcaccaccccggcaccgacaaggaccagaucuuccuguacgcccaggccagcggcagaaucaccgugagcaccaagagaagccagcagaccgccauccccaacaucggcagcagacccagagugagaaacauccccagcagaaucagcaucuacuggaccaucgugaagcccggcgacauccugcugaucaacagcaccggcaaccugaucgcccccagaggcuacuucaagaucagaagcggcaagagcagcaucaugagaagcgacgcccccaucggcaagugcaacagcgagugcaucacccccaacggcagcauccccaacgacaagcccuuccagaacgugaacagaaucaccuacggcgccugccccagauacgugaagcagaacacccugaagcuggccaccggcgugagaaacgugcccgagaagcagaccagaggcaucuucggcgccaucgccggcuucaucgagaacggcugggagggcaugguggacggcugguacggcuucagacaccagaacagcgagggcagaggccaggccgccgaccugaagagcacccaggccgccauggaccagaucaacggcaagcugaacagacugaucggcaagaccaacgagaagcugcaccagaccgagaaggaguucagcgagguggagggcagaauccaggaccuggagaaguacguggaggacaccaagaucgaccuguggagcuacaacgccgagcugcugguggcccuggagagccagcacaccaucgaccugaccgacagcgagaugaacaagcuguucgagaagaccaagaagcagcugagagagaacgccgaggacaugggcaacggcugcuucaagaucuaccacaagugcgacaacgccugcaucggcagcaucagaaacggcaccuacgaccacgacguguacagagacgaggcccugaacaacagauuccagaucaagggcguggagcugaagagcggcuacaaggacuggauccuguggaucagcuucgccaucagcugcuuccugcugugcguggcccugcugggcuucaucaugugggccugccagaagggcaacaucagaugcaacaucugcaucuga

SEQ ID NO: 165378 - RNA, 1701 nt, Artificial Sequence
  derived and/or modified CDS sequence (opt4) from hemagglutinin__InfluenzaA__ADK87308
augaagaccaucaucgcccugagcuacauccugugcaugguguucgcccagaagcugcccggcaacgacaacagcaccgccacccugugccugggccaccacgccgugcccaacggcaccaucgugaagaccaucaccaacgaccagaucgaggugaccaacgccaccgagcuggugcagagcagcagcaccggcgagaucugcgacagcccccaccagauccuggacggcaagaacugcacccugaucgacgcccugcugggcgacccccagugcgacggcuuccagaacaagaagugggaccuguucguggagagaagcaaggccuacagcaacugcuaccccuacgacgugcccgacuacgccagccugagaagccugguggccagcagcggcacccuggaguucaacaacgagagcuucaacuggaccggcgugacccagaacggcaccagcagcgccugcaucagaagaagcaagaacagcuucuucagcagacugaacuggcugacccaccugaacuucaaguaccccgcccugaacgugaccaugcccaacaacgagcaguucgacaagcuguacaucuggggcgugcaccaccccggcaccgacaaggaccagaucuuccuguacgcccaggccagcggcagaaucaccgugagcaccaagagaagccagcagaccgccauccccaacaucggcagcagacccagagugagaaacauccccagcagaaucagcaucuacuggaccaucgugaagcccggcgacauccugcugaucaacagcaccggcaaccugaucgcccccagaggcuacuucaagaucagaagcggcaagagcagcaucaugagaagcgacgcccccaucggcaagugcaacagcgagugcaucacccccaacggcagcauccccaacgacaagcccuuccagaacgugaacagaaucaccuacggcgccugccccagauacgugaagcagaacacccugaagcuggccaccggcaugagaaacgugcccgagaagcagaccagaggcaucuucggcgccaucgccggcuucaucgagaacggcugggagggcaugguggacggcugguacggcuucagacaccagaacagcgagggcagaggccaggccgccgaccugaagagcacccaggccgccaucgaccagaucaacggcaagcugaacagacugaucggcaagaccaacgagaaguuccaccagaucgagaaggaguucagcgagguggagggcagaauccaggaccuggagaaguacguggaggacaccaagaucgaccuguggagcuacaacgccgagcugcugguggcccuggagaaccagcacaccaucgaccugaccgacagcgagaugaacaagcuguucgagaagaccaagaagcagcugagagagaacgccgaggacaugggcaacggcugcuucaagaucuaccacaagugcgacaacgccugcaucggcagcaucagaaacggcaccuacgaccacgacguguacagagacgaggcccugaacaacagauuccagaucaagggcguggagcugaagagcggcuacaaggacuggauccuguggaucagcuucgccaucagcugcuuccugcugagaguggcccugcugggcuucaucaugugggccugccagaagggcaacaucagaugcaacaucugcaucuga

SEQ ID NO: 165379 - RNA, 1701 nt, Artificial Sequence
  derived and/or modified CDS sequence (opt4) from hemagglutinin__InfluenzaA__ADK87309
augaagaccaucaucgcccugagcuacauccugugccugguguucgcccagaagcugcccggcaacgacaacagcaccgccacccugugccugggccaccacgccgugcccaacggcaccaucgugaagaccaucaccaacgaccagaucgaggugaccaacgccaccgagcuggugcagagcagcagcaccggcgagaucugcgacagcccccaccagauccuggacggcaagaacugcacccugaucgacgcccugcugggcgacccccagugcgacggcuuccagaacaagaagugggaccuguucguggagagaagcaaggccuacagcaacugcuaccccuacgacgugcccgacuacgccagccugagaagccugguggccagcagcggcacccuggaguucaacaacgagagcuucaacuggaccggcgugacccagaacggcaccagcagcgccugcaucagaagaagcaagaacagcuucuucagcagacugaacuggcugacccaccugaacuucaaguaccccgcccugaacgugaccaugcccaacaacgagcaguucgacaagcuguacaucuggggcgugcaccaccccggcaccgacaaggaccagaucuuccuguacgcccaggccagcggcagaaucaccgugagcaccaagagaagccagcagaccgccauccccaacaucggcagcagacccagagugagaaacauccccagcagaaucagcaucuacuggaccaucgugaagcccggcgacauccugcugaucaacagcaccggcaaccugaucgcccccagaggcuacuucaagaucagaagcggcaagagcagcaucaugagaagcgacgcccccaucggcaagugcaacagcgagugcaucacccccaacggcagcauccccaacgacaagcccuuccagaacgugaacagaaucaccuacggcgccugccccagauacgugaagcagaacacccugaagcuggccaccggcaugagaaacgugcccgagaagcagaccagaggcaucuucggcgccaucgccggcuucaucgagaacggcugggagggcaugguggacggcugguacggcuucagacaccagaacagcgagggcagaggccaggccgccgaccugaagagcacccaggccgccaucgaccagaucaacggcaagcugaacagacugaucggcaagaccaacgagaaguuccaccagaucgagaaggaguucagcgagguggagggcagaauccaggaccuggagaaguacguggaggacaccaagaucgaccuguggagcuacaacgccgagcugcugguggcccuggagaaccagcacaccaucgaccugaccgacagcgagaugaacaagcuguucgagaagaccaagaagcagcugagagagaacgccgaggacaugggcaacggcugcuucaagaucuaccacaagugcgacaacgccugcaucggcagcaucagaaacggcaccuacgaccacgacguguacagagacgaggcccugaacaacagauuccagaucaagggcguggagcugaagagcggcuacaaggacuggauccuguggaucagcuucgccaucagcugcuuccugcugugcguggcccugagcggcuucaucaugugggccugccagaagggcaacaucagaugcaacaucugcaucuga

SEQ ID NO: 165380 - RNA, 1701 nt, Artificial Sequence
  derived and/or modified CDS sequence (opt4) from hemagglutinin__InfluenzaA__ADK87310
augaaggccauccugguggugcugcuguacaccuucgccaccgccaacgccgacacccugugcaucggcuaccacgccaacaacagcaccgacaccguggacaccgugcuggagaagaacgugaccgugacccacagcgugaaccugcuggaggacaagcacaacggcaagcugugcaagcugagaggcguggccccccugcaccugggcaagugcaacaucgccggcuggauccugggcaaccccgagugcgagagccugagcaccgccagcagcuggagcuacaucguggagaccagcagcagcgacaacggcaccugcuaccccggcgacuucaucgacuacgaggagcugagagagcagcugagcagcgugagcagcuucgagagauucgagaucuuccccaagaccggcagcuggcccaaccacgaccccaacaagggcgugaccgccgccugcccccacgccggcgccaagagcuucuacaagaaccugaucuggcuggugaagaagggcaacagcuaccccaagcugagcaagagcuacaucaacgacaagggcaaggaggugcuggugcuguggggcauccaccaccccagcaccagcgccgaccagcagagccuguaccagaacgccgacgccuacguguucgugggcaccagcagauacagcaagaaguucaagcccgagaucgccaucagacccaaggugagagaccaggagggcagaaugaacuacuacuggacccugguggagcccggcgacaagaucaccuucgaggccaccggcaaccugguggugcccagauacgccuucgccauggagagaaacgccggcagcggcaucaucaucagcgacacccccgugcacgacugcaacaccaccugccagacccccaagggcgccaucaacaccagccugcccuuccagaacauccaccccaucaccaucggcaagugccccaaguacgugaagagcaccaagcugagacuggccaccggccugagaaacgugcccagcauccagagcagaggccuguucggcgccaucgccggcuucaucgagggcggcuggaccggcaugguggacggcugguacggcuaccaccaccagaacgagcagggcagcggcuacgccgccgaccugaagagcacccagaacgccaucgacgagaucaccaacaaggugaacagcgugaucgagaagaugaacacccaguucaccgccgugggcaaggaguucaaccaccuggagaagagaaucgagaaccugaacaagaagguggacgacggcuuccuggacaucuggaccuacaacgccgagcugcuggugcugcuggagaacgagagaacccuggacuaccacgacagcaacgugaagaaccuguacgagaaggugagaagccagcugaagaacaacgccaaggagaucggcaacggcugcuucgaguucuaccacaagugcgacaacaccugcauggagagcgugaagaacggcaccuacgacuaccccaaguacagcgaggaggccaagcugaacagagaggagaucgacggcgugaagcuggagagcaccagaaucuaccagauccuggccaucuacagcaccguggccagcagccuggugcugguggugagccugggcgccaucagcuucuggaugugcagcaacggcagccugcagugcagaaucugcaucuga

SEQ ID NO: 165381 - RNA, 1701 nt, Artificial Sequence
  derived and/or modified CDS sequence (opt4) from hemagglutinin__InfluenzaA__ADK87311
augaaggccauccugguggugcugcuguacaccuucgccaccgccaacgccgacacccugugcaucggcuaccacgccgacaacagcaccgacaccguggacaccgugcuggagagaaacgugaccgugacccacagcgugaaccugcuggaggacaagcacaacggcaagcugugcaagcugagaggcguggccccccugcaccugggcaagugcaacaucgccggcuggauccugggcaaccccgagugcgagagccugagcaccgccagcagcuggagcuacaucguggagaccagcagcagcgacaacggcaccugcuaccccggcgacuucaucgacuacgaggagcugagagagcagcugagcagcgugagcagcuucgagagauucgagaucuuccccaagaccagcagcuggcccaaccacgacagcaacaagggcgugaccgccgccugcccccacgccggcgccaagagcuucuacaagaaccugaucuggcuggugaagaagggcaacagcuaccccaagcugagcaagagcuacaucaacgacaagggcaaggaggugcuggugcuguggggcauccaccaccccagcaccagcgccggccagcagagccuguaccagaacgccgacgccuacguguucgugggcaccagcagauacagcaagaaguucaagcccgagaucgccaucagacccaaggugagagaccaggagggcagaaugaacuacuacuggacccugguggagcccggcgacaagaucaccuucgaggccaccggcaaccugguggugcccagauacgccuucgccauggagagaaacgccggcagcggcaucaucaucagcgacacccccgugcacgacugcaacaccaccugccagacccccaagggcgccaucaacaccagcccccccuuccagaacauccaccccaucaccaucggcaagugccccaaguacgugaagagcaccaagcugagacuggccaccggccugagaaacgugcccagcauccagagcagaggccuguucggcgccaucgccggcuucaucgagggcggcuggaccggcaugguggacggcugguacggcuaccaccaccagaacgagcagggcagcggcuacgccgccgaccugaagagcacccagaacgccaucgacgagaucaccaacaaggugaacagcgugaucgagaagaugaacacccaguucaccgccgugggcaaggaguucaaccaccuggagaagagaaucgagaaccugaacaagaagguggacgacggcuuccuggacaucuggaccuacaacgccgagcugcuggugcugcuggagaacgagagaacccuggacuaccacgacagcaacgugaagaaccuguacgagaaggugagaagccagcugaagaacaacgccaaggagaucggcaacggcugcuucgaguucuaccacaagugcgacaacaccugcauggagagcgugaagaacggcaccuacgacuaccccaaguacagcgaggaggccaagcugaacagagaggagaucgacggcgugaagcuggagagcaccagaaucuaccagauccuggccaucuacagcaccguggccagcagccuggugcugguggugagccugggcgccaucagcuucuggaugugcagcaacggcagccugcagugcagaaucugcaucuga

SEQ ID NO: 165382 - RNA, 1701 nt, Artificial Sequence
  derived and/or modified CDS sequence (opt4) from hemagglutinin__InfluenzaA__ADK87313
augaagaccaucaucgcccugagcuacauccugugccugguguucgcccagaagauccccggcaacgacaacagcaccgccacccugugccugggccaccacgccgugcccaacggcaccaucgugaagaccaucaccaacgaccagaucgaggugaccaacgccaccgagcuggugcagagcagcagcaccggcgagaucugcgacagcccccaccagauccuggacggcaagaacugcacccugaucgacgcccugcugggcgacccccagugcgacggcuuccagaacaagaagugggaccuguucguggagagaagcaaggccuacagcaacugcuaccccuacgacgugcccgacuacgccagccugagaagccugguggccagcagcggcacccuggaguucaacaacgagagcuucaacuggaccggcgugacccagaacggcaccagcagcgccugcaucagaagaagcaagaacagcuucuucagcagacugaacuggcugacccaccugaacuucaaguaccccgcccugaacgugaccaugcccaacaacgagcaguucgacaagcuguacaucuggggcgugcaccaccccggcaccgacaaggaccagaucuuccuguacgcccaggccagcggcagaaucgccgugagcaccaagagaagccagcagaccgccauccccaacaucggcagcagacccagagugagaaacauccccagcagaaucagcaucuacuggaccaucgugaagcccggcgacauccugcugaucaacagcaccggcaaccugaucgcccccagaggcuacuucaagaucagaagcggcaagagcagcaucaugagaagcgacgcccccaucggcaagugcaacagcggcugcaucacccccaacggcagcauccccaacgacaagcccuuccagaacgugaacagaaucaccuacggcgccugccccagauacgugaagcagaacacccugaagcuggccaccggcaugagaaacgugcccgagaagcagaccagaggcaucuucggcgccaucgccggcuucaucgagaacggcugggagggcaugguggacggcugguacggcuucagacaccagaacagcgagggcagaggccaggccgccgaccugaagagcacccaggccgccaucgaccagaucaacggcaagcugaacagacugaucggcaagaccaacgagaaguuccaccagaucgagaaggaguucagcgagguggagggcagaauccaggaccuggagaaguacguggaggacaccaagaucgaccuguggagcuacaacgccgagcugcugguggcccuggagaaccagcacaccaucgaccugaccgacagcgagaugaacaagcuguucgagaagaccaagaagcagcugagagagaacgccgaggacaugggcaacggcugcuucaagaucuaccacaagugcgacaacgccugcaucggcagcaucagaaacggcaccuacgaccacgacguguacagagacgaggcccugaacaacagauuccagaucaagggcguggagcugaagagcggcuacaaggacugguuccuguggaucagcuucgccaucagcugcuuccugcugugcguggcccugcugggcuucaucaugugggccugccagaagggcaacaucagaugcaacaucugcaucuga

SEQ ID NO: 165383 - RNA, 1701 nt, Artificial Sequence
  derived and/or modified CDS sequence (opt4) from hemagglutinin__InfluenzaA__ADK87315
augaaggccauccugguggugcugcuguacaccuucgccaccgccaacgccgacacccugugcaucggcuaccacgccaacaacagcaccgacaccguggacaccgugcuggagaagaacgugaccgugacccacagcgugaaccugcuggaggacaagcacaacggcaagcugugcaagcugagaggcguggccccccugcaccugggcaagugcaacaucgccggcuggauccugggcaaccccgagugcgagagccugagcaccgccagcagcuggagcuacaucguggagaccagcagcagcgacaacggcaccugcuaccccggcgacuucaucgacuacgaggagcugagagagcagcugagcagcgugagcagcuucgagagauucgagaucuuccccaagaccagccccuggcccaaccacgaccccaacaagggcgugaccgccgccugcccccacgccggcgccaagagcuucuacaagaaccugaucuggcuggugaagaagggcaacagcuaccccaagcugagcaagagcuacaucaacgacaagggcaaggaggugcuggugcuguggggcauccaccaccccagcaccagcgccgaccagcagagccuguaccagaacgccgacgccuacguguucgugggcaccagcagauacagcaagaaguucaagcccgagaucgccaucagacccaaggugagagaccaggagggcagaaugaacuacuacuggacccugguggagcccggcgacaagaucaccuucgaggccaccggcaaccugguggugcccagauacgccuucgccauggagagaaacgccggcagcggcaucaucaucagcgacacccccgugcacgacugcaacaccaccugccagacccccaagggcgccaucaacaccagccugcccuuccagaacauccaccccaucaccaucggcaagugccccaaguacgugaagagcaccaagcugagacuggccaccggccugagaaacgugcccagcauccagagcagaggccuguucggcgccaucgccggcuucaucgagggcggcuggaccggcaugguggacggcugguacggcuaccaccaccagaacgagcagggcagcggcuacgccgccgaccugaagagcacccagaacgccaucgacgagaucaccaacaaggugaacagcgugaucgagaagaugaacacccaguucaccgccgugggcaaggagagcaaccaccuggagaccagaaucgagaaccugaacaagaagguggacgacggcuuccuggacaucuggaccuacaacgccgagcugcuggugcugcuggagaacgagagaacccuggacuaccacgacagcaacgugaagaaccuguacgagaaggugagaagccagcugaagaacaacgccaaggagaucggcaacggcugcuucgaguucuaccacaagugcgacagcaccugcauggagagcgugaagaacggcaccuacgacuaccccaaguacagcgaggaggccaagcugaacagagaggagaucgacggcgugaagcuggagagcaccagaaucuaccagauccuggccaucuacagcaccguggccagcagccuggugcugguggugagccugggcgccaucagcuucuggaugugcagcaacggcagccugcagugcagaaucugcaucuga

SEQ ID NO: 165384 - RNA, 1701 nt, Artificial Sequence; identical to SEQ ID NO: 163527
  derived and/or modified CDS sequence (opt4) from hemagglutinin__InfluenzaA__ADK87317

SEQ ID NO: 165385 - RNA, 1701 nt, Artificial Sequence
  derived and/or modified CDS sequence (opt4) from hemagglutinin__InfluenzaA__ADK87319
augaaggccauccugguggugcugcuguacaccuucgccaccgccaacgccgacacccugugcaucggcuaccacgccaacaacagcaccgacaccguggacaccgugcuggagaagaacgugaccgugacccacagcgugaaccugcuggaggacaagcacaacggcaagcugugcaagcugagaggcguggccccccugcaccugggcaagugcaacaucgccggcuggauccugggcaaccccgagugcgagagccugagcaccgccagcagcuggagcuacaucguggagaccagcagcagcgacaacggcaccugcuaccccggcgacuucaucgacuacgaggagcugagagagcagcugagcagcgugagcagcuucgagagauucgagaucuuccccaagaccagcagcuggcccaaccacgaccccaacaagggcgugaccgccgccugcccccacgccggcgccaagagcuucuacaagaaccugaucuggcuggugaagaagggcaacagcuaccccaagcugagcaagagcuacaucaacgacaagggcaaggaggugcuggugcuguggggcauccaccaccccagcaccagcgccgaccagcagagccuguaccagaacgccgacgccuacguguucgugggcaccagcagauacagcaagaaguucaagcccgagaucgccaucagacccaaggugagagaccaggagggcagaaugaacuacuacuggacccugguggagcccggcgacaagaucaccuucgaggccaccggcaaccugguggugcccagauacgccuucgccauggagagaaacgccggcagcggcaucaucaucagcgacacccccgugcacgacugcaacaccaccugccagacccccaagggcgccaucaacaccagccugcccuuccagaacauccaccccaucaccaucggcaagugccccaaguacgugaagagcaccgagcugagacuggccaccggccugagaaacgugcccagcauccagagcagaggccuguucggcgccaucgccggcuucaucgagggcggcuggaccggcaugguggacggcugguacggcuaccaccaccagaacgagcagggcagcggcuacgccgccgaccugaagagcacccagaacgccaucgacgagaucaccaacaaggugaacagcgugaucgagaagaugaacacccaguucaccgccgugggcaaggaguucaaccaccuggagaagagaaucgagaaccugaacaagaagguggacgacggcuuccuggacaucuggaccuacaacgccgagcugcuggugcugcuggagaacgagagaacccuggacuaccacgacagcaacgugaagaaccuguacgagaaggugagaagccagcugaagaacaacgccaaggagaucggcaacggcugcuucgaguucuaccacaagugcgacaacaccugcauggagagcgugaagaacggcaccuacgacuaccccaaguacagcgaggaggccaagcugaacagagaggagaucgacggcgugaagcuggagagcaccagaaucuacagaauccuggccaucuacagcaccguggccagcagccuggugcugguggugagccugggcgccaucagcuucuggaugugcagcaacggcagccugcagugcagaaucugcaucuga

SEQ ID NO: 165386 - RNA, 1701 nt, Artificial Sequence
  derived and/or modified CDS sequence (opt4) from hemagglutinin__InfluenzaA__ADK87321
augaagaccaucaucgcccugagcuacauccugugccugguguucgcccagaagauccccggcaacgacaacagcaccgccacccugugccugggccaccacgccgugcccaacggcaccaucgugaagaccaucaccaacgaccagaucgaggugaccaacgccaccgagcuggugcagagcagcagcaccggcgagaucugcgacagcccccaccagauccuggacggcaagaacugcacccugaucgacgcccugcugggcgacccccagugcgacggcuuccagaacaagaagugggaccuguucguggagagaagcaaggccuacagcaacugcuaccccuacgacgugcccgacuacgccagccugagaagccugguggccagcagcggcacccuggaguucaacaacgagagcuucaacuggaccggcgugacccagaacggcaccagcagcgccugcaugagaagaagcaagaacagcuucuucagcagacugaacuggcugacccaccugaacuucaaguaccccgcccugaacgugaccaugcccaacaacgagcaguucgacaagcuguacaucuggggcgugcaccaccccggcaccgacaaggaccagaucuuccuguacgcccaggccagcggcagaaucaccgugagcaccaagagaagccagcagaccgccauccccaacaucggcagcagacccagagugagaaacauccccagcagaaucagcguguacuggaccaucgugaagcccggcgacauccugcugaucaacagcaccggcaaccugaucgcccccagaggcuacuucaagaucagaagcggcaagagcagcaucaugagaagcgacgccagcaucggcaagugcaacagcggcugcaucacccccaacggcagcauccccaacgacaagcccuuccagaacgugaacagaaucaccuacggcgccugccccagauacgugaagcagaacacccugaagcuggccaccggcaugagaaacgugcccgagaagcagaccagaggcaucuucggcgccaucgccggcuucaucgagaacggcugggagggcaugguggacggcugguacggcuucagacaccagaacagcgagggcagaggccaggccgccgaccugaagagcacccaggccgccaucgaccagaucaacggcaagcugaacagacugaucggcaagaccaacgagaaguuccaccagaucgagaaggaguuccccgagguggagggcagaauccaggaccuggagaaguacguggaggacaccaagaucgaccuguggagcuacaacgccgagccccugguggcccuggagaaccagcacaccaucgaccugaccgacagcgagaugaacaagcuguucgagaagaccaagaagcagcugagagagaacgccgaggacaugggcaacggcugcuucaagaucuaccacaagugcgacaacgccugcaucggcagcaucagaaacggcaccuacgaccacgacguguacagagacgaggcccugaacaacagauuccagaucaagggcguggagcugaagagcggcuacaaggacugguuccuguggaucagcuucgccaucagcugcuuccugcugugcguggcccugcugggcuucaucaugugggccugccagaagggcaacaucagaugcaacaucugcaucuga

SEQ ID NO: 165387 - RNA, 1701 nt, Artificial Sequence
  derived and/or modified CDS sequence (opt4) from hemagglutinin__InfluenzaA__ADK87323
augaagaccaucaucgcccugagcuacauccugugccugguguucgcccagaagcugcccggcaacgacaacagcaccgccacccugugccugggccaccacgccgugcccaacggcaccaucgugaagaccaucaccaacgaccagaucgaggugaccaacgccaccgagcuggugcagagcagcagcaccggcgagaucugcgacagcccccaccagauccuggacggcaagaacugcacccugaucgacgcccugcugggcgacccccagugcgacggcuuccagaacaagaagugggaccuguucguggagagaagcaaggccuacagcaacugcuaccccuacgacgugcccgacuacgccagccugagaagccugguggccagcagcggcacccuggaguucaacaacgagagcuucaacuggaccggcgugacccagaacggcaccagcagcgccugcaucagaagaagcaagaacagcuucuucagcagacugaacuggcugacccaccugaacuucaaguaccccgcccugaacgugaccaugcccaacaacgagcaguucgacaagcuguacaucuggggcgugcaccaccccggcaccgacaaggaccagaucuuccuguacgcccaggccagcggcagaaucaccgugagcaccaagagaagccagcagaccgccauccccaacaucggcagcagacccagagugggcaacauccccagcagaaucagcaucuacuggaccaucgugaagcccggcgacauccugcugaucaacagcaccggcaaccugaucgcccccagaggcuacuucaagaucagaagcggcaagagcagcaucaugagaagcgacgcccccaucggcaagugcaacagcgagugcaucacccccaacggcagcauccccaacgacaagcccuuccagaacgugaacagaaucaccuacggcgccugccccagauacgugaagcagaacacccugaagcuggccaccggcaugagaaacgugcccgagaagcagaccagaggcaucuucggcgccaucgccggcuucaucgagaacggcugggagggcaugguggacggcugguacggcuucagacaccagaacagcgagggcagaggccaggccgccgaccugaagagcacccaggccgccaucgaccagaucaacggcaagcugaacagacugaucggcaagaccaacgagaaguuccaccagaucgagaaggaguucagcgagguggagggcagaauccaggaccuggagaaguacguggaggacaccaagaucgaccuguggagcuacaacgccgagcugcugguggcccuggagaaccagcacaccaucgaccugaccgacagcgagaugaacaagcuguucgagaagaccaagaagcagcugagagagaacgccgaggacaugggcaacggcugcuucaagaucuaccacaagugcgacaacgccugcaucggcagcaucagaaacggcaccuacgaccacgacguguacagagacgaggcccugaacaacagauuccagaucaagggcguggagcugaagagcggcuacaaggacuggauccuguggaucagcuucgccaucagcugcuuccugcugugcguggcccugcugggcuucaucaugugggccugccagaagggcaacaucagaugcaacaucugcaucuga

SEQ ID NO: 165388 - RNA, 1701 nt, Artificial Sequence
  derived and/or modified CDS sequence (opt4) from hemagglutinin__InfluenzaA__ADK87325
augaagaccaucaucgcccugagcuacauccugugccugguguucgcccagaagcugcccggcaacgacaacagcaccgccacccugugccugggccaccacgccgugcccaacggcaccaucgugaagaccaucaccaacgaccagaucgaggugaccaacgccaccgagcuggugcagagcagcagcaccggcgagaucugcgacagcccccaccagauccuggacggcaagaacugcacccugaucgacgcccugcugggcgacccccagugcgacggcuuccagaacaagaagugggaccuguucguggagagaagcaaggccuacagcaacugcuaccccuacgacgugcccgacuacgccagccugagaagccugguggccagcagcggcacccuggaguucaacaacgagagcuucaacuggaccggcgugacccagaacggcaccagcagcgccugcaucagaagaagcaagaacagcuucuucagcagacugaacuggcugacccaccugaacuucaaguaccccgcccugaacgugaccaugcccaacaacgagcaguucgacaagcuguacaucuggggcgugcaccaccccggcaccgacaaggaccagaucuuccuguacgcccaggccagcggcagaaucaccgugagcaccaagagaagccagcagaccgccauccccaacaucggcagcagacccagagugagaaacauccccagcagaaucagcaucuacuggaccaucgugaagcccggcgacauccugcugaucaacagcaccggcaaccugaucgcccccagaggcuacuucaagaucagaagcggcaagagcagcaucaugagaagcgacgcccccaucggcaagugcaacagcgagugcaucacccccaacggcagcauccccaacgacaagcccuuccagaacgugaacagaaucaccuacggcgccugccccagacacgugaagcagaacacccugaagcuggccaccggcaugagaaacgugcccgagaagcagaccagaggcaucuucggcgccaucgccggcuucaucgagaacggcugggagggcaugguggacggcugguacggcuucagacaccagaacagcgagggcagaggccaggccgccgaccugaagagcacccaggccgccaucgaccagaucaacggcaagcugaacagacugaucggcaagaccaacgagaaguuccaccagaucgagaaggaguucagcgagguggagggcagaauccaggaccuggagaaguacguggaggacaccaagaucgaccuguggagcuacaacgccgagcugcugguggcccuggagaaccagcacaccaucgaccugaccgacagcgagaugaacaagcuguucgagaagaccaagaagcagcugagagagaacgccgaggacaugggcaacggcugcuucaagaucuaccacaagugcgacaacgccugcaucggcagcaucagaaacggcaccuacgaccacgacguguacagagacgaggcccugaacaacagauuccagaucaagggcguggagcugaagagcggcuacaaggacuggauccuguggaucagcuucgccaucagcugcuuccugcugugcguggcccugcugggcuucaucaugugggccugccagaagggcaacaucagaugcaacaucugcaucuga

SEQ ID NO: 165389 - RNA, 1701 nt, Artificial Sequence
  derived and/or modified CDS sequence (opt4) from hemagglutinin__InfluenzaA__ADK87326
augaagaccaucaucgcccugagcuacauccugugccugguguucgcccagaagcugcccggcaacgacaacagcaccgccacccugugccugggccaccacgccgugcccaacggcaccaucgugaagaccaucaccaacgaccagaucgaggugaccaacgccaccgagcuggugcagagcagcagcaccggcgagaucugcgacagcccccaccagauccuggacggcaagaacugcacccugaucgacgcccugcugggcgacccccagugcgacggcuuccagaacaagaagugggaccuguucguggagagaagcaaggccuacagcaacugcuaccccuacgacgugcccgacuacgccagccugagaagccugguggccagcagcggcacccuggaguucaacaacgagagcuucaacuggaccggcgugacccagaacggcaccagcagcgccugcaucagaagaagcaagaacagcuucuucagcagacugaacuggcugacccaccugaacuucaaguaccccgcccugaacgugaccaugcccaacaacgagcaguucgacaagcuguacaucuggggcgugcaccaccccggcaccgacaaggaccagaucuuccuguacgcccaggccagcggcagaaucaccgugagcaccaagagaagccagcagaccgccauccccaacaucggcagcagacccagagugagaaacauccccagcagaaucagcaucuacuggaccaucgugaagcccggcgacauccugcugaucaacagcaccggcaaccugaucgcccccagaggcuacuucaagaucagaagcggcaagagcagcaucaugagaagcgacgcccccaucggcaagugcaacagcgagugcaucacccccaacggcagcauccccaacgacaagcccuuccagaacgugaacagaaucaccuacggcgccugccccagauacgugaagcagaacacccugaagcuggccaccggcaugagaaacgugcccgagaagcagaccagaggcaucuucggcgccaucgccggcuucaucgagaacggcugggagggcaugguggacggcugguacggcuucagacaccagaacagcgagggcagaggccaggccgccgaccugaagagcacccaggccgccaucgaccagaucaacggcaagcugaacagacugaucggcaagaccaacgagaaguuccaccagaucgagaaggaguucagcgagguggagggcagaauccaggaccuggagaaguacguggaggacaccaagaucgaccuguggagcuacaacgccgagcugcugguggcccuggagaaccagcacaccaucgaccugaccgacagcgagaugaacaagcuguucgagaagaccaagaagcagcugagagagaacgccgaggacaugggcaacggcugcuucaagaucuaccacaagugcgacaacgccugcaucggcagcaucagaaacggcaccuacgaccacgacguguacagagacgaggcccugaacaacagauuccagaucaagggcguggagcugaagagcggcugcaaggacuggauccuguggaucagcuucgccaucagcugcuuccugcugugcguggcccugcugggcuucaccaugugggccugccagaagggcaacaucagaugcaacaucugcaucuga

SEQ ID NO: 165390 - RNA, 1701 nt, Artificial Sequence
  derived and/or modified CDS sequence (opt4) from hemagglutinin__InfluenzaA__ADK87328
augaaggccauccugguggugcugcuguacaccuucgccaccgccaacgccgacacccugugcaucggcuaccacgccaacaacagcaccgacaccguggacaccgugcuggagaagaacgugaccgugacccacagcgugaaccugcuggaggacaagcacaacggcaagcugugcaagcugagaggcguggccccccugcaccugggcaagugcaacaucgccggcuggauccugggcaaccccgagugcgagagccugagcaccgccagcagcuggagcuacaucguggagaccagcagcagcgacaacggcaccugcuaccccggcgacuucaucgacuacgaggagcugagagagcagcugagcagcgugagcagcuucgagagauucgagaucuuccccaagaccagcagcuggcccaaccacgaccccaacaagggcgugaccgccgccugcccccacgccggcgccaagagcuucuacaagaaccugaucuggcuggugaagaagggcaacagcuaccccaagcugagcaagagcuacaucaacgacaagggcaaggaggugcuggugcuguggggcauccaccaccccagcaccagcgccgaccagcagagccuguaccagaacgccgacgccuacguguucgugggcaccagcagauacagcaagaaguucaagcccgagaucgccaucagacccaaggugagagaccaggagggcagaaugaacuacuacuggacccugguggagcccggcgacaagaucaccuucgaggccaccggcaaccugguggugcccagauacgccuucgccauggagagaaacgccggcagcggcaucaucaucagcgacacccccgugcacgacugcaacaccaccugccagacccccaagagcgccaucaacaccagccugcccuuccagaacauccaccccaucaccaucggcaagugccccaaguacgugaagagcaccaagcugagacuggccaccggccugagaaacgugcccagcauccagagcagaggccuguucggcgccaucgccggcuucaucgagggcggcuggaccggcaugguggacggcugguacggcuaccaccaccagaacgagcagggcagcggcuacgccgccgaccugaagagcacccagaacgccaucgacgagaucaccaacaaggugaacagcgugaucgagaagaugaacacccaguucaccgccgugggcaaggaguucaaccaccuggagaagagaaucgagaaccugaacaagaagguggacgacggcuuccuggacaucuggaccuacaacgccgagcugcuggugcugcuggagaacgagagaacccuggacuaccacgacagcaacgugaagaaccuguacgagaaggugagaagccagcugaagaacaacgccaaggagaucggcaacggcugcuucgaguucuaccacaagugcgacaacaccugcauggagagcgugaagaacggcaccuacgacuaccccaaguacagcgaggaggccaagcugaacagagaggagaucgacggcgugaagcuggagagcaccagaaucuaccagauccuggccaucuacagcaccguggccagcagccuggugcugguggugagccugggcgccaucagcuucuggaugugcagcaacggcagccugcagugcagaaucugcaucuga

SEQ ID NO: 165391 - RNA, 1701 nt, Artificial Sequence
  derived and/or modified CDS sequence (opt4) from hemagglutinin__InfluenzaA__ADK87334
augaagaccaucaucgcccugagcuacauccugugccugguguucgcccagaagcugcccggcaacgacaacagcaccgccacccugugccugggccaccacgccgugcccaacggcaccaucgugaagaccaucaccagcgaccagaucgaggugaccaacgccaccgagcuggugcagagcagcagcaccggcgagaucugcgacagcccccaccagauccuggacggcaagaacugcacccugaucgacgcccugcugggcgacccccagugcgacggcuuccagaacaagaagugggaccuguucguggagagaagcaaggccuacagcaacugcuaccccuacgacgugcccgacuacgccagccugagaagccugguggccagcagcggcacccuggaguucaacaacgagagcuucaacuggaccggcgugacccagaacggcaccagcagcgccugcaucagaagaagcaagaacagcuucuucagcaagcugaacuggcugacccaccugaacuucaaguaccccgcccugaacgugaccaugcccaacaacgagcaguucgacaagcuguacaucuggggcgugagacaccccggcaccgacaaggaccagaucuuccuguacgcccaggccagcggcagaaucaccgugagcaccaagagaagccagcagaccgugauccccaacaucggcagcagacccagagugagaaacauccccagcagaaucagcaccuacuggaccaucgugaagcccggcgacauccugcugaucaacagcaccggcaaccugaucgcccccagaggcuacuucaagaucagaagcggcaagagcagcaucaugagaagcgacacccccaucggcaagugcaacagcgagugcaucacccccaacggcagcauccccaacgacaagcccuuccagaacgugaacagaaucaccuacggcgccugccccagauacgugaagcagaacacccugaagcuggccaccggcaugagaaacgugcccgagaagcagaccagaggcaucuucggcgccaucgccggcuucaucgagaacggcugggagggcaugguggacggcugguacggcuucagacaccagaacagcgagggcagaggccaggccgccgaccugaagagcacccaggccgccaucgaccagaucaacggcaagcugaacagacugaucggcaagaccaacgagaaguuccaccagaucgagaaggaguucagcgagguggagggcagaauccaggaccuggagaaguacguggaggacaccaagaucgaccuguggagcuacaacgccgagcugcugguggcccuggagaaccagcacaccaucgaccugaccgacagcgagaugaacaagcuguucgagaagaccaagaagcagcugagagagaacgccgaggacaugggcaacggcugcuucaagaucuaccacaagugcgacaacgccugcaucggcagcaucagaaacggcaccuacgaccacgacguguacagagacgaggcccugaacaacagauuccagaucaagggcguggagcugaagagcggcuacaaggacuggauccuguggaucagcuucgccaucagcugcuuccugcugugcguggcccugcugggcuucaucaugugggccugccagaagggcaacaucagaugcaacaucugcaucuga

SEQ ID NO: 165392 - RNA, 1701 nt, Artificial Sequence
  derived and/or modified CDS sequence (opt4) from hemagglutinin__InfluenzaA__ADK87336
augaagaccaucaucgcccugagcuacauccugugccugguguucgcccagaagcugcccggcaacgacaacagcaccgccacccugugccugggccaccacgccgugcccaacggcaccaucgugaagaccaucaccaacgaccagaucgaggugaccaacgccaccgagcuggugcagagcagcagcaccggcgagaucugcgacagcccccaccagauccuggacggcaagaacugcacccugaucgacgcccugcugggcgacccccagugcgacggcuuccagaacaagaagugggaccuguucguggagagaagcaaggccuacagcaacugcuaccccuacgacgugcccgacuacgccagccugagaagccugguggccagcagcggcacccuggaguucaacaacgagagcuucaacuggaccggcgugacccagaacggcaccagcagcgccugcaucagaagaagcaagaacagcuucuucagcaagcugaacuggcugacccaccugaacuucaaguaccccgcccugaacgugaccaugcccaacaacgagcaguucgacaagcuguacaucuggggcgugcaccaccccggcaccgacagagaccagaucuuccuguacgcccaggccagcggcagaaucaccgugagcaccaagagaagccagcagaccgugauccccaacaucggcagcagacccagagugagaaacauccccagcagaaucagcaucuacuggaccaucgugaagcccggcgacauccugcugaucaacagcaccggcaaccugaucgcccccagaggcuacuucaagaucagaagcggcaagagcagcaucaugagaagcgacacccccaucggcaagagcaacagcgagugcaucacccccaacggcagcauccccaacgacaagcccuuccagaacgugaacagaaucaccuacggcgccugccccagauacgugaagcagaacacccugaagcuggccaccggcaugagaaacgugcccgagaagcagaccagaggcaucuucggcgccaucgccggcuucaucgagaacggcugggagggcaugguggacggcugguacggcuucagacaccagaacagcgagggcagaggccaggccgccgaccugaagagcacccaggccgccaucgaccagaucaacggcaagcugaacagacugaucggcaagaccaacgagaaguuccaccagaucgagaaggaguucagcgagguggagggcagaauccaggaccuggagaaguacguggaggacaccaagaucgaccuguggagcuacaacgccgagcugcugguggcccuggagaaccagcacaccaucgaccugaccgacagcgagaugaacaagcuguucgagaagaccaagaagcagcugagagaggacgccgaggacaugggcaacggcugcuucaagaucuaccacaagugcgacaacgccugcaucggcagcaucagaaacggcaccuacgaccacgacguguacagagacgaggcccugaacaacagauuccagaucaagggcguggagcugaagagcggcuacaaggacuggauccuguggaucagcuucgccaucagcugcuuccugcugugcguggcccugcugggcuucaucaugugggccugccagaagggcaacaucagaugcaacaucugcaucuga

SEQ ID NO: 165393 - RNA, 1701 nt, Artificial Sequence; identical to SEQ ID NO: 162729
  derived and/or modified CDS sequence (opt4) from hemagglutinin__InfluenzaA__ADK87338

SEQ ID NO: 165394 - RNA, 1701 nt, Artificial Sequence
  derived and/or modified CDS sequence (opt4) from hemagglutinin__InfluenzaA__ADK90193
augaaggccauccugguggugcugcuguacaccuucgccaccgccaacgccgacacccugugcaucggcuaccacgccaacaacagcaccgacaccguggacaccgugcuggagaagaacgugaccgugacccacagcgugaaccugcuggaggacaagcacaacggcaagcugugcaagcugagaggcguggccccccugcaccugggcaagugcaacaucgccggcuggauccugggcaaccccgagugcgagagccugagcaccgccagcagcuggagcuacaucguggagaccagcagcagcgacaacggcaccugcuaccccggcgacuucaucgacuacgaggagcugagagagcagcugagcagcgugagcagcuucgagagauucgagaucuuccccaagaccagcagcuggcccaaccacgacagcaacaagggcgugaccgccgccugcccccacgccggcgccaagagcuucuacaagaaccugaucuggcuggugaagaagggcaacagcuaccccaagcugagcaagagcuacaucaacgacaagggcaagguggugcuggugcuguggggcauccaccaccccagcaccagcgccgaccagcagagccuguaccagaacgccgacgccuacguguucgugggcaccagcagauacagcaagaaguucaagcccgagaucgccaucagacccaaggugagagaccaggagggcagaaugaacuacuacuggacccugguggagcccggcgacaagaucaccuucgaggccaccggcaaccugguggugcccagauacgccuucgccauggagagaaacgccggcagcggcaucaucaucagcgacacccccgugcacgacugcaacaccaccugccagacccccaagggcgccaucaacaccagccugcccuuccagaacauccaccccaucaccaucggcaagugccccaaguacgugaagagcaccaagcugagacuggccaccggccugagaaacgugcccagcauccagagcagaggccuguucggcgccaucgccggcuucaucgagggcggcuggaccggcaugguggacggcugguacggcuaccaccaccagaacgagcagggcagcggcuacgccgccgaccugaagagcacccagaacgccaucgacgagaucaccaacaaggugaacagcgugaucgagaagaugaacacccaguucaccgccgugggcaaggaguucaaccaccuggagaagagaaucgagaaccugaacaagaagguggacgacggcuuccuggacaucuggaccuacaacgccgagcugcuggugcugcuggagaacgagagaacccuggacuaccacgacagcaacgugaagaaccuguacgagaaggugagaagccagcugaagaacaacgccaaggagaucggcaacggcugcuucgaguucuaccacaagugcgacaacaccugcauggagagcgugaagaacggcaccuacgacuaccccaaguacagcgaggaggccaagcugaacagagaggagaucgacggcgugaagcuggagagcaccagaaucuaccagauccuggccaucuacagcaccguggccagcagccuggugcugguggugagccugggcgccaucagcuucuggaugugcagcaacggcagccugcagugcagaaucugcaucuga

SEQ ID NO: 165395 - RNA, 1701 nt, Artificial Sequence
  derived and/or modified CDS sequence (opt4) from hemagglutinin__InfluenzaA__ADK90194
augaaggccauccugguggugcugcuguacaccuucgccaccgccaacgccgacacccugugcaucggcuaccacgccaacaacagcaccgacaccguggacaccgugcuggagaagaacgugaccgugacccacagcgugaaccugcuggaggacaagcacaacggcaagcugugcaagcugagaggcguggccccccugcaccugggcaagugcaacaucgccggcuggauccugggcaaccccgagugcgagagccugagcaccgccagcagcuggagcuacaucguggagaccagcagcagcgacaacggcaccugcuaccccggcgacuucaucgacuacgaggagcugagagagcagcugagcagcgugagcagcuucgagagauucgagaucuuccccaagaccagcagcuggcccaaccacgacagcaacaagggcgugaccgccgccugcccccacgccggcgccaagagcuucuacaagaaccugaucuggcuggugaagaagggcaacagcuaccccaagcugagcaagagcuacaucaacgacaagggcaaggaggugcuggugcuguggggcauccaccaccccagcaccagcgccgaccagcagagccuguaccagaacgccgacgccuacguguucgugggcaccagcaaguacagcaagaaguucaagcccgagaucgccaucagacccaaggugagagaccaggagggcagaaugaacuacuacuggacccugguggagcccggcgacaagaucaccuucgaggccaccggcaaccugguggugcccagauacgccuucgccauggagagaaacgccggcagcggcaucaucaucagcgacacccccgugcacgacugcaacaccaccugccagacccccaagggcgccaucaacaccagccugcccuuccagaacauccaccccaucaccaucggcaagugccccaaguacgugaagagcaccaagcugagacuggccaccggccugagaaacgugcccagcauccagagcagaggccuguucggcgccaucgccggcuucaucgagggcggcuggaccggcaugguggacggcugguacggcuaccaccaccagaacgagcagggcagcggcuacgccgccgaccugaagagcacccagaacgccaucgacgagaucaccaacaaggugaacagcgugaucgagaagaugaacacccaguucaccgccgugggcaaggaguucaaccaccuggagaagagaaucgagaaccugaacaagaagaucgacgacggcuuccuggacaucuggaccuacaacgccgagcugcuggugcugcuggagaacgagagaacccuggacuaccacgacagcaacgugaagaaccuguacgagaaggugagaagccagcugaagaacaacgccaaggagaucggcaacggcugcuucgaguucuaccacaagugcgacaacaccugcauggagagcgugaagaacggcaccuacgacuaccccaaguacagcgaggaggccaagcugaacagagaggagaucgacggcgugaagcuggagagcaccagaaucuaccagauccuggccaucuacagcaccguggccagcagccuggugcugguggugagccugggcgccaucagcuucuggaugugcagcaacggcagccugcagugcagaaucugcaucuga

SEQ ID NO: 165396 - RNA, 1701 nt, Artificial Sequence
  derived and/or modified CDS sequence (opt4) from hemagglutinin__InfluenzaA__ADK90195
augaaggccauccugguggugcugcuguacaccuucgccaccgccaacgccgacacccugugcaucggcuaccacgccaacaacagcaccgacaccguggacaccgugcuggagaagaacgugaccgugacccacagcgugaaccugcuggaggacaagcacaacggcaagcugugcaagcugagaggcguggccccccugcaccugggcaagugcaacaucgccggcuggauccugggcaaccccgagugcgagagccugagcaccgccagcagcuggagcuacaucguggagaccagcagcagcgacaacggcaccugcuaccccggcgacuucaucgacuacgaggagcugagagagcagcugagcagcgugagcagcuucgagagauucgagaucuuccccaagaccagcagcuggcccaaccacgacagcaacaagggcgugaccgccgccugcccccacgccggcgccaagagcuucuacaagaaccugaucuggcuggugaagaagggcaacagcuaccccaagcugagcaagagcuacaucaacgacaagggcaaggaggugcuggugcuguggggcauccaccaccccagcaccagcgccgaccagcagagccuguaccagaacgccgacgccuacguguucgugggcaccagcagauacagcaagaaguucaagcccgagaucgccaucagacccaaggugagagaccaggagggcagaaugaacuacuacuggacccugguggagcccggcgacaagaucaccuucgaggccaccggcaaccugguggugcccagauacgccuucgccauggagagaaacgccggcagcggcaucgugaucagcgacacccccgugcacgacugcaacaccaccugccagacccccaagggcgccaucaacaccagccugcccuuccagaacauccaccccaucaccaucggcaagugccccaaguacgugaagagcaccaagcugagacuggccaccggccugagaaacgugcccagcauccagagcagaggccuguucggcgccaucgccggcuucaucgagggcggcuggaccggcaugguggacggcugguacggcuaccaccaccagaacgagcagggcagcggcuacgccgccgaccugaagagcacccagaacgccaucgacgagaucaccaacaaggugaacagcgugaucgagaagaugaacacccaguucaccgccgugggcaaggaguucaaccaccuggagaagagaaucgagaaccugaacaagaagaucgacgacggcuuccuggacaucuggaccuacaacgccgagcugcuggugcugcuggagaacgagagaacccuggacuaccacgacagcaacgugaagaaccuguacgagaaggugagaagccagcugaagaacaacgccaaggagaucggcaacggcugcuucgaguucuaccacaagugcgacaacaccugcauggagagcgugaagaacggcaccuacgacuaccccaaguacagcgaggaggccaagcugaacagagaggagaucgacggcgugaagcuggagagcaccagaaucuaccagauccuggccaucuacagcaccguggccagcagccuggugcugguggugagccugggcgccaucagcuucuggaugugcagcaacggcagccugcagugcagaaucugcaucuga

SEQ ID NO: 165397 - RNA, 1701 nt, Artificial Sequence; identical to SEQ ID NO: 162716
  derived and/or modified CDS sequence (opt4) from hemagglutinin__InfluenzaA__ADK90196

SEQ ID NO: 165398 - RNA, 1701 nt, Artificial Sequence
  derived and/or modified CDS sequence (opt4) from hemagglutinin__InfluenzaA__ADK90197
augagagccauccugggcgugcugcuguacaccuucgccaccgccaacgccgacacccugugcaucggcuaccacgccaacaacagcaccgacaccguggacaccgugcuggagaagaacgugaccgugacccacagcgugaaccugcuggaggacaagcacaacggcaagcugugcaagcugagaggcguggccccccugcaccugggcaagugcaacaucgccggcuggauccugggcaaccccgagugcgagagccugagcaccgccagcagcuggagcuacaucguggagaccagcagcagcgacaacggcaccugcuaccccggcgacuucaucgacuacgaggagcugagagagcagcugagcagcgugagcagcuucgagagauucgagaucuuccccaagaccagcagcuggcccaaccacgacagcaacaagggcgugaccgccgccugcccccacgccggcgccaagagcuucuacaagaaccugaucuggcuggugaagaagggcaacagcuaccccaagcugagcaagagcuacaucaacgacaagggcaaggaggugcuggugcuguggggcauccaccaccccagcaccagcgccgaccagcagagccuguaccagaacgccgacgccuacguguucgugggcaccagcagauacagcaagaaguucaagcccgagaucgccaucagacccaaggugagagaccaggagggcagaaugaacuacuacuggacccugguggagcccggcgacaagaucaccuucgaggccaccggcaaccugguggugcccagauacgccuucgccauggagagaaacgccggcagcggcaucaucaucagcgacacccccgugcacgacugcaacaccaccugccagacccccaagggcgccaucaacaccagccugcccuuccagaacauccaccccaucaccaucggcaagugccccaaguacgugaagagcaccaagcugagacuggccaccggccugagaaacgugcccagcauccagagcagaggccuguucggcgccaucgccggcuucaucgagggcggcuggaccggcaugguggacggcugguacggcuaccaccaccagaacgagcagggcagcggcuacgccgccgaccugaagagcacccagaacgccaucgacgagaucaccaacaaggugaacagcgugaucgagaagaugaacacccaguucaccgccgugggcaaggaguucaaccaccuggagaagagaaucgagaaccugaacaagaagguggacgacggcuuccuggacaucuggaccuacaacgccgagcugcuggugcugcuggagaacgagagaacccuggacuaccacgacagcaacgugaagaaccuguacgagaaggugagaagccagcugaagaacaacgccaaggagaucggcaacggcugcuucgaguucuaccacaagugcgacaacaccugcauggagagcgugaagaacggcaccuacgacuaccccaaguacagcgaggaggccaagcugaacagagaggagaucgacggcgugaagcuggagagcaccagaaucuaccagauccuggccaucuacagcaccguggccagcagccuggugcugguggugagccugggcgccaucagcuucuggaugugcagcaacggcagccugcagugcagaaucugcaucuga

SEQ ID NO: 165399 - RNA, 1701 nt, Artificial Sequence
  derived and/or modified CDS sequence (opt4) from hemagglutinin__InfluenzaA__ADK90198
augaaggccauccugggcgugcugcuguacaccuucgccaccgccaacgccgacacccugugcaucggcuaccacgccaacaacagcaccgacaccguggacaccgugcuggagaagaacgugaccgugacccacagcgugaaccugcuggaggacaagcacaacggcaagcugugcaagcugagaggcguggccccccugcaccugggcaagugcaacaucgccggcuggauccugggcaaccccgagugcgagagccugagcaccgccagcagcuggagcuacaucguggagaccagcagcagcgacaacggcaccugcuaccccggcgacuucaucgacuacgaggagcugagagagcagcugagcagcgugagcagcuucgagagauucgagaucuuccccaagaccagcagcuggcccaaccacgacagcaacaagggcgugaccgccgccugcccccacgccggcgccaagagcuucuacaagaaccugaucuggcuggugaagaagggcaacagcuaccccaagcugagcaagagcuacaucaacgacaagggcaaggaggugcuggugcuguggggcauccaccaccccagcaccagcgccgaccagcagagccuguaccagaacgccgacgccuacguguucgugggcaccagcagauacagcaagaaguucaagcccgagaucgccaucagacccaaggugagagaccaggagggcagaaugaacuacuacuggacccugguggagcccggcgacaagaucaccuucgaggccaccggcaaccugguggugcccagauacgccuucgccauggagagaaacgccggcagcggcaucaucaucagcgacacccccgugcacgacugcaacaccaccugccagacccccaagggcgccaucaacaccagccugcccuuccagaacauccaccccaucaccaucggcaagugccccaaguacgugaagagcaccaagcugagacuggccaccggccugagaaacgugcccagcauccagagcagaggccuguucggcgccaucgccggcuucaucgagggcggcuggaccggcaugguggacggcugguacggcuaccaccaccagaacgagcagggcagcggcuacgccgccgaccugaagagcacccagaacgccaucgacgagaucaccaacaaggugaacagcgugaucgagaagaugaacacccaguucaccgccgugggcaaggaguucaaccaccuggagaagagaaucgagaaccugaacaagaagguggacgacggcuuccuggacaucuggaccuacaacgccgagcugcuggugcugcuggagaacgagagaacccuggacuaccacgacagcaacgugaagaaccuguacgagaaggugagaagccagcugaagaacaacgccaaggagaucggcaacggcugcuucgaguucuaccacaagugcgacaacaccugcauggagagcgugaagaacggcaccuacgacuaccccaaguacagcgaggaggccaagcugaacagagaggagaucgacggcgugaagcuggagagcaccagaaucuaccagauccuggccaucuacagcaccguggccagcagccuggugcugguggugagccugggcgccaucagcuucuggaugugcagcaacggcagccugcagugcagaaucugcaucuga

SEQ ID NO: 165400 - RNA, 1701 nt, Artificial Sequence; identical to SEQ ID NO: 162729
  derived and/or modified CDS sequence (opt4) from hemagglutinin__InfluenzaA__ADK90199

SEQ ID NO: 165401 - RNA, 1701 nt, Artificial Sequence
  derived and/or modified CDS sequence (opt4) from hemagglutinin__InfluenzaA__ADK90200
augaaggccauccugguggugcugcuguacaccuucgccaccgccaacgccgacacccugugcaucggcuaccacgccaacaacagcaccgacaccguggacaccgugcuggagaagaacgugaccgugacccacagcgugaaccugcuggaggacaagcacaacggcaagcugugcaagcugagaggcguggccccccugcaccugggcaagugcaacaucgccggcuggauccugggcaaccccgagugcgagagccugagcaccgccagcagcuggagcuacaucguggagaccagcagcagcgacaacggcaccugcuaccccggcgacuucaucgacuacgaggagcugagagagcagcugagcagcgugagcagcuucgagagauucgagaucuuccccaagaccagcagcuggcccaaccacgacagcaacaagggcgugaccgccgccugcccccacgccggcgccaagagcuucuacaagaaccugaucuggcuggugaagaagggcaacagcuaccccaagcugagcaagagcuacaucaacgacaagggcaaggaggugcuggugcuguggggcauccaccaccccagcaccagcgccgaccagcagagccuguaccagaacgccgacgccuacguguucgugggcaccagcagauacagcaagaaguucaagcccgagaucgccaucagacccaaggugagagaccaggagggcagaaugaacuacuacuggacccugguggagcccggcgacaagaucgccuucgaggccaccggcaaccugguggugcccagauacgccuucgccauggagagaaacgccggcagcggcaucaucaucagcgacacccccgugcacgacugcaacaccaccugccagacccccaagggcgccaucaacaccagccugcccuuccagaacauccaccccaucaccaucggcaagugccccaaguacgugaagagcaccaagcugagacuggccaccggccugagaaacgugcccagcauccagagcagaggccuguucggcgccaucgccggcuucaucgagggcggcuggaccggcaugguggacggcugguacggcuaccaccaccagaacgagcagggcagcggcuacgccgccgaccugaagagcacccagaacgccaucgacgagaucaccaacaaggugaacagcgugaucgagaagaugaacacccaguucaccgccgugggcaaggaguucaaccaccuggagaagagaaucgagaaccugaacaagaagguggacgacggcuuccuggacaucuggaccuacaacgccgagcugcuggugcugcuggagaacgagagaacccuggacuaccacgacagcaacgugaagaaccuguacgagaaggugagaagccagcugaagaacaacgccaaggagaucggcaacggcugcuucgaguucuaccacaagugcgacaacaccugcauggagagcgugaagaacggcaccuacgacuaccccaaguacagcgaggaggccaagcugaacagagaggagaucgacggcgugaagcuggagagcaccagaaucuaccagauccuggccguguacagcaccguggccagcagccuggugcugguggugagccugggcgccaucagcuucuggaugugcagcaacggcagccugcagugcagaaucugcaucuga

SEQ ID NO: 165402 - RNA, 1701 nt, Artificial Sequence
  derived and/or modified CDS sequence (opt4) from hemagglutinin__InfluenzaA__ADK90201
augaaggccauccugguggugcugcuguacaccuucgccaccgccaacgccgacacccugugcaucggcuaccacgccaacaacagcaccgacaccguggacaccgugcuggagaagaacgugaccgugacccacagcgugaaccugcuggaggacaagcacaacggcaagcugugcaagcugagaggcguggccccccugcaccugggcaagugcaacaucgccggcuggauccugggcaaccccgagugcgagagccugagcaccgccagcagcuggagcuacaucguggagaccagcagcagcgacaacggcaccugcuaccccggcgacuucaucgacuacgaggagcugagagagcagcugagcagcgugagcagcuucgagagauucgagaucuuccccaagaccagcagcuggcccaaccacgacagcaacaagggcgugaccgccgccugcccccacgccggcgccaagagcuucuacaagaaccugaucuggcuggugaagaagggcaacagcuaccccaagcugagcaagagcuacaucaacgacaagggcaaggaggugcuggugcuguggggcauccaccaccccagcaccagcgccgaccagcagagccuguaccagaacgccgacgccuacguguucgugggcaccagcagauacagcaagaaguucaagcccgagaucgccgugagacccaaggugagagaccaggagggcagaaugaacuacuacuggacccugguggagcccggcgacaagaucaccuucgaggccaccggcaaccugguggugcccagauacgccuucgccauggagagaaacgccggcagcggcaucaucaucagcgacacccccgugcacgacugcaacaccaccugccagacccccaagggcgccaucaacaccagccugcccuuccagaacauccaccccaucaccaucggcaagugccccaaguacgugaagagcaccaagcugagacuggccaccggccugagaaacgugcccagcauccagagcagaggccuguucggcgccaucgccggcuucaucgagggcggcuggaccggcaugguggacggcugguacggcuaccaccaccagaacgagcagggcagcggcuacgccgccgaccugaagagcacccagaacgccaucgacgagaucaccaacaaggugaacagcgugaucgagaagaugaacacccaguucaccgccgugggcaaggaguucaaccaccuggagaagagaaucgagaaccugaacaagaagguggacgacggcuuccuggacaucuggaccuacaacgccgagcugcuggugcugcuggagaacgagagaacccuggacuaccacgacagcaacgugaagaaccuguacgagaaggugagaagccagcugaagaacaacgccaaggagaucggcaacggcugcuucgaguucuaccacaagugcgacaacaccugcauggagagcgugaagaacggcaccuacgacuaccccaaguacagcgaggaggccaagcugaacagagaggagaucgacggcgugaagcuggagagcaccagaaucuaccagauccuggccaucuacagcaccguggccagcagccuggugcugguggugagccugggcgccaucagcuucuggaugugcagcaacggcagccugcagugcagaaucugcaucuga

SEQ ID NO: 165403 - RNA, 1701 nt, Artificial Sequence
  derived and/or modified CDS sequence (opt4) from hemagglutinin__InfluenzaA__ADK90202
augaaggccauccugguggugcugcuguacaccuucgccaccgccaacgccgacacccugugcaucggcuaccacgccaacaacagcaccgacaccguggacaccgugcuggagaagaacgugaccgugacccacagcgugaaccugcuggaggacaagcacaacggcaagcugugcaagcugagaggcguggccccccugcaccugggcaagugcaacaucgccggcuggauccugggcaaccccgagugcgagccccugagcaccgccagcagcuggagcuacaucguggagaccagcagcagcgacaacggcaccugcuaccccggcgacuucaucgacuacgaggagcugagagagcagcugagcagcgugagcagcuucgagagacuggagaucuuccccaagaccagcagcuggcccaaccacgacagcaacaagggcgugaccgccgccugcccccacgccggcgccaagagcuucuacaagaaccugaucuggcuggugaagaagggcaacagcuaccccaagcugagcaagagcuacaucaacgacaagggcaaggaggugcuggugcuguggggcauccaccaccccagcaccagcgccgaccagcagagccuguaccagaacgccgacgccuacguguucgugggcaccagcagauacagcaagaaguucaagcccgagaucgccaucagacccaaggugagagaccaggagggcagaaugaacuacuacuggacccugguggagcccggcgacaagaucaccuucgaggccaccggcaaccugguggugcccagauacgccuucgccauggagagaaacgccggcagcggcaucaucaucagcgacacccccgugcacgacugcaacaccaccugccagacccccaacggcgccaucaacaccagccugcccuuccagaacauccaccccaucaccaucggcaagugccccaaguacgugaagagcaccaagcugagacuggccaccggccugagaaacgugcccagcauccagagcagaggccuguucggcgccaucgccggcuucaucgagggcggcuggaccggcaugguggacggcugguacggcuaccaccaccagaacgagcagggcagcggcuacgccgccgaccugaagagcacccagaacgccaucgacgagaucaccaacaaggugaacagcgugaucgagaagaugaacacccaguucaccgccgugggcaaggaguucaaccaccuggagaagagaaucgagaaccugaacaagaagguggacgacggcuuccuggacaucuggaccuacaacgccgagcugcuggugcugcuggagaacgagagaacccuggacuaccacgacagcaacgugaagaaccuguacgagaaggugagaagccagcugaagaacaacgccaaggagaucggcaacggcugcuucgaguucuaccacaagugcgacaacaccugcauggagagcgugaagaacggcaccuacgacuaccccaaguacagcgaggaggccaagcugaacagagaggagaucgacggcgugaagcuggagagcaccagaaucuaccagauccuggccaucuacagcaccguggccagcagccuggugcugguggugagccugggcgccaucagcuucuggaugugcagcaacggcagccugcagugcagaaucugcaucuga

SEQ ID NO: 165404 - RNA, 1701 nt, Artificial Sequence; identical to SEQ ID NO: 162909
  derived and/or modified CDS sequence (opt4) from hemagglutinin__InfluenzaA__ADK90203

SEQ ID NO: 165405 - RNA, 1701 nt, Artificial Sequence; identical to SEQ ID NO: 163830
  derived and/or modified CDS sequence (opt4) from hemagglutinin__InfluenzaA__ADK90204

SEQ ID NO: 165406 - RNA, 1701 nt, Artificial Sequence
  derived and/or modified CDS sequence (opt4) from hemagglutinin__InfluenzaA__ADK94191
augaagaccaucaucgcccugagcuacauccugugccugguguucgcccagaagcugcccggcaacgacaacagcaccgccacccugugccugggccaccacgccgugcccaacggcaccguggugaagaccaucaccaacgaccagaucgaggugaccaacgccaccgagcuggugcagagcagcagcaccggcgagaucugcgacagcccccaccagauccuggacggcaagaacugcacccugaucgacgcccugcugggcgacccccagugcgacggcuuccagaacaagaagugggaccuguucguggagagaagcaaggccuacagcaacugcuaccccuacgacgugcccgacuacgccagccugagaagccugguggccagcagcggcacccuggaguucaacaacgagagcuucaacuggaccggcgugacccagaacggcaccagcagcgccugcaucagaagaagcaagaacagcuucuucagcagacugaacuggcugacccaccugaacuucaaguaccccgcccugaacgugaccaugcccaacaacgagcaguucgacaagcuguacaucuggggcgugcaccaccccggcaccgacaaggaccagaucuuccuguacgcccaggccagcggcagaaucaccgugagcaccaagagaagccagcagaccgugauccccaacaucggcagcagacccagagugagaaacauccccagcagagugagcaucuacuggaccaucgugaagcccggcgacauccugcugaucaacagcaccggcaaccugaucgcccccagaggcuacuucaagaucagaagcggcaagagcagcaucaugagaagcgacgcccccaucggcaagugcaacagcgagugcaucacccccaacggcagcauccccaacgacaagcccuuccagaacgugaacagaaucaccuacggcgccugccccagauacgugaagcagaacacccugaagcuggccaccggcaugagaaacgugcccgagaagcagaccagaggcaucuucggcgccaucgccggcuucaucgagaacggcugggagggcaugguggacggcugguacggcuucagacaccagaacagcgagggcagaggccaggccgccgaccugaagagcacccaggccgccaucgaccagaucaacggcaagcugaacagacugaucggcaagaccaacgagaaguuccaccagaucgagaaggaguucagcgagguggagggcagaauccaggaccuggagaaguacguggaggacaccaagaucgaccuguggagcuacaacgccgagcugcugguggcccuggagaaccagcacaccaucgaccugaccgacagcgagaugaacaagcuguucgagaagaccaagaagcagcugagagagaacgccgaggacaugggcaacggcugcuucaagaucuaccacaagugcgacaacgccugcaucggcagcaucagaaacggcaccuacgaccacgacguguacagagacgaggcccugaacaacagauuccagaucaagggcguggagcugaagagcggcuacaaggacuggauccuguggaucagcuucgccaucagcugcuuccugcugugcguggcccugcugggcuucaucaugugggccugccagaagggcaacaucagaugcaacaucugcaucuga

SEQ ID NO: 165407 - RNA, 1701 nt, Artificial Sequence
  derived and/or modified CDS sequence (opt4) from hemagglutinin__InfluenzaA__ADK94202
augaagaccaucaucgcccugagcuacauccugugccugguguucgcccagaagcugcccggcaacgacaacagcaccgccacccugugccugggccaccacgccgugcccaacggcaccaucgugaagaccaucaccaacgaccagaucgaggugaccaacgccaccgagcuggugcagagcagcagcaccggcgagaucugcgacagcccccaccagauccuggacggcgagaacugcacccugaucgacgcccugcugggcgacccccagugcgacggcuuccagaacaagaagugggaccuguucguggagagaagcaaggccuacagcaacugcuaccccuacgacgugcccgacuacgccagccugagaagccugaucgccagcagcggcacccuggaguucaacaacgagagcuucaacuggaccggcgugacccagaacggcaccagcagcgccugcaucagaagaagcaacaacagcuucuucagcagacugaacuggcugacccaccugaaguucaaguaccccgcccugaacgugaccaugcccaacaacgagcaguucgacaagcuguacaucuggggcgugcaccaccccggcaccgacaacgaccagaucuuccuguacgcccaggccagcggcagaaucaccgugagcaccaagagaagccagcagaccgugauccccaacaucggcagcagacccagagugagaaacauccccagcagaaucagcaucuacuggaccaucgugaagcccggcgacauccugcugaucaacagcaccggcaaccugaucgcccccagaggcuacuucaagaucagaagcggcaagagcagcaucaugagaagcgacgcccccaucggcaagugcaacagcgagugcaucacccccaacggcagcauccccaacgacaagcccuuccagaacgugaacagaaucaccuacggcgccugccccagauacgugaagcagaacacccugaagcuggccaccggcaugagaaacgugcccgagaagcagaccagaggcaucuucggcgccaucgccggcuucaucgagaacggcugggagggcaugguggacggcugguacggcuucagacaccagaacagcgagggcagaggccaggccgccgaccugaagagcacccaggccgccaucgaccagaucaacggcaagcugaacagacugaucggcaagaccaacgagaaguuccaccagaucgagaaggaguucagcgagguggagggcagaauccaggaccuggagaaguacguggaggacaccaagaucgaccuguggagcuacaacgccgagcugcugguggcccuggagaaccagcacaccaucgaccugaccgacagcgagaugaacaagcuguucgagaagaccaagaagcagcugagagagaacgccgaggacaugggcaacggcugcuucaagaucuaccacaagugcgacaacgccugcaucggcagcaucagaaacggcaccuacgaccacgacguguacagagacgaggcccugaacaacagauuccagaucaagggcguggagcugaagagcggcuacaaggacuggauccuguggaucagcuucgccaucagcugcuuccugcugugcguggcccugcugggcuucaucaugugggccugccagaagggcaacaucagaugcaacaucugcaucuga

SEQ ID NO: 165408 - RNA, 1701 nt, Artificial Sequence; identical to SEQ ID NO: 162494
  derived and/or modified CDS sequence (opt4) from hemagglutinin__InfluenzaA__ADK94213

SEQ ID NO: 165409 - RNA, 1701 nt, Artificial Sequence; identical to SEQ ID NO: 163673
  derived and/or modified CDS sequence (opt4) from hemagglutinin__InfluenzaA__ADK94224

SEQ ID NO: 165410 - RNA, 1701 nt, Artificial Sequence
  derived and/or modified CDS sequence (opt4) from hemagglutinin__InfluenzaA__ADK94257
auggagaccaucaucgcccugagcuacauccugugccugguguucgcccagaagcugcccggcaacgacaacagcaccgccacccugugccugggccaccacgccgugcccaacggcaccaucgugaagaccaucaccaacgaccagaucgaggugaccaacgccaccgagcuggugcagagcagcagcaccggcgagaucugcgacagcccccaccagauccuggacggcaagaacugcacccugaucgacgcccugcugggcgacccccagugcgacggcuuccagaacaagaagugggaccuguucguggagagaagcaaggccuacagcaacugcuaccccuacgacgugcccgacuacgccagccugagaagccugguggccagcagcggcacccuggaguucaacaacgagagcuucaacuggaccggcgugacccagaacggcaccagcagcgccugcaucagaagaagcaagaacagcuucuucagcagacugaacuggcugacccaccugaacuucaaguaccccgcccugaacgugaccaugcccaacaacgagcaguucgacaagcuguacaucuggggcgugcaccaccccggcaccgacaaggaccagaucuuccuguacgcccaggccagcggcagaaucaccgugagcaccaagagaagccagcagaccgugauccccaacaucggcagcagacccagagugagaaacauccccagcagaaucagcaucuacuggaccaucgugaagcccggcgacauccugcugaucaacagcaccggcaaccugaucgcccccagaggcuacuucaagaucagaagcggcaagagcagcaucaugagaagcgacgcccccaucggcaagugcaacagcgagugcaucacccccaacggcagcauccccaacgacaagcccuuccagaacgugaacagaaucaccuacggcgccugccccagauacgugaagcagagcacccugaagcuggccaccggcaugagaaacgugcccgagaagcagaccagaggcaucuucggcgccaucgccggcuucaucgagaacggcugggagggcaugguggacggcugguacggcuucagacaccagaacagcgagggcagaggccaggccgccgaccugaagagcacccaggccgccaucgaccagaucaacggcaagcugaacagacugaucggcaagaccaacgagaaguuccaccagaucgagaaggaguucagcgagguggagggcagaauccaggaccuggagaaguacguggaggacaccaagaucgaccuguggagcuacaacgccgagcugcugguggcccuggagaaccagcacaccaucgaccugaccgacagcgagaugaacaagcuguucgagaagaccaagaagcagcugagagagaacgccgaggacaugggcaacggcugcuucaagaucuaccacaagugcgacaacgccugcaucggcagcaucagaaacggcaccuacgaccacgacguguacagagacgaggcccugaacaacagauuccagaucaagggcguggagcugaagagcggcuacaaggacuggauccuguggaucagcuucgccaucagcugcuuccugcugugcguggcccugcugggcuucaucaugugggccugccagaagggcaacaucagaugcaacaucugcaucuga

SEQ ID NO: 165411 - RNA, 1701 nt, Artificial Sequence
  derived and/or modified CDS sequence (opt4) from hemagglutinin__InfluenzaA__ADK94268
augaagaccaucaucgcccugagcuacauccugugccugguguucgcccagaagcugcccggcaacgacaacagcaccgccacccugugccugggccaccacgccgugcccaacggcaccaucgugaagaccaucaccaacgaccagaucgaggugaccaacgccaccgagcuggugcagagcagcagcaccggcgagaucugcgacagcccccaccagauccuggacggcaagaacugcacccugaucgacgcccugcugggcgacccccagugcgacggcuuccagaacaagaagugggaccuguucguggagagaagcaaggccuacagcaacugcuaccccuacgacgugcccgacuacgccagccugagaagccugguggccagcagcggcacccuggaguucaacaacgagagcuucaacuggaccggcgugacccagaacggcaccagcagcgccugcaucagaagaagcaagaacagcuucuucagcagacugaacuggcugacccaccugaacuucaaguaccccgcccugaacgugaccaugcccaacaacgagcaguucgacaagcuguacaucuggggcgugcaccaccccggcaccgacaaggaccagaucuuccuguacgcccaggccagcggcagaaucaccgugagcaccaagagaagccagcagaccgugauccccaacaucggcagcagacccagagugagaaacauccccagcagaaucagcaucuacuggaccaucgugaagcccggcgacauccugcugaucaacagcaccggcaaccugaucgcccccagaggcuacuucaagaucagaagcggcaagagcagcaucaugagaagcgacgcccccaucggcaagugcaacagcgagugcaucacccccaacggcagcauccccaacgacaagcccuuccagaacgugaacagaaucaccuacggcgccugccccagauacgugaagcagagcacccugaagcuggccaccggcaugagaaacgugcccgagaagcagaccagaggcaucuucggcgccaucgccggcuucaucgagaacggcugggagggcaugguggacggcugguacggcuucagacaccagaacagcgagggcagaggccaggccgccgaccugaagagcacccaggccgccaucgaccagaucaacggcaagcugaacagacugaucggcaagaccaacgagaaguuccaccagaucgagaaggaguucagcgagguggagggcagaauccaggaccuggagaaguacguggaggacaccaagaucgaccuguggagcuacaacgccgagcugcugguggcccuggagaaccagcacaccaucgaccugaccgacagcgagaugaacaagcuguucgagaagaccaagaagcagcugagagagaacgccgaggacaugggcaacggcugcuucaagaucuaccacaagugcgacaacgccugcaucggcagcaucagaaacggcaccuacgaccacgacguguacagagacgaggcccugaacaacagauuccagaucaagggcguggagcugaagagcggcuacaaggacuggauccuguggaucagcuucgccaucagcugcuuccugcugugcguggcccugcugggcuucaucaugugggccugccagaagggcaacaucagaugcaacaucugcaucuga

SEQ ID NO: 165412 - RNA, 1701 nt, Artificial Sequence
  derived and/or modified CDS sequence (opt4) from hemagglutinin__InfluenzaA__ADK94279
augaagaccaucaucgcccugagcuacauccugugccugguguucgcccagaagcugcccggcaacgacaacagcaccgccacccugugccugggccaccacgccgugcccaacggcaccaucgugaagaccaucaccaacgaccagaucgaggugaccaacgccaccgagcuggugcagagcagcagcaccggcgagaucugcaacagcccccaccagauccuggacggcgagaacugcacccugaucgacgcccugcugggcgacccccagugcgacggcuuccagaacaagaagugggaccuguucguggagagaagcaaggccuacagcaacugcuaccccuacgacgugcccgacuacgccagccugagaagccugguggccagcagcggcacccuggaguucaacaacgagagcuucaacuggaccggcgugacccagaacggcaccagcagcgccugcaucagaagaagcaacaacagcuucuucagcagacugaacuggcugacccaccugaaguucaaguaccccgcccugaacgugaccaugcccaacaacgagcaguucgacaagcuguacaucuggggcgugcaccaccccggcaccgacaacgaccagaucuuccuguacgcccaggccagcggcagaaucaccgugagcaccaagagaagccagcagaccgugauccccaacaucggcagcagacccagagugagaaacauccccagcagaaucagcaucuacuggaccaucgugaagcccggcgacauccugcugaucaacagcaccggcaaccugaucgcccccagaggcuacuucaagaucagaagcggcaagagcagcaucaugagaagcgacgcccccaucggcaagugcaacagcgagugcaucacccccaacggcagcauccccaacgacaagcccuuccagaacgugaacagaaucaccuacggcgccugccccagauacgugaagcagaacacccugaagcuggccaccggcaugagaaacgugcccgagaagcagaccagaggcaucuucggcgccaucgccggcuucaucgagaacggcugggagggcaugguggacggcugguacggcuucagacaccagaacagcgagggcagaggccaggccgccgaccugaagagcacccaggccgccaucgaccagaucaacggcaagcugaacagacugaucggcaagaccaacgagaaguuccaccagaucgagaaggaguucagcgagguggagggcagaauccaggaccuggagaaguacguggaggacaccaagaucgaccuguggagcuacaacgccgagcugcugguggcccuggagaaccagcacaccaucgaccugaccgacagcgagaugaacaagcuguucgagaagaccaagaagcagcugagagagaacgccgaggacaugggcaacggcugcuucaagaucuaccacaagugcgacaacgccugcaucggcagcaucagaaacggcaccuacgaccacgacguguacagagacgaggcccugaacaacagauuccagaucaagggcguggagcugaagagcggcuacaaggacuggauccuguggaucagcuucgccaucagcugcuuccugcugugcguggcccugcugggcuucaucaugugggccugccagaagggcaacaucagaugcaacaucugcaucuga

SEQ ID NO: 165413 - RNA, 1701 nt, Artificial Sequence; identical to SEQ ID NO: 163673
  derived and/or modified CDS sequence (opt4) from hemagglutinin__InfluenzaA__ADK94290

SEQ ID NO: 165414 - RNA, 1701 nt, Artificial Sequence; identical to SEQ ID NO: 163673
  derived and/or modified CDS sequence (opt4) from hemagglutinin__InfluenzaA__ADK94301

SEQ ID NO: 165415 - RNA, 1701 nt, Artificial Sequence
  derived and/or modified CDS sequence (opt4) from hemagglutinin__InfluenzaA__ADK94323
augaagaccaucaucgcccugagcuacauccugugccugguguucgcccagaagcugcccggcaacgacaacagcaccgccacccugugccugggccaccacgccgugcccaacggcaccaucgugaagaccaucaccaacgaccagaucgaggugaccaacgccaccgagcuggugcagagcagcagcaccggcgagaucugcgacagcccccaccagauccuggacggcaagaacugcacccugaucgacgcccugcugggcgacccccagugcgacggcuuccagaacaagaagugggaccuguucguggagagaagcaaggccuacagcaacugcuaccccuacgacgugcccgacuacgccagccugagaagccugguggccagcagcggcacccuggaguucaacaacgagagcuucaacuggaccggcgugacccagaacggcaccagcagcgccugcaucagaagaagcaagaacagcuucuucagcagacugaacuggcugacccaccugaacuucaaguaccccgcccugaacgugaccaugcccaacaacgagcaguucgacaagcuguacaucuggggcgugcaccaccccggcaccgacaaggaccagaucuuccuguacgcccaggccagcggcagaaucaccgugagcaccaagagaagccagcagaccgugauccccaacaucggcagcagacccagaaucagaaacauccccagcagaaucagcaucuacuggaccaucgugaagcccggcgacauccugcugaucaacagcaccggcaaccugaucgcccccagaggcuacuucaagaucagaagcggcaagagcagcaucaugagaagcgacgcccccaucggcaagugcaacagcgagugcaucacccccaacggcagcauccccaacgacaagcccuuccagaacgugaacagaaucaccuacggcgccugccccagauacgugaagcagaacacccugaagcuggccaccggcaugagaaacgugcccgagaagcagaccagaggcaucuucggcgccaucgccggcuucaucgagaacggcugggagggcaugguggacggcugguacggcuucagacaccagaacagcgagggcagaggccaggccgccgaccugaagagcacccaggccgccaucgaccagaucaacggcaagcugaacagacugaucggcaagaccaacgagaaguuccaccagaucgagaaggaguucagcgagguggagggcagaauccaggaccuggagaaguacguggaggacaccaagaucgaccuguggagcuacaacgccgagcugcugguggcccuggagaaccagcacaccaucgaccugaccgacagcgagaugaacaagcuguucgagaagaccaagaagcagcugagagagaacgccgaggacaugggcaacggcugcuucaagaucuaccacaagugcgacaacgccugcaucggcagcaucagaaacggcaccuacgaccacgacguguacagagacgaggcccugaacaacagauuccagaucaagggcguggagcugaagagcggcuacaaggacuggauccuguggaucagcuucgccaucagcugcuuccugcugugcguggcccugcugggcuucaucaugugggccugccagaagggcaacaucagaugcaacaucugcaucuga

SEQ ID NO: 165416 - RNA, 1701 nt, Artificial Sequence; identical to SEQ ID NO: 165406
  derived and/or modified CDS sequence (opt4) from hemagglutinin__InfluenzaA__ADK94441

SEQ ID NO: 165417 - RNA, 1701 nt, Artificial Sequence
  derived and/or modified CDS sequence (opt4) from hemagglutinin__InfluenzaA__ADK94476
augaagaccaucaucgcccugagcuacauccugugccugguguucgcccagaagcugcccggcaacgacaacagcaccgccacccugugccugggccaccacgccgugcccaacggcaccaucgugaagaccaucaccaacgaccagaucgaggugaccaacgccaccgagcuggugcagagcagcagcaccggcgagaucugcgacagcccccaccagauccuggacggcaagaacugcacccugaucgacgcccugcugggcgacccccagugcgacggcuuccagaacaagaagugggaccuguucguggagagaagcaaggcccacagcaacugcuaccccuacgacgugcccgacuacgccagccugagaagccugguggccagcagcggcacccuggaguucaacaacgagagcuucaacuggaccggcgugacccagaacggcaccagcagcgccugcaucagaagaagcaagaacagcuucuucagcagacugaacuggcugacccaccugaacuucaaguaccccgcccugaacgugaccaugcccaacaacgagcaguucgacaagcuguacaucuggggcgcccaccaccccggcaccgacaaggaccagaucuuccuguacgcccaggccagcggcagaaucaccgugagcaccaagagaagccagcagaccgugauccccaacaucggcagcagacccagagugagaaacauccccagcagaaucagcaucuacuggaccaucgugaagcccggcgacauccugcugaucaacagcaccggcaaccugaucgcccccagaggcuacuucaagaucagaagcggcaagagcagcaucaugagaagcgacgcccccaucggcaagugcaacagcgagugcaucacccccaacggcagcauccccaacgacaagcccuuccagaacgugaacagaaucaccuacggcgccugccccagauacgugaagcagaacacccugaagcuggccaccggcaugagaaacgugcccgagaagcagaccagaggcaucuucggcgccaucgccggcuucaucgagaacggcugggagggcaugguggacggcugguacggcuucagacaccagaacagcgagggcagaggccaggccgccgaccugaagagcacccaggccgccaucgaccagaucaacggcaagcugaacagacugaucggcaagaccaacgagaaguuccaccagaucgagaaggaguucagcgagguggagggcagaauccaggaccuggagaaguacguggaggacaccaagaucgaccuguggagcuacaacgccgagcugcugguggcccuggagaaccagcacaccaucgaccugaccgacagcgagaugaacaagcuguucgagaagaccaagaagcagcugagagagaacgccgaggacaugggcaacggcugcuucaagaucuaccacaagugcgacaacgccugcaucggcagcaucagaaacggcaccuacgaccacgacguguacagagacgaggcccugaacaacagauuccagaucaagggcguggagcugaagagcggcuacaaggacuggauccuguggaucagcuucgccaucagcugcuuccugcugugcguggcccugcugggcuucaucaugugggccugccagaagggcaacaucagaugcaacaucugcaucuga

SEQ ID NO: 165418 - RNA, 1701 nt, Artificial Sequence; identical to SEQ ID NO: 163673
  derived and/or modified CDS sequence (opt4) from hemagglutinin__InfluenzaA__ADK94487

SEQ ID NO: 165419 - RNA, 1701 nt, Artificial Sequence
  derived and/or modified CDS sequence (opt4) from hemagglutinin__InfluenzaA__ADK94498
augaagaccaucaucgcccugagcuacauccugugccugguguucgcccagaagcugcccggcaacgacaacagcaccgccacccugugccugggccaccacgccgugcccaacggcaccguggugaagaccaucaccaacgaccagaucgaggugaccaacgccaccgagcuggugcagagcagcagcaccggcgagaucugcgacagcccccaccagauccuggacggcaagaacugcacccugaucgacgcccugcugggcgacccccagugcgacggcuuccagaacaagaagugggaccuguucguggagagaagcaaggccuacagcaacugcuaccccuacgacgugcccgacuacgccagccugagaagccugguggccagcagcggcacccuggaguucaacaacgagagcuucaacuggaccggcgugacccagaacggcaccagcagcgccugcaucagaagaagcaagaacagcuucuucagcagacugaacuggcugacccaccugaacuucaaguaccccgcccugaacgugaccaugcccaacaacgagcaguucgacaagcuguacaucuggggcgugcaccaccccggcaccgacaaggaccagaucuuccuguacgcccaggccagcggcagaaucaccgugagcaccaagagaagccagcagaccgugauccccaacaucggcagcagacccagagugagaaacauccccagcagaaucagcaucuacuggaccaucgugaagcccggcgacauccugcugaucaacagcaccggcaaccugaucgcccccagaggcuacuucaagaucagaagcggcaagagcagcaucaugagaagcgacgcccccaucggcaagugcaacagcgagugcaucacccccaacggcagcauccccaacgacaagcccuuccagaacgugaacagaaucaccuacggcgccugccccagauacgugaagcagaacacccugaagcuggccaccggcaugagaaacgugcccgagaagcagaccagaggcaucuucggcgccaucgccggcuucaucgagaacggcugggagggcaugguggacggcugguacggcuucagacaccagaacagcgagggcagaggccaggccgccgaccugaagagcacccaggccgccaucgaccagaucaacggcaagcugaacagacugaucggcaagaccaacgagaaguuccaccagaucgagaaggaguucagcgagguggagggcagaauccaggaccuggagaaguacguggaggacaccaagaucgaccuguggagcuacaacgccgagcugcugguggcccuggagaaccagcacaccaucgaccugaccgacagcgagaugaacaagcuguucgagaagaccaagaagcagcugagagagaacgccgaggacaugggcaacggcugcuucaagaucuaccacaagugcgacaacgccugcaucggcagcaucagaaacggcaccuacaaccacgacguguacagagacgaggcccugaacaacagauuccagaucaagggcguggagcugaagagcggcuacaaggacuggauccuguggaucagcuucgccaucagcugcuuccugcugugcguggcccugcugggcuucaucaugugggccugccagaagggcaacaucagaugcaacaucugcaucuga

SEQ ID NO: 165420 - RNA, 1701 nt, Artificial Sequence
  derived and/or modified CDS sequence (opt4) from hemagglutinin__InfluenzaA__ADK94509
augaagaccaucaucgcccugagcuacauccugugccugguguucgcccagaagcugcccggcaacgacaacagcaccgccacccugugccugggccaccacgccgugcccaacggcaccaucgugaagaccaucaccaacgaccagaucgaggugaccaacgccaccgagcuggugcagagcagcagcaccggcgagaucugcgacagcccccaccagauccuggacggcaagaacugcacccugaucgacgcccugcugggcgacccccagugcgacggcuuccagaacaagaagugggaccuguucguggagagaagcaaggccuacagcaacugcuaccccuacgacgugcccgacuacgccagccugagaagccugguggccagcagcggcacccuggaguucaacaacgagagcuucaacuggaccggcgugacccagaacggcaccagcagcgccugcaucagaagaagcaagaacagcuucuucagcagacugaacuggcugacccaccugaacuucaaguaccccgcccugaacgugaccaugcccaacaacgagcaguucgacaagcuguacaucuggggcgugcaccaccccggcaccgacaaggaccagaucuuccuguacgcccaggccagcggcagaaucaccgugagcaccaagagaagccagcagaccgccauccccaacaucggcagcagacccagagugagaaacauccccagcagaaucagcaucuacuggaccaucgugaagcccggcgacauccugcugaucaacagcaccggcaaccugaucgcccccagaggcuacuucaagaucagaagcggcaagagcagcaucaugagaagcgacgcccccaucggcaagugcaacagcgagugcaucacccccaacggcagcauccccaacgacaagcccuuccagaacgugaacagaaucaccuacggcgccugccccagauacaucaagcagaacacccugaagcuggccaccggcaugagaaacgugcccgagaagcagaccagaggcaucuucggcgccaucgccggcuucaucgagaacggcugggagggcaugguggacggcugguacggcuucagacaccagaacagcgagggcagaggccaggccgccgaccugaagagcacccaggccgccaucgaccagaucaacggcaagcugaacagacugaucggcaagaccaacgagaaguuccaccagaucgagaaggaguucagcgagguggagggcagaauccaggaccuggagaaguacguggaggacaccaagaucgaccuguggagcuacaacgccgagcugcugguggcccuggagaaccagcacaccaucgaccugaccgacagcgagaugaacaagcuguucgagaagaccaagaagcagcugagagagaacgccgaggacaugggcaacggcugcuucaagaucuaccacaagugcgacaacgccugcaucggcagcaucagaaacggcaccuacgaccacgacguguacagagacgaggcccugaacaacagauuccagaucaagggcguggagcugaagagcggcuacaaggacuggauccuguggaucagcuucgccaucagcugcuuccugcugugcguggcccugcugggcuucaucaugugggccugccagaagggcaacaucagaugcaacaucugcaucuga

SEQ ID NO: 165421 - RNA, 1701 nt, Artificial Sequence
  derived and/or modified CDS sequence (opt4) from hemagglutinin__InfluenzaA__ADK94520
augaagaccaucaucgcccugagcuacauccugugccugguguucgcccagaagcugcccggcaacgacaacagcaccgccacccugugccugggccaccacgccgugcccaacggcaccaucgugaagaccaucaccaacgaccagaucgaggugaccaacgccaccgagcuggugcagagcagcagcaccggcgagaucugcgacagcccccaccagauccuggacggcgagaacugcacccugaucgacgcccugcugggcgacccccagugcgacggcuuccagaacaagaagugggaccuguucguggagagaagcaaggccuacagcaacugcuaccccuacgacgugcccgacuacgccagccugagaagccugaucgccagcagcggcacccuggaguucaacaacgagagcuucaacuggaccggcgugacccagaacggcaccagcagcgccugcaucagaagaagcaacaacagcuucuucagcagacugaacuggcugacccaccugagauucaaguaccccgcccugaacgugaccaugcccaacaacgagcaguucgacaagcuguacaucuggggcgugcaccaccccggcaccgacaacgaccagaucuuccuguacgcccaggccagcggcagaaucaccgugagcaccaagagaagccagcagaccgugauccccaacaucggcagcagacccagagugagaaacauccccagcagaaucagcaucuacuggaccaucgugaagcccggcgacauccugcugaucaacagcaccggcaaccugaucgcccccagaggcuacuucaagaucagaagcggcaagagcagcaucaugagaagcgacgcccccaucggcaagugcaacagcgagugcaucacccccaacggcagcauccccaacgacaagcccuuccagaacgugaacagaaucaccuacggcgccugccccagauacgugaagcagaacacccugaagcuggccaccggcaugagaaacgugcccgagaagcagaccagaggcaucuucggcgccaucgccggcuucaucgagaacggcugggagggcaugguggacggcugguacggcuucagacaccagaacagcgagggcagaggccaggccgccgaccugaagagcacccaggccgccaucgaccagaucaacggcaagcugaacagacugaucggcaagaccaacgagaaguuccaccagaucgagaaggaguucagcgagguggagggcagaauccaggaccuggagaaguacguggaggacaccaagaucgaccuguggagcuacaacgccgagcugcugguggcccuggagaaccagcacaccaucgaccugaccgacagcgagaugaacaagcuguucgagaagaccaagaagcagcugagagagaacgccgaggacaugggcaacggcugcuucaagaucuaccacaagugcgacaacgccugcaucggcagcaucagaaacggcaccuacgaccacgacguguacagagacgaggcccugaacaacagauuccagaucaagggcguggagcugaagagcggcuacaaggacuggauccuguggaucagcuucgccaucagcugcuuccugcugugcguggcccugcugggcuucaucaugugggccugccagaagggcaacaucaagugcaacaucugcaucuga

SEQ ID NO: 165422 - RNA, 1701 nt, Artificial Sequence; identical to SEQ ID NO: 163673
  derived and/or modified CDS sequence (opt4) from hemagglutinin__InfluenzaA__ADK94531

SEQ ID NO: 165423 - RNA, 1701 nt, Artificial Sequence; identical to SEQ ID NO: 162494
  derived and/or modified CDS sequence (opt4) from hemagglutinin__InfluenzaA__ADK94542

SEQ ID NO: 165424 - RNA, 1701 nt, Artificial Sequence
  derived and/or modified CDS sequence (opt4) from hemagglutinin__InfluenzaA__ADK94553
augaagaccaucaucgcccugagcuacauccugugccugguguucgcccagaagcugcccggcaacgacaacagcaccgccacccugugccugggccaccacgccgugcccaacggcaccaucgugaagaccaucaccaacgaccagaucgaggugaccaacgccaccgagcuggugcagagcagcagcaccggcgagaucugcgacagcccccaccagauccuggacggcaagaacugcacccugaucgacgcccugcugggcgacccccagugcgacggcuuccagaacaagaagugggaccuguucguggagagaagcaaggccuacagcaacugcuaccccuacgacgugcccgacuacgccagccugagaagccugguggccagcagcggcacccuggaguucaacaacgagagcuucaacuggaccggcgugacccagaacggcaccagcagcgccugcaucagaagaagcaagaacagcuucuucagcagacugaacuggcugacccaccugaacuucaaguaccccgcccugaacgugaccaugcccaacaacgagcaguucgacaagcuguacaucuggggcgugcaccaccccggcaccgacaaggaccagaucuuccuguacgcccaggccagcggcagaaucaccgugagcaccaagagaagccagcagaccgugauccccaacaucggcagcagacccagagugagaaacauccccagcagaaucagcaucuacuggaccaucgugaagcccggcgacauccugcugaucaacagcaccggcaaccugaucgcccccagaggcuacuucaagaucagaagcggcaagagcagcaucaugagaagcgacgcccccaucggcaagugcaacagcgagugcaucacccccaacggcagcauccccaacgacaagcccuuccagaacgugaacagaaucaccuacggcgccugccccagauacgugaagcagagcacccugaagcuggccaccggcaugagaaacgugcccgagaagcagaccagaggcaucuucggcgccaucgccggcuucaucgagaacggcugggagggcaugguggacggcugguacggcuucagacaccagaacagcgagggcagaggccaggccgccgaccugaagagcacccaggccgccaucgaccagaucaacggcaagcugaacagacugaucggcaagaccaacgagaaguuccaccagaucgagaaggaguucagcgagguggagggcagaauccaggaccuggagaaguacguggaggacaccaagaucgaccuguggagcuacaacgccgagcugcugguggcccuggagaaccagcacaccaucgaccugaccgacagcgagaugaacaagcuguucgagaagaccaagaagcagcugagagagaacgccgaggacaugggcaacggcugcuucaagaucuaccacaagugcaacaacgccugcaucggcagcaucagaaacggcaccuacgaccacgacguguacagagacgaggcccugaacaacagauuccagaucaagggcguggagcugaagagcggcuacaaggacuggauccuguggaucagcuucgccaucagcugcuuccugcugugcguggcccugcugggcuucaucaugugggccugccagaagggcaacaucagaugcaacaucugcaucuga

SEQ ID NO: 165425 - RNA, 1701 nt, Artificial Sequence; identical to SEQ ID NO: 163673
  derived and/or modified CDS sequence (opt4) from hemagglutinin__InfluenzaA__ADK94564

SEQ ID NO: 165426 - RNA, 1701 nt, Artificial Sequence
  derived and/or modified CDS sequence (opt4) from hemagglutinin__InfluenzaA__ADK98501
augaaggccauccugguggugcugcuguacaccuucgccaccgccaacgccgacacccugugcaucggcuaccacgccaacaacagcaccgacaccguggacaccgugcuggagaagaacgugaccgugacccacagcgugaaccugcuggaggacaagcacaacggcaagcugugcaagcugagaggcguggccccccugcaccugggcaagugcaacaucgccggcuggauccugggcaaccccgagugcgagagccugagcaccgccagcagcuggagcuacaucguggagaccagcagcagcggcaacggcaccugcuaccccggcgacuucaucgacuacgaggagcugagagagcagcugagcagcgugagcagcuucgagagauucgagaucuuccccaagaccagcagcuggcccaaccacgacagcaacaagggcgugaccgccgccugcccccacgccggcgccaagagcuucuacaagaaccugaucuggcuggugaagaagggcaacagcuaccccaagcugagcaagagcuacaucaacgacaagggcaaggaggugcuggugcuguggggcauccaccaccccagcaccagcgccgaccagcagagccuguaccagaacgccgacgccuacguguucgugggcaccagcagauacagcaagaaguucaagcccgagaucgccaucagacccaaggugagagaccaggagggcagaaugaacuacuacuggacccugguggagcccggcgacaagaucaccuucgagaccaccggcaaccugguggugcccagauacgccuucgccauggagagaaacgccggcagcggcaucaucaucagcgacacccccgugcacgacugcaacaccaccugccagacccccaagggcgccaucaacaccagccugcccuuccagaacauccaccccaucaccaucggcaagugccccaaguacgugaagagcaccaagcugagacuggccaccggccugagaaacgugcccagcauccagagcagaggccuguucggcgccaucgccggcuucaucgagggcggcuggaccggcaugguggacggcugguacggcuaccaccaccagaacgagcagggcagcggcuacgccgccgaccugaagagcacccagaacgccaucgacgagaucaccaacaaggugaacagcgugaucgagaagaugaacacccaguucaccgccgugggcaaggaguucaaccaccuggagaagagaaucgagaaccugaacaagaagguggacgacggcuuccuggacaucuggaccuacaacgccgagcugcuggugcugcuggagaacgagagaacccuggacuaccacgacagcaacgugaagaaccuguacgagaaggugagaagccagcugaagaacaacgccaaggagaucggcaacggcugcuucgaguucuaccacaagugcgacaacaccugcauggagagcgugaagaacggcaccuacgacuaccccaaguacagcgaggaggccaagcugaacagagaggagaucgacggcgugaagcuggagagcaccagaaucuaccagauccuggccaucuacagcaccguggccagcagccuggugcugguggugagccugggcgccaucagcuucuggaugugcagcaacggcagccugcagugcagaaucugcaucuga

SEQ ID NO: 165427 - RNA, 1701 nt, Artificial Sequence
  derived and/or modified CDS sequence (opt4) from hemagglutinin__InfluenzaA__ADK98503
augaaggccauccugguggugcugcuguacaccuucgccaccgccaacgccgacacccugugcaucggcuaccacgccaacaacagcaccgacaccguggacaccgugcuggagaagaacgugaccgugacccacagcgugaaccugcuggaggacaagcacaacggcaagcugugcaagcugagaggcguggccccccugcaccugggcaagugcaacaucgccggcuggauccugggcaaccccgagugcgagagccugagcaccgccagcagcuggagcuacaucguggagaccagcagcagcgacaacggcaccugcuaccccggcgacuucaucgacuacgaggagcugagagagcagcugagcagcgugagcagcuucgagagauucgagaucuuccccaagaccagcagcuggcccaaccacgaccccaacaagggcgugaccgccgccugcccccacgccggcgccaagagcuucuacaagaaccugaucuggcuggugaagaagggcaacagcuaccccaagcugagcaagagcuacaucaacgacaagggcaaggaggugcuggugcuguggggcauccaccaccccagcaccagcgccgaccagcagagccuguaccagaacguggacgccuacguguucgugggcaccagcagauacagcaagaaguucaagcccgagaucgccaucagacccaaggugagagaccaggagggcagaaugaacuacuacuggacccugguggagcccggcgacaagaucaccuucgaggccaccggcaaccugguggugcccagauacgccuucgccauggagagaaacgccggcagcggcaucaucaucagcgacacccccgugcacgacugcaacaccaccugccagacccccaagggcgccaucaacaccagccugcccuuccagaacauccaccccaucaccaucggcaagugccccaaguacgugaagagcaccaagcugagacuggccaccggccugagaaacgugcccagcauccagagcagaggccuguucggcgccaucgccggcuucaucgagggcggcuggaccggcaugguggacggcugguacggcuaccaccaccagaacgagcagggcagcggcuacgccgccgaccugaagagcacccagaacgccaucgacgagaucaccaacaaggugaacagcgugaucgagaagaugaacacccaguucaccgccgugggcaaggaguucaaccaccuggagaagagaaucgagaaccugaacaagaagguggacgacggcuuccuggacaucuggaccuacaacgccgagcugcuggugcugcuggagaacgagagaacccuggacuaccacgacagcaacgugaagaaccuguacgagaaggugagaagccagcugaagaacaacgccaaggagaucggcaacggcugcuucgaguucuaccacaagugcgacaacaccugcauggagagcgugaagaacggcaccuacgacuaccccaaguacagcgaggaggccaagcugaacagagaggagaucgacggcgugaagcuggagagcaccagaaucuaccagauccuggccaucuacagcaccguggccagcagccuggugcugguggugagccugggcgccaucagcuucuggaugugcagcaacggcagccugcagugcagaaucugcaucuga

SEQ ID NO: 165428 - RNA, 1701 nt, Artificial Sequence; identical to SEQ ID NO: 165411
  derived and/or modified CDS sequence (opt4) from hemagglutinin__InfluenzaA__ADK98623

SEQ ID NO: 165429 - RNA, 1701 nt, Artificial Sequence; identical to SEQ ID NO: 162494
  derived and/or modified CDS sequence (opt4) from hemagglutinin__InfluenzaA__ADK98634

SEQ ID NO: 165430 - RNA, 1701 nt, Artificial Sequence; identical to SEQ ID NO: 162494
  derived and/or modified CDS sequence (opt4) from hemagglutinin__InfluenzaA__ADK98645

SEQ ID NO: 165431 - RNA, 1701 nt, Artificial Sequence; identical to SEQ ID NO: 165357
  derived and/or modified CDS sequence (opt4) from hemagglutinin__InfluenzaA__ADK98656

SEQ ID NO: 165432 - RNA, 1701 nt, Artificial Sequence; identical to SEQ ID NO: 165424
  derived and/or modified CDS sequence (opt4) from hemagglutinin__InfluenzaA__ADK98667

SEQ ID NO: 165433 - RNA, 1701 nt, Artificial Sequence
  derived and/or modified CDS sequence (opt4) from hemagglutinin__InfluenzaA__ADK98678
augaagaccaucaucgcccugagcuacauccugugccugguguucgcccagaagcugcccggcaacgacaacagcaccgccacccugugccugggccaccacgccgugcccaacggcaccaucgugaagaccaucaccaacgaccagaucgaggugaccaacgccaccgagcuggugcagagcagcagcaccggcgagaucugcgacagcccccaccagauccuggacggcgagaacugcacccugaucgacgcccugcugggcgacccccagugcgacggcuuccagaacaagaagugggaccuguucguggagagaagcaaggccuacagcaacugcuaccccuacgacgugcccgacuacgccagccugagaagccugguggccagcagcggcacccuggaguucaacaacgagagcuucaacuggaccggcgugacccagaacggcaccagcagcgccugcaucagaagaagcaacaacagcuucuucagcagacugaacuggcugacccaccugaaguucaaguaccccgcccugaacgugaccaugcccaacaacgagcaguucgacaagcuguacaucuggggcgugcaccaccccggcaccgacaacgaccagaucuuccuguacgcccaggccagcggcagaaucaccgugagcaccaagagaagccagcagaccgugauccccaacaucggcagcagacccagagugagaaacauccccagcagaaucagcaucuacuggaccaucgugaagcccggcgacauccugcugaucaacagcaccggcaaccugaucgcccccagaggcuacuucaagaucagaagcggcaagagcagcaucaugagaagcgacgcccccaucggcaagugcaacagcgagugcaucacccagaacggcagcauccccaacgacaagcccuuccagaacgugaacagaaucaccuacggcgccugccccagauacgugaagcagaacacccugaagcuggccaccggcaugagaaacgugcccgagaagcagaccagaggcaucuucggcgccaucgccggcuucaucgagaacggcugggagggcaugguggacggcugguacggcuucagacaccagaacagcgagggcagaggccaggccgccgaccugaagagcacccaggccgccaucgaccagaucaacggcaagcugaacagacugaucggcaagaccaacgagaaguuccaccagaucgagaaggaguucagcgagguggagggcagaauccaggaccuggagaaguacguggaggacaccaagaucgaccuguggagcuacaacgccgagcugcugguggcccuggagaaccagcacaccaucgaccugaccgacagcgagaugaacaagcuguucgagaagaccaagaagcagcugagagagaacgccgaggacaugggcaacggcugcuucaagaucuaccacaagugcgacaacgccugcaucggcagcaucagaaacggcaccuacgaccacgacguguacagagacgaggcccugaacaacagauuccagaucaagggcguggagcugaagagcggcuacaaggacuggauccuguggaucagcuucgccaucagcugcuuccugcugugcguggcccugcugggcuucaucaugugggccugccagaagggcaacaucagaugcaacaucugcaucuga

SEQ ID NO: 165434 - RNA, 1701 nt, Artificial Sequence; identical to SEQ ID NO: 162494
  derived and/or modified CDS sequence (opt4) from hemagglutinin__InfluenzaA__ADK98689

SEQ ID NO: 165435 - RNA, 1701 nt, Artificial Sequence; identical to SEQ ID NO: 162494
  derived and/or modified CDS sequence (opt4) from hemagglutinin__InfluenzaA__ADK98700

SEQ ID NO: 165436 - RNA, 1701 nt, Artificial Sequence; identical to SEQ ID NO: 162494
  derived and/or modified CDS sequence (opt4) from hemagglutinin__InfluenzaA__ADK98711

SEQ ID NO: 165437 - RNA, 1701 nt, Artificial Sequence
  derived and/or modified CDS sequence (opt4) from hemagglutinin__InfluenzaA__ADK98722
augaagaccaucaucgcccugagcuacauccugugccugguguucgcccagaagcugcccggcaacgacaacagcaccgccacccugugccugggccaccacgccgugcccaacggcaccaucgugaagaccaucaccaacgaccagaucgaggugaccaacgccaccgagcuggugcagagcagcagcaccggcgagaucugcgacagcccccaccagauccuggacggcgagaacugcacccugaucgacgcccugcugggcgacccccagugcgacggcuuccagaacaagaagugggaccuguucguggagagaagcaaggccuacagcaacugcuaccccuacgacgugcccgacuacgccagccugagaagccugguggccagcagcggcacccuggaguucaacaacgagagcuucaacuggaccggcgugacccagaacggcaccagcagcgccugcaucagaagaagcaacaacagcuucuucagcagacugaacuggcugacccaccugaaguucaaguaccccgcccugaacgugaccaugcccaacaacgagcaguucgacaagcuguacaucuggggcgugcaccaccccggcaccgacaacgaccagaucuuccuguacgcccaggccagcggcagaaucaccgugagcaccaagggcagccagcagaccgugauccccaacaucggcagcagacccagagugagaaacauccccagcagaaucagcaucuacuggaccaucgugaagcccggcgacauccugcugaucaacagcaccggcaaccugaucgcccccagaggcuacuucaagaucagaagcggcaagagcagcaucaugagaagcgacgcccccaucggcaagugcaacagcgagugcaucacccccaacggcagcauccccaacgacaagcccuuccagaacgugaacagaaucaccuacggcgccugccccagauacgugaagcagaacacccugaagcuggccaccggcaugagaaacgugcccgagaagcagaccagaggcaucuucggcgccaucgccggcuucaucgagaacggcugggagggcaugguggacggcugguacggcuucagacaccagaacagcgagggcagaggccaggccgccgaccugaagagcacccaggccgccaucgaccagaucaacggcaagcugaacagacugaucggcaagaccaacgagaaguuccaccagaucgagaaggaguucagcgagguggagggcagaauccaggaccuggagaaguacguggaggacaccaagaucgaccuguggagcuacaacgccgagcugcugguggcccuggagaaccagcacaccaucgaccugaccgacagcgagaugaacaagcuguucgagaagaccaagaagcagcugagagagaacgccgaggacaugggcaacggcugcuucaagaucuaccacaagugcgacaacgccugcaucggcagcaucagaaacggcaccuacgaccacgacguguacagagacgaggcccugaacaacagauuccagaucaagggcguggagcugaagagcggcuacaaggacuggauccuguggaucagcuucgccaucagcugcuuccugcugugcguggcccugcugggcuucaucaugugggccugccagaagggcaacaucagaugcaacaucugcaucuga

SEQ ID NO: 165438 - RNA, 1701 nt, Artificial Sequence; identical to SEQ ID NO: 165411
  derived and/or modified CDS sequence (opt4) from hemagglutinin__InfluenzaA__ADK98733

SEQ ID NO: 165439 - RNA, 1701 nt, Artificial Sequence; identical to SEQ ID NO: 162494
  derived and/or modified CDS sequence (opt4) from hemagglutinin__InfluenzaA__ADK98744

SEQ ID NO: 165440 - RNA, 1701 nt, Artificial Sequence; identical to SEQ ID NO: 162494
  derived and/or modified CDS sequence (opt4) from hemagglutinin__InfluenzaA__ADK98777

SEQ ID NO: 165441 - RNA, 1701 nt, Artificial Sequence; identical to SEQ ID NO: 162494
  derived and/or modified CDS sequence (opt4) from hemagglutinin__InfluenzaA__ADK98788

SEQ ID NO: 165442 - RNA, 1701 nt, Artificial Sequence; identical to SEQ ID NO: 163673
  derived and/or modified CDS sequence (opt4) from hemagglutinin__InfluenzaA__ADK98799

SEQ ID NO: 165443 - RNA, 1701 nt, Artificial Sequence
  derived and/or modified CDS sequence (opt4) from hemagglutinin__InfluenzaA__ADK98810
augaagaccaucaucgcccugagcuacauccugugccugguguucgcccagaagcugcccggcaacgacaacagcaccgccacccugugccugggccaccacgccgugcccaacggcaccaucgugaagaccaucaccaacgaccagaucgaggugaccaacgccaccgagcuggugcagagcagcagcaccggcgagaucugcgacagcccccaccagauccuggacggcgagaacugcacccugaucgacgcccugcugggcgacccccagugcgacggcuuccagaacaagaagugggaccuguucguggagagaagcaaggccuacagcaacugcuaccccuacgacgugcccgacuacgccagccugagaagccugguggccagcagcggcacccuggaguucaacaacgagagcuucaacuggaccggcgugacccagaacggcaccagcagcgccugcaucagaagaagcaacaacagcuucuucagcagacugaacuggcugacccaccugaaguucaaguaccccgcccugaacgugaccaugcccaacaacgagcaguucgacaagcuguacaucuggggcgugcaccaccccggcaccgacaacgaccagaccuuccuguacgcccaggccagcggcagaaucaccgugagcaccaagagaagccagcagaccgugauccccaacaucggcagcagacccagagugagaaacauccccagcagaaucagcaucuacuggaccaucgugaagcccggcgacauccugcugaucaacagcaccggcaaccugaucgcccccagaggcuacuucaagaucagaagcggcaagagcagcaucaugagaagcgacgcccccaucggcaagugcaacagcgagugcaucacccccaacggcagcauccccaacgacaagcccuuccagaacgugaacagaaucaccuacggcgccugccccagauacgugaagcagaacacccugaagcuggccaccggcaugagaaacgugcccgagaagcagaccagaggcaucuucggcgccaucgccggcuucaucgagaacggcugggagggcaugguggacggcugguacggcuucagacaccagaacagcgagggcagaggccaggccgccgaccugaagagcacccaggccgccaucgaccagaucaacggcaagcugaacagacugaucggcaagaccaacgagaaguuccaccagaucgagaaggaguucagcgagguggagggcagaauccaggaccuggagaaguacguggaggacaccaagaucgaccuguggagcuacaacgccgagcugcugguggcccuggagaaccagcacaccaucgaccugaccgacagcgagaugaacaagcuguucgagaagaccaagaagcagcugagagagaacgccgaggacaugggcaacggcugcuucaagaucuaccacaagugcgacaacgccugcaucggcagcaucagaaacggcaccuacgaccacaacguguacagagacgaggcccugaacaacagauuccagaucaaggagguggagcugaagagcggcuacaaggacuggauccuguggaucagcuucgccaucagcugcuuccugcugugcguggcccugcugggcuucaucaugugggccugccagaagggcaacaucagaugcaacaucugcaucuga

SEQ ID NO: 165444 - RNA, 1701 nt, Artificial Sequence
  derived and/or modified CDS sequence (opt4) from hemagglutinin__InfluenzaA__ADK98821
augaagaccaucaucgcccugagcuacauccugugccugguguucgcccagaagcugcccggcaacgacaacagcaccgccacccugugccugggccaccacgccgugcccaacggcaccaucgugaagaccaucaccaacgaccagaucgaggugaccaacgccaccgagcuggugcagagcagcagcaccggcgagaucugcgacagcccccaccagauccuggacggcaagaacugcacccugaucgacgcccugcugggcgacccccagugcgacggcuuccagaacaagaagugggaccuguucguggagagaagcaaggccuacagcaacugcuaccccuacgacgugcccgacuacgccagccugagaagccugguggccagcagcggcacccuggaguucaacaacgagagcuucaacuggaccggcgugacccagaacggcaccagcagcgccugcaucagaagaagcaagaacagcuucuucagcagacugaacuggcugacccaccugaacuucaaguaccccgcccugaacgugaccaugcccaacaacgagcaguucgacaagcuguacaucuggggcgugcaccaccccggcaccgacaaggaccagaucuuccuguacgcccaggccagcggcagaaucaccgugagcaccaagagaagccagcagaccgccauccccaacaucggcagcagacccagagugagaaacauccccagcagaaucagcaucuacuggaccaucgugaagcccggcgacauccugcugaucaacagcaccggcaaccugaucgcccccagaggcuacuucaagaucagaagcggcaagagcagcaucaugagaagcgacgcccccaucggcaagugcaacagcgagugcaucacccccaacggcagcauccccaacgacaagcccuuccagaacgugaacagaaucaccuacggcgccugccccagauacgugaagcagaacacccugaagcuggccaccggcaugagaaacgugcccgagaagcagaccagaggcaucuucggcgccaucgccggcuucaucgagaacggcugggagggcaugguggacggcugguacggcuucagacaccagaacagcgagggcagaggccaggccgccgaccugaagagcacccaggccgccaucgaccagaucaacggcaagcugaacagacugaucggcaagaccaacgagaaguuccaccagaucgagaaggaguucagcgagguggagggcagaauccaggaccuggagaaguacguggaggacaccaagaucgaccuguggagcuacaacgccgagcugcugguggcccuggagaaccagcacaccaucgaccugaccgacagcgagaugaacaagcuguucgagaagaccagaaagcagcugagagagaacgccgaggacaugggcaacggcugcuucaagaucuaccacaagugcgacaacgccugcaucggcagcaucagaaacggcaccuacgaccacgacguguacagagacgaggcccugaacaacagauuccagaucaagggcguggagcugaagagcggcuacaaggacuggauccuguggaucagcuucgccaucagcugcuuccugcugugcguggcccugcugggcuucaucaugugggccugccagaagggcaacaucagaugcaacaucugcaucuga

SEQ ID NO: 165445 - RNA, 1701 nt, Artificial Sequence; identical to SEQ ID NO: 162494
  derived and/or modified CDS sequence (opt4) from hemagglutinin__InfluenzaA__ADK98832

SEQ ID NO: 165446 - RNA, 1701 nt, Artificial Sequence; identical to SEQ ID NO: 165424
  derived and/or modified CDS sequence (opt4) from hemagglutinin__InfluenzaA__ADK98843

SEQ ID NO: 165447 - RNA, 1701 nt, Artificial Sequence
  derived and/or modified CDS sequence (opt4) from hemagglutinin__InfluenzaA__ADK98854
augaagaccaucaucgcccugagcuacauccugugccugguguucacccagaagcugcccggcaacgacaacagcaccgccacccugugccugggccaccacgccgugcccaacggcaccaucgugaagaccaucaccaacgaccagaucgaggugaccaacgccaccgagcuggugcagagcagcagcaccggcgagaucugcgacagcccccaccagauccuggacggcgagaacugcacccugaucgacgcccugcugggcgacccccagugcgacggcuuccagaacaagaagugggaccuguucguggagagaagcaaggccuacagcaacugcuaccccuacgacgugcccgacuacgccagccugagaagccugguggccagcagcggcacccuggaguucaacaacgagagcuucaacuggaccggcgugacccagaacggcaccagcagcgccugcaucagaagaagcaacaacagcuucuucagcagacugaacuggcugacccaccugaaguucaaguaccccgcccugaacgugaccaugcccaacaacgagcaguucgacaagcuguacaucuggggcgugcaccaccccggcaccgacaacgaccagaucuuccuguacgcccaggccagcggcagaaucaccgugagcaccaagagaagccagcagaccgugauccccaacaucggcagcagacccagagugagaaacauccccagcagaaucagcaucuacuggaccaucgugaagcccggcgacauccugcugaucaacagcaccggcaaccugaucgcccccagaggcuacuucaagaucagaagcggcaagagcagcaucaugagaagcgacgcccccaucggcaagugcaacagcgagugcaucacccccaacggcagcauccccaacgacaagcccuuccagaacgugaacagaaucaccuacggcgccugccccagauacgugaagcagaacacccugaagcuggccaccggcaugagaaacgugcccgagaagcagaccagaggcaucuucggcgccaucgccggcuucaucgagaacggcugggagggcaugguggacggcugguacggcuucagacaccagaacagcgagggcagaggccaggccgccgaccugaagagcacccaggccgccaucgaccagaucaacggcaagcugaacagacugaucggcaagaccaacgagaaguuccaccagaucgagaaggaguucagcgagguggagggcagaauccaggaccuggagaaguacguggaggacaccaagaucgaccuguggagcuacaacgccgagcugcugguggcccuggagaaccagcacaccaucgaccugaccgacagcgagaugaacaagcuguucgagaagaccaagaagcagcugagagagaacgccgaggacaugggcaacggcugcuucaagaucuaccacaagugcgacaacgccugcaucggcagcaucagaaacggcaccuacgaccacgacguguacagagacgaggcccugaacaacagauuccagaucaagggcguggagcugaagcccggcuacaaggacuggauccuguggaucagcuucgccaucagcugcuuccugcugugcguggcccugcugggcuucaucaugugggccugccagaagggcaacaucagaugcaacaucugcaucuga

SEQ ID NO: 165448 - RNA, 1701 nt, Artificial Sequence
  derived and/or modified CDS sequence (opt4) from hemagglutinin__InfluenzaA__ADK98865
augaagaccaucaucgcccugagcuacauccugugccugguguucgcccagaagcugcccggcagcgacaacagcaccgccacccugugccugggccaccacgccgugcccaacggcaccaucgugaagaccaucaccaacgaccagaucgaggugaccaacgccaccgagcuggugcagagcagcagcaccggcgagaucugcgacagcccccaccagauccuggacggcgagaacugcacccugaucgacgcccugcugggcgacccccagugcgacgacuuccagaacaagaagugggaccuguucguggagagaagcaaggccuacagcaacugcuaccccuacgacgugcccgacuacgccagccugagaagccugguggccagcagcggcacccuggaguucaacaacgagagcuucaacuggaccggcgugacccagaacggcaccagcagcgccugcaucagaagaagcagcaacagcuucuucagcagacugaacuggcugacccaccugagauucaaguaccccgcccugaacgugaccaugcccaacaacgagcaguucgacaagcuguacaucuggggcgugcaccaccccggcaccgacaacgaccagaucuuccuguacgcccaggccagcggcagaaucaccgugagcaccaagagaagccagcagaccgugauccccaacaucggcagcagacccagagugagaaacauccccagcagaaucagcaucuacuggaccaucgugaagcccggcgacauccugcugaucaacagcaccggcaaccugaucgcccccagaggcuacuucaagaucagaagcggcaagagcagcaucaugagaagcgacgcccccaucggcaagugcaacagcgagugcaucacccccaacggcagcauccccaacgacaagcccuuccagaacgugaacagaaucaccuacggcgccugccccagauacgugaagcagaacacccugaagcuggccaccggcaugagaaacgugcccgagaagcagaccagaggcaucuucggcgccaucgccggcuucaucgagaacggcugggagggcaugguggacggcugguacggcuucagacaccagaacagcgagggcagaggccaggccgccgaccugaagagcacccaggccgccaucgaccagaucaacggcaagcugaacagacugaucggcaagaccaacgagaaguuccaccagaucgagaaggaguucagcgagguggagggcagaauccaggaccuggagaaguacguggaggacaccaagaucgaccuguggagcuacaacgccgagcugcugguggcccuggagaaccagcacaccaucgaccugaccgacagcgagaugaacaagcuguucgagaagaccaagaagcagcugagagagaacgccgaggacaugggcaacggcugcuucaagaucuaccacaagugcgacaacgccugcaucggcagcaucagaaacggcaccuacgaccacgacguguacagagacgaggcccugaacaacagauuccagaucaagggcguggagcugaagagcggcuacaaggacuggauccuguggaucagcuucgccaucagcugcuuccugcugugcguggcccugcugggcuucaucaugugggccugccagaagggcaacaucagaugcaacaucugcaucuga

SEQ ID NO: 165449 - RNA, 1701 nt, Artificial Sequence
  derived and/or modified CDS sequence (opt4) from hemagglutinin__InfluenzaA__ADK98876
augaagaccaucaucgcccugagcuacauccugugccugguguucgcccagaagcugcccggcaacgacaacagcaccgccacccugugccugggccaccacgccgugcccaacggcaccaucgugaagaccaucaccaacgaccagaucgaggugaccaacgccaccgagcuggugcagaacagcagcaccggcgagaucugcgacagcccccaccagauccuggacggcaagaacugcacccugaucgacgcccugcugggcgacccccagugcgacggcuuccagaacaagaagugggaccuguucguggagagaagcaaggccuacagcaacugcuaccccuacgacgugcccgacuacgccagccugagaagccugguggccagcagcggcacccuggaguucaacaacgagagcuucaacuggaccggcgugacccagaacggcaccagcagcgccugcaucagaagaagcaagaacagcuucuucagcagacugaacuggcugacccaccugaacuucaaguaccccgcccugaacgugaccaugcccaacaacggccaguucgacaagcuguacaucuggggcgugcaccaccccggcaccgacaaggaccagaucuuccuguacgcccaggccagcggcagaaucaccgugagcaccaagagaagccagcagaccgugauccccaacaucggcagcagacccagagugagaaacauccccagcagaaucagcaucuacuggaccaucgugaagcccggcgacauccugcugaucaacagcaccggcaaccugaucgcccccagaggcuacuucaagaucagaagcggcaagagcagcaucaugagaagcgacgcccccaucggcaagugcaacagcgagugcaucacccccaacggcagcauccccaacgacaagcccuuccagaacgugaacagaaucaccuacggcgccugccccagauacgugaagcagaacacccugaagcuggccaccggcaugagaaacgugcccgagaagcagaccagaggcaucuucggcgccaucgccggcuucaucgagaacggcugggagggcaugguggacggcugguacggcuucagacaccagaacagcgagggcagaggccaggccgccgaccugaagagcacccaggccgccaucgaccagaucaacggcaagcugaacagacugaucggcaagaccaacgagaaguuccaccagaucgagaaggaguucagcgagguggagggcagaauccaggaccuggagaaguacguggaggacaccaagaucgaccuguggagcuacaacgccgagcugcugguggcccuggagaaccagcacaccaucgaccugaccgacagcgagaugaacaagcuguucgagaagaccaagaagcagcugagagagaacgccgaggacaugggcaacggcugcuucaagaucuaccacaagugcgacaacgccugcaucggcagcaucagaaacggcaccuacgaccacgacguguacagagacgaggcccugaacaacagauuccagaucaagggcguggagcugaagagcggcuacaaggacuggauccuguggaucagcuucgccaucagcugcuuccugcugugcguggcccugcugggcuucaucaugugggccugccagaagggcaacaucagaugcaacaucugcaucuga

SEQ ID NO: 165450 - RNA, 1701 nt, Artificial Sequence; identical to SEQ ID NO: 165424
  derived and/or modified CDS sequence (opt4) from hemagglutinin__InfluenzaA__ADK98887

SEQ ID NO: 165451 - RNA, 1701 nt, Artificial Sequence; identical to SEQ ID NO: 162494
  derived and/or modified CDS sequence (opt4) from hemagglutinin__InfluenzaA__ADK98898

SEQ ID NO: 165452 - RNA, 1701 nt, Artificial Sequence
  derived and/or modified CDS sequence (opt4) from hemagglutinin__InfluenzaA__ADK98909
augaagaccaucaucgcccugagcuacauccugugccugguguucgcccagaagcugcccggcaacgacaacagcaccgccacccugugccugggccaccacgccgugcccaacggcaccaucgugaagaccaucaccaacgaccagaucgaggugaccaacgccaccgagcuggugcagaucagcagcaccggcgagaucugcgacagcccccaccagauccuggacggcgagaacugcacccugaucgacgcccugcugggcgacccccagugcgacggcuuccagaacaagaagugggaccuguucguggagagaagcaaggccuacagcaacugcuaccccuacgacgugcccgacuacgccagccugagaagccugguggccagcagcggcacccuggaguucaacaacgagagcuucaacuggaccggcgugacccagaacggcaccagcagcgccugcaucagaagaagcaacaacagcuucuucagcagacugaacuggcugacccaccugaaguucaaguaccccgcccugaacgugaccaugcccaacaacgagcaguucgacaagcuguacaucuggggcgugcaccaccccggcaccgacaacgaccagaucuuccuguacgcccaggccagcggcagaaucaccgugagcaccaagagaagccagcagaccgugauccccaacaucggcagcagacccagagugagaaacauccccagcagaaucagcaucuacuggaccaucgugaagcccggcgacauccugcugaucaacagcaccggcaaccugaucgcccccagaggcuacuucaagaucagaagcggcaagagcagcaucaugagaagcgacgcccccaucggcaagugcaacagcgagugcaucacccccaacggcagcauccccaacgacaagcccuuccagaacgugaacagaaucaccuacggcgccugccccagauacgugaagcagaacacccugaagcuggccaccggcaugagaaacgugcccgagaagcagaccagaggcaucuucggcgccaucgccggcuucaucgagaacggcugggagggcaugguggacggcugguacggcuucagacaccagaacagcgagggcagaggccaggccgccgaccugaagagcacccaggccgccaucgaccagaucaacggcaagcugaacagacugaucggcaagaccaacgagaaguuccaccagaucgagaaggaguucagcgagguggagggcagaauccaggaccuggagaaguacguggaggacaccaagaucgaccuguggagcuacaacgccgagcugcugguggcccuggagaaccagcacaccaucgaccugaccgacagcgagaugaacaagcuguucgagaagaccaagaagcagcugagagagaacgccgaggacaugggcaacggcugcuucaagaucuaccacaagugcgacaacgccugcaucggcagcaucagaaacggcaccuacgaccacgacguguacagagacgaggcccugaacaacagauuccagaucaagggcguggagcugaagagcggcuacaaggacuggauccuguggaucagcuucgccaucagcugcuuccugcugugcguggcccugcugggcuucaucaugugggccugccagaagggcaacaucagaugcaacaucugcaucuga

SEQ ID NO: 165453 - RNA, 1701 nt, Artificial Sequence
  derived and/or modified CDS sequence (opt4) from hemagglutinin__InfluenzaA__ADK98920
augaagaccaucaucgcccugagcuacauccugugccugguguucgcccagaagcugcccggcaacgacaacagcaccgccacccugugccugggccaccacgccgugcccaacggcaccaucgugaagaccaucaccaacgaccagaucgaggugaccaacgccaccgagcuggugcagagcagcagcaccggcgagaucugcgacagcccccaccagauccuggacggcaagaacugcacccugaucgacgcccugcugggcgacccccagugcgacggcuuccagaacaagaagugggaccuguucguggagagaggcaaggccuacagcaacugcuaccccuacgacgugcccgacuacgccagccugagaagccugguggccagcagcggcacccuggaguucaacaacgagagcuucaacuggaccggcgugacccagaacggcaccagcagcgccugcaucagaagaagcaagaacagcuucuucagcagacugaacuggcugacccaccugaacuucaaguaccccgcccugaacgugaccaugcccaacaacgagcaguucgacaagcuguacaucuggggcgugcaccaccccggcaccgacaaggaccagaucuuccuguacgcccaggccagcggcagaaucaccgugagcaccaagagaagccagcagaccgugauccccaacaucggcagcagacccagagugagaaacauccccagcagaaucagcaucuacuggaccaucgugaagcccggcgacauccugcugaucaacagcaccggcaaccugaucgcccccagaggcuacuucaagaucagaagcggcaagagcagcaucaugagaagcgacgcccccaucggcaagugcaacagcgagugcaucacccccaacggcagcauccccaacgacaagcccuuccagaacgugaacagaaucaccuacggcgccugccccagauacgugaagcagagcacccugaagcuggccaccggcaugagaaacgugcccgagaagcagaccagaggcaucuucggcgccaucgccggcuucaucgagaacggcugggagggcaugguggacggcugguacggcuucagacaccagaacagcgagggcagaggccaggccgccgaccugaagagcacccaggccgccaucgaccagaucaacggcaagcugaacagacugaucggcaagaccaacgagaaguuccaccagaucgagaaggaguucagcgagguggagggcagaauccaggaccuggagaaguacguggaggacaccaagaucgaccuguggagcuacaacgccgagcugcugguggcccuggagaaccagcacaccaucgaccugaccgacagcgagaugaacaagcuguucgagaagaccaagaagcagcugagagagaacgccgaggacaugggcaacggcugcuucaagaucuaccacaagugcgacaacgccugcaucggcagcaucagaaacggcaccuacgaccacgacguguacagagacgaggcccugaacaacagauuccagaucaagggcguggagcugaagagcggcuacaaggacuggauccuguggaucagcuucgccaucagcugcuuccugcugugcguggcccugcugggcuucaucaugugggccugccagaagggcaacaucagaugcaacaucugcaucuga

SEQ ID NO: 165454 - RNA, 1701 nt, Artificial Sequence; identical to SEQ ID NO: 162494
  derived and/or modified CDS sequence (opt4) from hemagglutinin__InfluenzaA__ADK98931

SEQ ID NO: 165455 - RNA, 1701 nt, Artificial Sequence
  derived and/or modified CDS sequence (opt4) from hemagglutinin__InfluenzaA__ADK98942
augaagaccaucaucgcccugagcuacauccugugccugguguucgcccagaagcugcccggcaacgacaacagcaccgccacccugugccugggccaccacgccgugcccaacggcaccaucgugaagaccaucaccaacgaccagaucgaggugaccaacgccaccgagcuggugcagagcagcagcaccggcgagaucugcgacagcccccaccagauccuggacggcgagaacugcacccugaucgacgcccugcugggcgacccccagugcgacggcuuccagaacaagaagugggaccuguucguggagagaagcaaggccuacagcaacugcuaccccuacgacgugcccgacuacgccagccugagaagccugguggccagcagcggcacccuggaguucaacaacgagagcuucaacuggaccggcgugacccagaacggcaccagcagcgccugcaucagaagaagcaacaacagcuucuucagcagacugaacuggcugacccaccugaaguucaaguaccccgcccugaacgugaccaugcccaacaacgagcaguucgacaagcuguacaucuggggcgugcaccaccccggcaccgacaacgaccagaucuuccuguacgcccaggccagcggcagaaucaccgugagcaccaagagaagccagcagaccgugaucagcaacaucggcagcagacccagagugagaaacauccccagcagaaucagcaucuacuggaccaucgugaagcccggcgacauccugcugaucaacagcaccggcaaccugaucgcccccagaggcuacuucaagaucagaagcggcaagagcagcaucaugagaagcgacgcccccaucggcaagugcaacagcgagugcaucacccccaacggcagcauccccaacgacaagcccuuccagaacgugaacagaaucaccuacggcgccugccccagauacgugaagcagaacacccugaagcuggccaccggcaugagaaacgugcccgagaagcagaccagaggcaucuucggcgccaucgccggcuucaucgagaacggcugggagggcaugguggacggcugguacggcuucagacaccagaacagcgagggcagaggccaggccgccgaccugaagagcacccaggccgccaucgaccagaucaacggcaagcugaacagacugaucggcaagaccaacgagaaguuccaccagaucgagaaggaguucagcgagguggagggcagaauccaggaccuggagaaguacguggaggacaccaagaucgaccuguggagcuacaacgccgagcugcugguggcccuggagaaccagcacaccaucgaccugaccgacagcgagaugaacaagcuguucgagaagaccaagaagcagcugagagagaacgccgaggacaugggcaacggcugcuucaagaucuaccacaagugcgacaacgccugcaucggcagcaucagaaacggcaccuacgaccacaacguguacagagacgaggcccugaacaacagauuccagaucaagggcguggagcugaagagcggcuacaaggacuggauccuguggaucagcuucgccaucagcugcuuccugcugugcguggcccugcugggcuucaucaugugggccugccagaagggcaacaucagaugcaacaucugcaucuga

SEQ ID NO: 165456 - RNA, 1701 nt, Artificial Sequence
  derived and/or modified CDS sequence (opt4) from hemagglutinin__InfluenzaA__ADK98953
augaagaccaucaucgcccugagcuacaugcugugccugguguucgcccagaagcugcccggcaacgacaacagcaccgccacccugugccugggccaccacgccgugcccaacggcaccaucgugaagaccaucaccaacgaccagaucgaggugaccaacgccaccgagcuggugcagagcagcagcaccggcgagaucugcgacagcccccaccagauccuggacggcgagaacugcacccugaucgacgcccugcugggcgacccccagugcgacggcuuccagaacaagaagugggaccuguucguggagagaagcaaggccuacagcaacugcuaccccuacgacgugcccgacuacgccagccugagaagccugaucgccagcagcggcacccuggaguucaacaacgagagcuucaacuggaccggcgugacccagaacggcaccagcagcgccugcaucagaagaagcaacaacagcuucuucagcagacugaacuggcugacccaccugaaguucaaguaccccgcccugaacgugaccaugcccaacaacgagcaguucgacaagcuguacaucuggggcgugcaccaccccggcaccgacaacgaccagaucuuccuguacgcccaggccagcggcagaaucaccgugagcaccaagagaagccagcagaccgugauccccaacaucggcagcagacccagagugagaaacauccccagcagaaucagcaucuacuggaccaucgugaagcccggcgacauccugcugaucaacagcaccggcaaccugaucgcccccagaggcuacuucaagaucagaagcggcaagagcagcaucaugagaagcgacgcccccaucggcaagugcaacagcgagugcaucacccccaacggcagcauccccaacgacaagcccuuccagaacgugaacagaaucaccuacggcgccugccccagauacgugaagcagaacacccugaagcuggccaccggcaugagaaacgugcccgagaagcagaccagaggcaucuucggcgccaucgccggcuucaucgagaacggcugggagggcaugguggacggcugguacggcuucagacaccagaacagcgagggcagaggccaggccgccgaccugaagagcacccaggccgccaucgaccagaucaacggcaagcugaacagacugaucggcaagaccaacgagaaguuccaccagaucgagaaggaguucagcgagguggagggcagaauccaggaccuggagaaguacguggaggacaccaagaucgaccuguggagcuacaacgccgagcugcugguggcccuggagaaccagcacaccaucgaccugaccgacagcgagaugaacaagcuguucgagaagaccaagaagcagcugagagagaacgccgaggacaugggcaacggcugcuucaagaucuaccacaagugcgacaacgccugcaucggcagcaucagaaacggcaccuacgaccacgacguguacagagacgaggcccugaacaacagauuccagaucaagggcguggagcugaagagcggcuacaaggacuggauccuguggaucagcuucgccaucagcugcuuccugcugugcguggcccugcugggcuucaucaugugggccugccagaagggcaacaucagaugcaacaucugcaucuga

SEQ ID NO: 165457 - RNA, 1701 nt, Artificial Sequence; identical to SEQ ID NO: 162494
  derived and/or modified CDS sequence (opt4) from hemagglutinin__InfluenzaA__ADK98964

SEQ ID NO: 165458 - RNA, 1701 nt, Artificial Sequence; identical to SEQ ID NO: 165411
  derived and/or modified CDS sequence (opt4) from hemagglutinin__InfluenzaA__ADK98975

SEQ ID NO: 165459 - RNA, 1701 nt, Artificial Sequence; identical to SEQ ID NO: 165456
  derived and/or modified CDS sequence (opt4) from hemagglutinin__InfluenzaA__ADK98986

SEQ ID NO: 165460 - RNA, 1701 nt, Artificial Sequence; identical to SEQ ID NO: 163673
  derived and/or modified CDS sequence (opt4) from hemagglutinin__InfluenzaA__ADK98997

SEQ ID NO: 165461 - RNA, 1701 nt, Artificial Sequence; identical to SEQ ID NO: 165456
  derived and/or modified CDS sequence (opt4) from hemagglutinin__InfluenzaA__ADK99008

SEQ ID NO: 165462 - RNA, 1701 nt, Artificial Sequence
  derived and/or modified CDS sequence (opt4) from hemagglutinin__InfluenzaA__ADK99030
augaagaccaucaucgcccugagcuacauccugugccugguguucgcccagaagcugcccggcaacgacaacagcaccgccacccugugccugggccaccacgccgugcccaacggcaccaucgugaagaccaucaccaacgaccagaucgaggugaccaacgccaccgagcuggugcagagcagcagcaccggcgagaucugcgacagcccccaccagauccuggacggcaagaacugcacccugaucgacgcccugcugggcgacccccagugcgacggcuuccagaacaagaagugggaccuguucguggagagaagcaaggccuacagcaacugcuaccccuacgacgugcccgacuacgccagccugagaagccugguggccagcagcggcacccuggaguucaacaacgagagcuucaacuggaccggcgugacccagaacggcaccagcagcgccugcaucagaagaagcaagaacagcuucuucagcagacugaacuggcugacccaccugaacuucaaguaccccgcccugaacgugaccaugcccaacaacgagagauucgacaagcuguacaucuggggcgugcaccaccccggcaccgacaaggaccagaucuuccuguacgcccaggccagcggcagaaucaccgugagcaccaagagaagccagcagaccgugauccccaacaucggcagcagacccagagugagaaacauccccagcagaaucagcaucuacuggaccaucgugaagcccggcgacauccugcugaucaacagcaccggcaaccugaucgcccccagaggcuacuucaagaucagaagcggcaagagcagcaucaugagaagcgacgcccccaucggcaagugcaacagcgagugcaucacccccaacggcagcauccccaacgacaagcccuuccagaacgugaacagaaucaccuacggcgccugccccagauacgugaagcagaacacccugaagcuggccaccggcaugagaaacgugcccgagaagcagaccagaggcaucuucggcgccaucgccggcuucaucgagaacggcugggagggcaugguggacggcugguacggcuucagacaccagaacagcgagggcagaggccaggccgccgaccugaagagcacccaggccgccaucgaccagaucaacggcaagcugaacagacugaucggcaagaccaacgagaaguuccaccagaucgagaaggaguucagcgagguggagggcagaauccaggaccuggagaaguacguggaggacaccaagaucgaccuguggagcuacaacgccgagcugcugguggcccuggagaaccagcacaccaucgaccugaccgacagcgagaugaacaagcuguucgagaagaccaagaagcagcugagagagaacgccgaggacaugggcaacggcugcuucaagaucuaccacaagugcgacaacgccugcaucggcagcaucagaaacggcaccuacgaccacgacguguacagagacgaggcccugaacaacagauuccagaucaagggcguggagcugaagagcggcuacaaggacuggauccuguggaucagcuucgccaucagcugcuuccugcugugcguggcccugcugggcuucaucaugugggccugccagaagggcaacaucagaugcaacaucugcaucuga

SEQ ID NO: 165463 - RNA, 1701 nt, Artificial Sequence
  derived and/or modified CDS sequence (opt4) from hemagglutinin__InfluenzaA__ADK99041
augaagaccaucaucgcccugagcuacauccugugccugguguucgcccagaagcugcccggcaacgacaacagcaccgccacccugugccugggccaccacgccgugcccaacggcaccaucgugaagaccaucgccaacgaccagaucgaggugaccaacgccaccgagcuggugcagagcagcagcaccggcgagaucugcgacagcccccaccagauccuggacggcgagaacugcacccugaucgacgcccugcugggcgacccccagugcgacggcuuccagaacaagaagugggaccuguucguggagagaagcaaggccuacagcaacugcuaccccuacgacgugcccgacuacgccagccugagaagccugguggccagcagcggcacccuggaguucaacaacgagagcuucaacuggaccggcgugacccagaacggcaccagcagcgccugcaucagaagaagcaacaacagcuucuucagcagacugaacuggcugacccaccugaaguucaaguaccccgcccugaacgugaccaugcccaacaacgagcaguucgacaagcuguacaucuggggcgugcaccaccccggcaccgacaacgaccagaucuuccuguacgcccaggccagcggcagaaucaccgugagcaccaagagaagccagcagaccgugauccccaacaucggcagcagacccagagugagaaacauccccagcagaaucagcaucuacuggaccaucgugaagcccggcgacauccugcugaucaacagcaccggcaaccugaucgcccccagaggcuacuucaagaucagaagcggcaagagcagcaucaugagaagcgacgcccccaucggcaagugcaacagcgagugcaucacccccaacggcagcauccccaacgacaagcccuuccagaacgugaacagaaucaccuacggcgccugccccagauacgugaagcagaacacccugaagcuggccaccggcaugagaaacgugcccgagaagcagaccagaggcaucuucggcgccaucgccggcuucaucgagaacggcugggagggcaugguggacggcugguacggcuucagacaccagaacagcgagggcagaggccaggccgccgaccugaagagcacccaggccgccaucgaccagaucaacggcaagcugaacagacugaucggcaagaccaacgagaaguuccaccagaucgagaaggaguucagcgagguggagggcagaauccaggaccuggagaaguacguggaggacaccaagaucgaccuguggagcuacaacgccgagcugcugguggcccuggagaaccagcacaccaucgaccugaccgacagcgagaugaacaagcuguucgagaagaccaagaagcagcugagagagaacgccgaggacaugggcaacggcugcuucaagaucuaccacaagugcgacaacgccugcaucggcagcaucagaaacggcaccuacgaccacgacguguacagagacgaggcccugaacaacagauuccagaucaagggcguggagcugaagagcggcuacaaggacuggauccuguggaucagcuucgccaucagcugcuuccugcugugcguggcccugcugggcuucaucaugugggccugccagaagggcaacaucagaugcaacaucugcaucuga

SEQ ID NO: 165464 - RNA, 1701 nt, Artificial Sequence; identical to SEQ ID NO: 165411
  derived and/or modified CDS sequence (opt4) from hemagglutinin__InfluenzaA__ADK99063

SEQ ID NO: 165465 - RNA, 1701 nt, Artificial Sequence; identical to SEQ ID NO: 162494
  derived and/or modified CDS sequence (opt4) from hemagglutinin__InfluenzaA__ADK99085

SEQ ID NO: 165466 - RNA, 1701 nt, Artificial Sequence; identical to SEQ ID NO: 162494
  derived and/or modified CDS sequence (opt4) from hemagglutinin__InfluenzaA__ADK99096

SEQ ID NO: 165467 - RNA, 1701 nt, Artificial Sequence; identical to SEQ ID NO: 162494
  derived and/or modified CDS sequence (opt4) from hemagglutinin__InfluenzaA__ADK99107

SEQ ID NO: 165468 - RNA, 1701 nt, Artificial Sequence
  derived and/or modified CDS sequence (opt4) from hemagglutinin__InfluenzaA__ADK99118
augaagaccaucaucgcccugagcuacauccugugccugguguucgcccagaagcugcccggcaacgacaacagcaccgccacccugugccugggccaccacgccgugcccaacggcaccaucgugaagaccaucaccaacgaccagaucgaggugaccaacgccaccgagcuggugcagagcagcagcaccggcgagaucugcgacaucccccaccagauccuggacggcaagaacugcacccugaucgacgcccugcugggcgacccccagugcgacggcuuccagaacaagaagugggaccuguucguggagagaagcaaggccuacagcaacugcuaccccuacgacgugcccgacuacgccagccugagaagccugguggccagcagcggcacccuggaguucaacaacgagagcuucaacuggaccggcgugacccagaacggcaccagcagcgccugcaucagaagaagcaagaacagcuucuucagcagacugaacuggcugacccaccugaacuucaaguaccccgcccugaacgugaccaugcccaacaacgagcaguucgacaagcuguacaucuggggcgugcaccaccccggcaccgacaaggaccagaucuuccuguacgcccaggccagcggcagaaucaccgugagcaccaagagaagccagcagaccgugauccccaacaucggcagcagacccagagugagaaacauccccagcagaaucagcaucuacuggaccaucgugaagcccggcgacauccugcugaucaacagcaccggcaaccugaucgcccccagaggcuacuucaagaucagaagcggcaagagcagcaucaugagaagcgacgcccccaucggcaagugcaacagcgagugcaucacccccaacggcagcauccccaacgacaagcccuuccagaacgugaacagaaucaccuacggcgccugccccagauacgugaagcagagcacccugaagcuggccaccggcaugagaaacgugcccgagaagcagaccagaggcaucuucggcgccaucgccggcuucaucgagaacggcugggagggcaugguggacggcugguacggcuucagacaccagaacagcgagggcagaggccaggccgccgaccugaagagcacccaggccgccaucgaccagaucaacggcaagcugaacagacugaucggcaagaccaacgagaaguuccaccagaucgagaaggaguucagcgagguggagggcagaauccaggaccuggagaaguacguggaggacaccaagaucgaccuguggagcuacaacgccgagcugcugguggcccuggagaaccagcacaccaucgaccugaccgacagcgagaugaacaagcuguucgagaagaccaagaagcagcugagagagaacgccgaggacaugggcaacggcugcuucaagaucuaccacaagugcaacaacgccugcaucggcagcaucagaaacggcaccuacgaccacgacguguacagagacgaggcccugaacaacagauuccagaucaagggcguggagcugaagagcggcuacaaggacuggauccuguggaucagcuucgccaucagcugcuuccugcugugcguggcccugcugggcuucaucaugugggccugccagaagggcaacaucagaugcaacaucugcaucuga

SEQ ID NO: 165469 - RNA, 1701 nt, Artificial Sequence
  derived and/or modified CDS sequence (opt4) from hemagglutinin__InfluenzaA__ADK99129
augaagaccaucaucgcccugagcuacauccugugccugguguucgcccagaagcugcccggcaacgacaacagcaccgccacccugugccugggccaccacgccgugcccaacggcaccaucgugaagaccaucaccaacgaccagaucgaggugaccaacgccaccgagcuggugcagagcagcagcaccggcgagaucugcgacagcccccaccagauccuggacggcaagaacugcacccugaucgacgcccugcugggcgacccccagugcgacggcuuccagaacaagaagugggaccuguucguggagagaagcaaggccuacagcaacugcuaccccuacgacgugcccgacuacgccagccugagaagccugguggccagcagcggcacccuggaguucaacaacgagagcuucaacuggaccggcgugacccagaacggcaccagcagcgccugcaucagaagaagcaagaacagcuucuucagcagacugaacuggcugacccaccugaacuucaaguaccccgcccugaacaugaccaugcccaacaacgagcaguucgacaagcuguacaucuggggcgugcaccaccccggcaccgacaaggaccagaucuuccuguacgcccaggccagcggcagaaucaccgugagcaccaagagaagccagcagaccgugauccccaacaucggcagcagacccagagugagaaacauccccagcagaaucagcaucuacuggaccaucgugaagcccggcgacauccugcugaucaacagcaccggcaaccugaucgcccccagaggcuacuucaagaucagaagcggcaagagcagcaucaugagaagcgacgcccccaucggcaagugcaacagcgagugcaucacccccaacggcagcauccccaacgacaagcccuuccagaacgugaacagaaucaccuacggcgccugccccagauacgugaagcagagcacccugaagcuggccaccggcaugagaaacgugcccgagaagcagaccagaggcaucuucggcgccaucgccggcuucaucgagaacggcugggagggcaugguggacggcugguacggcuucagacaccagaacagcgagggcagaggccaggccgccgaccugaagagcacccaggccgccaucgaccagaucaacggcaagcugaacagacugaucggcaagaccaacgagaaguuccaccagaucgagaaggaguucagcgagguggagggcagaauccaggaccuggagaaguacguggaggacaccaagaucgaccuguggagcuacaacgccgagcugcugguggcccuggagaaccagcacaccaucgaccugaccgacagcgagaugaacaagcuguucgagaagaccaagaagcagcugagagagaacgccgaggacaugggcaacggcugcuucaagaucuaccacaagugcaacaacgccugcaucggcagcaucagaaacggcaccuacgaccacgacguguacagagacgaggcccugaacaacagauuccagaucaagggcguggagcugaagagcggcuacaaggacuggauccuguggaucagcuucgccaucagcugcuuccugcugugcguggcccugcugggcuucaucaugugggccugccagaagggcaacaucagaugcaacaucugcaucuga

SEQ ID NO: 165470 - RNA, 1701 nt, Artificial Sequence; identical to SEQ ID NO: 165411
  derived and/or modified CDS sequence (opt4) from hemagglutinin__InfluenzaA__ADK99140

SEQ ID NO: 165471 - RNA, 1701 nt, Artificial Sequence
  derived and/or modified CDS sequence (opt4) from hemagglutinin__InfluenzaA__ADK99151
augaagaccaucaucgcccugagcuacauccugugccugguguucgcccagaagcugcccggcaacgacaacagcaccgccacccugugccugggccaccacgccgugcccaacggcaccaucgugaagaccaucaccaacgaccagaucgaggugaccaacgccaccgagcuggugcagagcagcagcaccggcgagaucugcgacagcccccaccagauccuggacggcaagaacugcacccugaucgacgcccugcugggcgacccccagugcgacggccugcagaacaagaagugggaccuguucguggagagaagcaaggccuacagcaacugcuaccccuacgacgugcccgacuacgccagccugagaagccugguggccagcagcggcacccuggaguucaacaacgagagcuucaacuggaccggcgugacccagaacggcaccagcagcgccugcaucagaagaagcaagaacagcuucuucagcagacugaacuggcugacccaccugaacuucaaguaccccgcccugaacgugaccaugcccaacaacgagcaguucgacaagcuguacaucuggggcgugcaccaccccggcaccgacaaggaccagaucuuccuguacgcccaggccagcggcagaaucaccgugagcaccaagagaagccagcagaccgccauccccaacaucggcagcagacccagagugagaaacauccccagcagaaucagcaucuacuggaccaucgugaagcccggcgacauccugcugaucaacagcaccggcaaccugaucgcccccagaggcuacuucaagaucagaagcggcaagagcagcaucaugagaagcgacgcccccaucggcaagugcaacagcaagugcaucacccccaacggcagcauccccaacgacaagcccuuccagaacgugaacagaaucaccuacggcgccugccccagauacgugaagcagaacacccugaagcuggccaccggcaugagaaacgugcccgagaagcagaccagaggcaucuucggcgccaucgccggcuucaucgagaacggcugggagggcaugguggacggcugguacggcuucagacaccagaacagcgagggcagaggccaggccgccgaccugaagagcacccaggccgccaucgaccagaucaacggcaagcugaacagacugaucggcaagaccaacgagaaguuccaccagaucgagaaggaguucagcgagguggagggcagaauccaggaccuggagaaguacguggaggacaccaagaucgaccuguggagcuacaacgccgagcugcugguggcccuggagaaccagcacaccaucgaccugaccgacagcgagaugaacaagcuguucgagaagaccaagaagcagcugagagagaacgccgaggacaugggcaacggcugcuucaagaucuaccacaagugcgacaacgccugcaucggcagcaucagaaacggcaccuacgaccacgacguguacagagacgaggcccugaacaacagauuccagaucaagggcguggagcugaagagcggcuacaaggacuggauccuguggaucagcuucgccaucagcugcuuccugcugugcguggcccugcugggcuucaucaugugggccugccagaagggcaacaucagaugcaacaucugcaucuga

SEQ ID NO: 165472 - RNA, 1701 nt, Artificial Sequence; identical to SEQ ID NO: 165411
  derived and/or modified CDS sequence (opt4) from hemagglutinin__InfluenzaA__ADK99162

SEQ ID NO: 165473 - RNA, 1701 nt, Artificial Sequence
  derived and/or modified CDS sequence (opt4) from hemagglutinin__InfluenzaA__ADK99173
augaagaccaucaucgcccugagcuacauccugugccugguguucgcccagaagcugcccggcaacgacaacagcaccgccacccugugccugggccaccacgccgugcccaacggcaccaucgugaagaccaucaccaacgaccagaucgaggugaccaacgccaccgagcugauccagagcagcagcaccggcgagaucugcgacagcccccaccagauccuggacggcgagaacugcacccugaucgacgcccugcugggcgacccccagugcgacggccugcagaacaagaagugggaccuguucguggagagaagcaaggccuacagcaacugcuaccccuacgacgugcccgacuacgccagccugagaagccugguggccagcagcggcacccuggaguucaacaacgagagcuucaacuggaccggcgugacccagaacggcaccagcagcgccugcaucagaagaagcaacaacagcuucuucagcagacugaacuggcugacccaccugaaguucaaguaccccgcccugaacgugaccaugcccaacaacgagcaguucgacaagcuguacaucuggggcgugcaccaccccggcaccgacaacgaccagaucuuccuguacgcccaggccagcggcagaaucaccgugagcaccaagagaagccagcagaccgugauccccaacaucggcagcagacccagagugagaaacauccccagcagaaucagcaucuacuggaccaucgugaagcccggcgacauccugcugaucaacagcaccggcaaccugaucgcccccagaggcuacuucaagaucagaagcggcaagagcagcaucaugagaagcgacgcccccaucggcaagugcaacagcgagugcaucacccccaacggcagcauccccaacgacaagcccuuccagaacgugaacagaaucaccuacggcgccugccccagauacgugaagcagaacacccugaagcuggccaccggcaugagaaacgugcccgagaagcagaccagaggcaucuucggcgccaucgccggcuucaucgagaacggcugggagggcaugguggacggcugguacggcuucagacaccagaacagcgagggcagaggccaggccgccgaccugaagagcacccaggccgccaucgaccagaucaacggcaagcugaacagacugaucggcaagaccaacgagaaguuccaccagaucgagaaggaguucagcgagguggagggcagaauccaggaccuggagaaguacguggaggacaccaagaucgaccuguggagcuacaacgccgagcugcugguggcccuggagaaccagcacaccaucgaccugaccgacagcgagaugaacaagcuguucgagaagaccaagaagcagcugagagagaacgccgaggacaugggcaacggcugcuucaagaucuaccacaagugcgacaacgccugcaucggcagcaucagaaacggcaccuacgaccacgacguguacagagacgaggcccugaacaacagauuccagaucaagggcguggagcugaagagcggcuacaaggacuggauccuguggaucagcuucgccaucagcugcuuccugcugugcguggcccugcugggcuucaucaugugggccugccagaagggcaacaucagaugcaacaucugcaucuga

SEQ ID NO: 165474 - RNA, 1701 nt, Artificial Sequence
  derived and/or modified CDS sequence (opt4) from hemagglutinin__InfluenzaA__ADK99184
augaagaccaucaucgcccugagcuacauccugugccuggugagcgcccagaagcugcccggcaacgacaacagcaccgccacccugugccugggccaccacgccgugcccaacggcaccaucgugaagaccaucaccaacgaccagaucgaggugaccaacgccaccgagcuggugcagagcagcagcaccggcgagaucugcaacagcccccaccagauccuggacggcgagaacugcacccugaucgacgcccugcugggcgacccccagugcgacggcuuccagaacaagaagugggaccuguucguggagagaagcaaggccuacagcaacugcuaccccuacgacgugcccgacuacgccagccugagaagccugguggccagcagcggcacccuggaguucaacaacgagagcuucaacuggaccggcgugacccagaacggcaccagcagcgccugcaucagaagaagcaacaacagcuucuucagcagacugaacuggcugacccaccugaaguucaaguaccccgcccugaacgugaccaugcccaacaacgagcaguucgacaagcuguacaucuggggcgugcaccaccccggcaccgacaacgaccagaucuuccuguacgcccaggccagcggcagaaucaccgugagcaccaagagaagccagcagaccgugauccccaacaucggcagcagacccagagugagaaacauccccagcagaaucagcaucuacuggaccaucgugaagcccggcgacauccugcugaucaacagcaccggcaaccugaucgcccccagaggcuacuucaagaucagaagcggcaagagcagcaucaugagaagcgacgcccccaucggcaagugcaacagcgagugcaucacccccaacggcagcauccccaacgacaagcccuuccagaacgugaacagaaucaccuacggcgccugccccagauacgugaagcagaacacccugaagcuggccaccggcaugagaaacgugcccgagaagcagaccagaggcaucuucggcgccaucgccggcuucaucgagaacggcugggagggcaugguggacggcugguacggcuucagacaccagaacagcgagggcagaggccaggccgccgaccugaagagcacccaggccgccaucgaccagaucaacggcaagcugaacagacugaucggcaagaccaacgagaaguuccaccagaucgagaaggaguucagcgagguggagggcagaauccaggaccuggagaaguacguggaggacaccaagaucgaccuguggagcuacaacgccgagcugcugguggcccuggagaaccagcacaccaucgaccugaccgacagcgagaugaacaagcuguucgagaagaccaagaagcagcugagagagaacgccgaggacaugggcaacggcugcuucaagaucuaccacaagugcgacaacgccugcaucggcagcaucagaaacggcaccuacgaccacgacguguacagagacgaggcccugaacaacagauuccagaucaagggcguggagcugaagagcggcuacaaggacuggauccuguggaucagcuucgccaucagcugcuuccugcugugcguggcccugcugggcuucaucaugugggccugccagaagggcaacaucagaugcaacaucugcaucuga

SEQ ID NO: 165475 - RNA, 1701 nt, Artificial Sequence; identical to SEQ ID NO: 162494
  derived and/or modified CDS sequence (opt4) from hemagglutinin__InfluenzaA__ADK99195

SEQ ID NO: 165476 - RNA, 1701 nt, Artificial Sequence
  derived and/or modified CDS sequence (opt4) from hemagglutinin__InfluenzaA__ADK99206
augaagaccaucaucgcccugagcuacauccugugccugguguucgcccagaagcugcccggcaacgacaacagcaccgccacccugugccugggccaccacgccgugcccaacggcaccguggugaagaccaucaccaacgaccagaucgaggugaccaacgccaccgagcuggugcagagcagcagcaccggcgagaucugcgacagcccccaccagauccuggacggcaagaacugcacccugaucgacgcccugcugggcgacccccagugcgacggcuuccagaacaagaagugggaccuguucguggagagaagcaaggccuacagcaacugcuaccccuacgacgugcccgacuacgccagccugagaagccugguggccagcagcggcacccuggaguucaacaacgagagcuucaacuggaccggcgugacccagaacggcaccagcagcgccugcaucagaagaagcaagaacagcuucuucagcagacugaacuggcugacccaccugaacuucaaguaccccgcccugaacgugaccaugcccaacaacgagcaguucgacaagcuguacaucuggggcgugcaccaccccggcaccgacaaggaccagaucuuccuguacgcccaggccagcggcagaaucaccgugagcaccaagagaagccagcagaccgugauccccaacaucggcagcagacccagagugagaaacauccccagcagagugagcaucuacuggaccaucgugaagcccggcgacauccugcugaucaacagcaccggcaaccugaucgcccccagaggcuacuucaagaucagaagcggcaagagcagcaucaugagaagcgacgcccccaucggcaagugcaacagcgagugcaucacccccaacggcagcauccccaacgacaagcccuuccagaacgugaacagaaucaccuacggcgccugccccagauacgugaagcagaacacccugaagcuggccaccggcaugagaaacgugcccgagaagcagaccagaggcaucuucggcgccaucgccggcuucaucgagaacggcugggagggcaugguggacggcugguacggcuucagacaccagaacagcgagggcagaggccaggccgccgaccugaagagcacccaggccgccaucgaccagaucaacggcaagcugaacagacugaucggcaagaccaacgagaaguuccaccagaucgagaaggaguucagcgagguggagggcagaauccaggaccuggagaaguacguggaggacaccaagaucgaccuguggagcuacaacgccgagcugcuggugagccuggagaaccagcacaccaucgaccugaccgacagcgagaugaacaagcuguucgagaagaccaagaagcagcugagagagaacgccgaggacaugggcaacggcugcuucaagaucuaccacaagugcgacaacgccugcaucggcagcaucagaaacggcaccuacgaccacgacguguacagagacgaggcccugaacaacagauuccagaucaagggcguggagcugaagagcggcuacaaggacuggauccuguggaucagcuucgccaucagcugcuuccugcugugcguggcccugcugggcuucaucaugugggccugccagaagggcaacaucagaugcaacaucugcaucuga

SEQ ID NO: 165477 - RNA, 1701 nt, Artificial Sequence; identical to SEQ ID NO: 165411
  derived and/or modified CDS sequence (opt4) from hemagglutinin__InfluenzaA__ADK99217

SEQ ID NO: 165478 - RNA, 1701 nt, Artificial Sequence; identical to SEQ ID NO: 165411
  derived and/or modified CDS sequence (opt4) from hemagglutinin__InfluenzaA__ADK99228

SEQ ID NO: 165479 - RNA, 1701 nt, Artificial Sequence
  derived and/or modified CDS sequence (opt4) from hemagglutinin__InfluenzaA__ADK99239
augaagaccaucaucgcccugagcuacauccugugccugguguucgcccagaagcugcccggcaacgacaacagcaccgccacccugugccugggccaccacgccgugcccaacggcaccaucgugaagaccaucaccaacgaccagaucgaggugaccaacgccaccgagcuggugcagagcagcagcaccggcgagaucugcgacagcccccaccagauccuggacggcaagaacugcacccugaucgacgcccugcugggcgacccccagugcgacggcuuccagaacaagaagugggaccuguucguggagagaagcaaggccuacagcaacugcuaccccuacgacgugcccgacuacgccagccugagaagccugguggccagcagcggcacccuggaguucaacaacgagagcuucaacuggaccggcgugacccagaacggcaccagcagcgccugcaucagaagaagcaagaacagcuucuucagcagacugaacuggcugacccaccugaacuucaaguaccccgcccugaacgugaccaugcccaacaacgagcaguucgacaagcuguacaucuggggcgugcaccaccccggcaccgacaaggaccagaucuuccuguacgcccaggccagcggcagaaucaccgugagcaccaagagaagccagcagaccgugauccccaacaucggcagcagacccagagugagaaacauccccagcagaaucagcaucuacuggaccaucgugaagcccggcgacauccugcugaucaacagcaccggcaaccugaucgcccccagaggcuacuucaagaucagaagcggcaagagcagcaucaugagaagcgacgcccccaucggcaagugcaacagcgagugcaucacccccaacggcagcauccccaacgacaagcccuuccagaacgugaacagaaucaccuacggcgccugccccagauacgugaagcagaacacccugaagcuggccaccggcaugagaaacgugcccgagaagcagaccagaggcaucuucggcgccaucgccggcuucaucgagaacggcugggagggcaugguggacggcugguacggcuucagacaccagaacagcgagggcagaggccaggccgccgaccugaagagcacccaggccgccaucgaccagaucaacggcaagcugaacagacugaucggcaagaccaacgagaaguuccaccagaucgagaaggaguucagcgagguggagggcagaauccaggaccuggagaaguacguggaggacaccaagaucgaccuguggagcuacaacgccgagcugcugguggcccuggagaaccagcacaccaucgaccugaccgacagcgagaugaacaagcuguucgagaagaccaagaagcagcugagagagaacgccgaggacaugggcaacggcugcuucaagaucuaccacaagugcgacaacgccugcaucggcagcaucagaaacggcaccuacgaccacgacguguacagagacgaggcccugaacaacagauuccagaucaagggcguggagcugaagagcggcuacaaggacuggauccuguggaucagcuucgccaucagcugcuuccugcugugcguggcccugcugggcuucaucaugugggccugccagaagggcaacaucagaugcaacaucugcaucuga

SEQ ID NO: 165480 - RNA, 1701 nt, Artificial Sequence
  derived and/or modified CDS sequence (opt4) from hemagglutinin__InfluenzaA__ADK99250
augaagaccaucaucgcccugagcuacauccugugccugguguucgcccagaagcugcccggcaacgacaacagcaccgccacccugugccugggccaccacgccgugcccaacggcaccaucgugaagaccaucaccaacgaccagaucgaggugaccaacgccaccgagcuggugcagagcagcagcaccggcgagaucugcgacagcccccaccagauccuggacggcgagaacugcacccugaucgacgcccugcugggcgacccccagugcgacggcuuccagaacaagaagugggaccuguucguggagagaagcaaggccuacagcaacugcuaccccuacgacgugcccgacuacgccagccugagaagccugguggccagcagcggcacccuggaguucaacaacgagagcuucaacuggaccggcgugacccagaacggcaccagcagcgccugcaucagaagaagcaacaacagcuucuucagcagacugaacuggcugacccaccugaaguucaaguaccccgcccugaacgugaccaugcccaacaacgagcaguucgacaagcuguacaucuggggcgugcaccaccccggcaccgacaacgaccagaucuuccuguacgcccaggccagcggcagaaucaccgugagcaccaagagaagccagcagaccgugauccccaacaucggcagcagacccagagugagaaacauccccagcagaaucagcaucuacuggaccaucgugaagcccggcgacauccugcugaucaacagcaccggcaaccugaucgcccccagaggcuacuucaagaucagaagcggcaagagcagcaucaugagaagcgacgcccccaucggcaagugcaacagcgagugcaucacccccaacggcagcauccccaacgacaagcccuuccagaacgugaacagaaucaccuacggcgccugccccagauacgugaagcagaacacccugaagcuggccaccggcaugagaaacgugcccgagaagcagaccagaggcaucuucggcgccaucgccggcuucaucgagaacggcugggagggcaugguggacggcugguacggcuucagacaccagaacagcgagggcagaggccaggccgccgaccugaagagcacccaggccgccaucgaccagaucaacggcaagcugaacagacugaucggcaagaccaacgagaaguuccaccagaucgagaaggaguucagcgagguggagggcagaauccaggacaucgagaaguacguggaggacaccaagaucgaccuguggagcuacaacgccgagcugcugguggcccuggagaaccagcacaccaucgaccugaccgacagcgagaugaacaagcuguucgagaagaccaagaagcagcugagagagaacgccgaggacaugggcaacggcugcuucaagaucuaccacaagugcgacaacgccugcaucggcagcaucagaaacggcaccuacgaccacgacguguacagagacgaggcccugaacaacagauuccagaucaagggcguggagcugaagagcggcuacaaggacuggauccuguggaucagcuucgccaucagcugcuuccugcugugcguggcccugcugggcuucaucaugugggccugccagaagggcaacaucagaugcaacaucugcaucuga

SEQ ID NO: 165481 - RNA, 1701 nt, Artificial Sequence; identical to SEQ ID NO: 165411
  derived and/or modified CDS sequence (opt4) from hemagglutinin__InfluenzaA__ADK99261

SEQ ID NO: 165482 - RNA, 1701 nt, Artificial Sequence
  derived and/or modified CDS sequence (opt4) from hemagglutinin__InfluenzaA__ADK99283
augaagaccaucaucgcccugagcuacauccugugccugguguucgcccagaagcugcccggcaacgacaacagcaccgccacccugugccugggccaccacgccgugcccaacggcaccaucgugaagaccaucaccaacgaccagaucgaggugaccaacgccaccgagcuggugcagagcagcagcaccggcgagaucugcgacagcccccaccagauccuggacggcaagaacugcacccugaucgacgcccugcugggcgacccccagugcgacggcuuccagaacaagaagugggaccuguucguggagagaagcaaggccuacagcaacugcuaccccuacgacgugcccgacuacgccagccugagaagccugguggccagcagcggcacccuggaguucaacaacgagagcuucaacuggaccggcgugacccagaacggcaccagcagcgccugcaucagaagaagcaagaacagcuucuucagcagacugaacuggcugacccaccugaacuucaaguaccccgcccugaacgugaccaugcccaacaacgagcaguucgacaagcuguacaucuggggcgugcaccaccccggcaccgacaaggaccagaucuuccuguacgcccaggccagcggcagaaucaccgugagcaccaagagaagccagcagaccgugauccccaacaucggcagcagacccagagugagaaacauccccagcagaaucagcaucuacuggaccaucgugaagcccggcgacauccugcugaucaacagcaccggcaaccugaucgcccccagaggcuacuucaagaucagaagcggcaagagcagcaucaugagaagcgacgcccccaucggcaagugcaacagcgagugcaucacccccaacggcagcauccccaacgacaagcccuuccagaacgugaacagaaucaccuacggcgccugccccagauacgugaagcagaacacccugaagcuggccaccggcaugagaaacgugcccgagaagcagaccagaggcaucuucggcgccaucgccggcuucaucgagaacggcugggagggcaugguggacggcugguacggcuucagacaccagaacagcgagggcagaggccaggccgccgaccugaagagcacccaggccgccaucgaccagaucaacggcaagcugaacagacugaucggcaagaccaacgagaaguuccaccagaucgagaaggaguucagcgagguggagggcagaauccaggaccuggagagauacguggaggacaccaagaucgaccuguggagcuacaacgccgagcugcugguggcccuggagaaccagcacaccaucgaccugaccgacagcgagaugaacaagcuguucgagaagaccaagaagcagcugagagagaacgccgaggacaugggcaacggcugcuucaagaucuaccacaagugcgacaacgccugcaucggcagcaucagaaacggcaccuacgaccacgacguguacagagacgaggcccugaacaacagauuccagaucaagggcguggagcugaagagcggcuacaaggacuggauccuguggaucagcuucgccaucagcugcuuccugcugugcguggcccugcugggcuucaucaugugggccugccagaagggcaacaucagaugcaacaucugcaucuga

SEQ ID NO: 165483 - RNA, 1701 nt, Artificial Sequence
  derived and/or modified CDS sequence (opt4) from hemagglutinin__InfluenzaA__ADK99294
augaagaccaucaucgcccugagcuacauccugugccugguguucgcccagaagcugcccggcaacgacaacagcaccgccacccugugccugggccaccacgccgugcccaacggcaccaucgugaagaccaucaccaacgaccagaucgaggugaccaacgccaccgagcuggugcagagcagcagcaccggcgagaucugcgacagcccccaccagauccuggacggcgagaacugcacccugaucgacgcccugcugggcgacccccagugcgacggcuuccaggacaagaagugggaccuguucguggagagaagcaaggccuacagcaacugcuaccccuacgacgugcccgacuacgccagccugagaagccugguggccagcagcggcacccuggaguucaacaacgagagcuucaacuggaccggcgugacccagaacggcaccagcagcgccugcaucagaagaagcaacaacagcuucuucagcagacugaacuggcugacccaccugaacuucaaguaccccgcccugaacgugaccaugcccaacaacgagcaguucgacaagcuguacaucuggggcgugcaccaccccggcaccgacaaggaccagaucuuccuguacgcccaggccagcggcagaaucaccgugagcaccaagagaagccagcaggccgugauccccaacaucggcagcagacccagagugagaaacauccccagcagaaucagcaucuacuggaccaucgugaagcccggcgacauccugcugaucaacagcaccggcaaccugaucgcccccagaggcuacuucaagaucagaagcggcaagagcagcaucaugagaagcgacgcccccaucggcaagugcaacagcgagugcaucacccccaacggcagcauccccaacgacaagcccuuccagaacgugaacagaaucaccuacggcgccugccccagauacgugaagcagaacacccugaagcuggccaccggcaugagaaacgugcccgagaagcagaccagaggcaucuucggcgccaucgccggcuucaucgagaacggcugggagggcaugguggacggcugguacggcuucagacaccagaacagcgagggcagaggccaggccgccgaccugaagagcacccaggccgccaucgaccagaucaacggcaagcugaacagacugaucggcaagaccaacgagaaguuccaccagaucgagaaggaguucagcgagguggagggcagaauccaggaccuggagaaguacguggaggacaccaagaucgaccuguggagcuacaacgccgagcugcugguggcccuggagaaccagcacaccaucgaccugaccgacagcgagaugaacaagcuguucgagaagaccaagaagcagcugagagagaacgccgaggacaugggcaacggcugcuucaagaucuaccacaagugcgacaacgccugcaucggcagcaucagaaacggcaccuacgaccacgacguguacagagacgaggcccugaacaacagauuccagaucaagggcguggagcugaagagcggcuacaaggacuggauccuguggaucagcuucgccaucagcugcuuccugcugugcguggcccugcugggcuucaucaugugggccugccagaagggcaacaucagaugcaacaucugcaucuga

SEQ ID NO: 165484 - RNA, 1701 nt, Artificial Sequence; identical to SEQ ID NO: 162494
  derived and/or modified CDS sequence (opt4) from hemagglutinin__InfluenzaA__ADK99305

SEQ ID NO: 165485 - RNA, 1701 nt, Artificial Sequence; identical to SEQ ID NO: 162494
  derived and/or modified CDS sequence (opt4) from hemagglutinin__InfluenzaA__ADL27989

SEQ ID NO: 165486 - RNA, 1701 nt, Artificial Sequence
  derived and/or modified CDS sequence (opt4) from hemagglutinin__InfluenzaA__ADL28000
augaagaccaucaucgcccugagcuacauccugugccugguguucgcccagaagcugcccggcaacgacaacagcaccgccacccugugccugggccaccacgccgugcccaacggcaccauggugaagaccaucaccaacgaccagaucgaggugaccaacgccaccgagcuggugcagagcagcagcaccggcgagaucugcgacagcccccaccagauccuggacggcaagaacugcacccugaucgacgcccugcugggcgacccccagugcgacggcuuccagaacaagaagugggaccuguucguggagagaagcaaggccuacagcaacugcuaccccuacgacgugcccgacuacgccagccugagaagccugguggccagcagcggcacccuggaguucaacaacgagagcuucaacuggaccggcgugacccagaacggcaccagcagcgccugcaucagaagaagcaagaacagcuucuucagcagacugaacuggcugacccaccugaacuucaaguaccccgcccugaacgugaccaugcccaacaacgagcaguucgacaagcuguacaucuggggcgugcaccaccccggcaccgacaaggaccagaucuuccuguacgcccaggccagcgagagaaucaccgugagcaccaagagaagccagcagaccgugauccccaacaucggcagcagacccagagugagaaacauccccagcagaaucagcaucuacuggaccaucgugaagcccggcgacauccugcugaucaacagcaccggcaaccugaucgcccccagaggcuacuucaagaucagaagcggcaagagcagcaucaugagaagcgacgcccccaucggcaagugcaacagcgagugcaucacccccaacggcagcauccccaacgacaagcccuuccagaacgugaacagaaucaccuacggcgccugccccagauacgugaagcagagcacccugaagcuggccaccggcaugagaaacgugcccgagaagcagaccagaggcaucuucggcgccaucgccggcuucaucgagaacggcugggagggcaugguggacggcugguacggcuucagacaccagaacagcgagggcagaggccaggccgccgaccugaagagcacccaggccgccaucgaccagaucaacggcaagcugaacagacugaucggcaagaccaacgagaaguuccaccagaucgagaaggaguucagcgagguggagggcagaauccaggaccuggagaaguacguggaggacaccaagaucgaccuguggagcuacaacgccgagcugcugguggcccuggagaaccagcacaccaucgaccugaccgacagcgagaugaacaagcuguucgagaagaccaagaagcagcugagagagaacgccgaggacaugggcaacggcugcuucaagaucuaccacaagugcgacaacgccugcaucggcagcaucagaaacggcaccuacgaccacgacguguacagagacgaggcccugaacaacagauuccagaucaagggcguggagcugaagagcggcuacaaggacuggauccuguggaucagcuucgccaucagcugcuuccugcugugcguggcccugcugggcuucaucaugugggccugccagaagggcaacaucagaugcaacaucugcaucuga

SEQ ID NO: 165487 - RNA, 1701 nt, Artificial Sequence
  derived and/or modified CDS sequence (opt4) from hemagglutinin__InfluenzaA__ADL28011
augaagaccaucaucgcccugagcuacauccugugccugguguucgcccagaagcugcccggcaacgacaacagcaccgccacccugugccugggccaccacgccgugcccaacggcaccaucgugaagaccaucaccaacgaccagaucgaggugaccaacgccaccgagcuggugcagagcagcagcaccggcgagaucugcgacagcccccaccagauccuggacggcgagaacugcacccugaucgacgcccugcugggcgacccccagugcgacggcuuccagaacaagaagugggaccuguucguggagagaagcaaggccuacagcaacugcuaccccuacgacgugcccgacuacgccagccugagaagccugguggccagcagcggcacccuggaguucaacaacgagagcuucaacuggaccggcgugacccagaacggcaccagcagcgccugcaucagaagaagcaacaacagcuucuucagcagacugaacuggcugacccaccugaaguucaaguaccccgcccugaacgugaccaugcccaacaacgagcaguucgacaagcuguacaucuggggcgugcaccaccccggcaccgacaacgaccagaucuuccuguacgcccaggccagcggcagaaucaccgugagcaccagaagaagccagcagaccgugauccccaacaucggcagcagacccagagugagaaacauccccagcagaaucagcaucuacuggaccaucgugaagcccggcgacauccugcugaucaacagcaccggcaaccugaucgcccccagaggcuacuucaagaucagaagcggcaagagcagcaucaugagaagcgacgcccccaucggcaagugcaacagcgagugcaucacccccaacggcagcauccccaacgacaagcccuuccagaacgugaacagaaucaccuacggcgccugccccagauacgugaagcagaacacccugaagcuggccaccggcaugagaaacgugcccgagaagcagaccagaggcaucuucggcgccaucgccggcuucaucgagaacggcugggagggcaugguggacggcugguacggcuucagacaccagaacagcgagggcagaggccaggccgccgaccugaagagcacccaggccgccaucgaccagaucaacggcaagcugaacagacugaucggcaagaccaacgagaaguuccaccagaucgagaaggaguucagcgagguggagggcagaauccaggaccuggagaaguacguggaggacaccaagaucgaccuguggagcuacaacgccgagcugcugguggcccuggagaaccagcacaccaucgaccugaccgacagcgagaugaacaagcuguucgagaagaccaagaagcagcugagagagaacgccgaggacaugggcaacggcugcuucaagaucuaccacaagugcgacaacgccugcaucggcagcaucagaaacggcaccuacgaccacgacguguacagagacgaggcccugaacaacagauuccagaucaagggcguggagcugaagagcggcuacaaggacuggauccuguggaucagcuucgccaucagcugcuuccugcugugcguggcccugcugggcuucaucaugugggccugccagaagggcaacaucagaugcaacaucugcaucuga

SEQ ID NO: 165488 - RNA, 1701 nt, Artificial Sequence; identical to SEQ ID NO: 165411
  derived and/or modified CDS sequence (opt4) from hemagglutinin__InfluenzaA__ADL28022

SEQ ID NO: 165489 - RNA, 1701 nt, Artificial Sequence; identical to SEQ ID NO: 162494
  derived and/or modified CDS sequence (opt4) from hemagglutinin__InfluenzaA__ADL28033

SEQ ID NO: 165490 - RNA, 1701 nt, Artificial Sequence; identical to SEQ ID NO: 163673
  derived and/or modified CDS sequence (opt4) from hemagglutinin__InfluenzaA__ADL28044

SEQ ID NO: 165491 - RNA, 1701 nt, Artificial Sequence
  derived and/or modified CDS sequence (opt4) from hemagglutinin__InfluenzaA__ADL28055
augaagaccaucguggcccugagcuacauccugugccugguguucgcccagaagcugcccggcaacgacaacagcaccgccacccugugccugggccaccacgccgugcccaacggcaccaucgugaagaccaucaccaacgaccagaucgaggugaccaacgccaccgagcuggugcagagcagcagcaccggcgagaucugcgacagcccccaccagauccuggacggcgagaacugcacccugaucgacgcccugcugggcgacccccagugcgacggcuuccagaacaagaagugggaccuguucguggagagaagcaaggccuacagcaacugcuaccccuacgacgugcccgacuacgccagccugagaagccugguggccagcagcggcacccuggaguucaacaacgagagcuucaacuggaccggcgugacccagaacggcaccagcagcgccugcaucagaagaagcaacaacagcuucuucagcagacugaacuggcugacccaccugaaguucaaguaccccgcccugaacgugaccaugcccaacaacgagcaguucgacaagcuguacaucuggggcgugcaccaccccggcaccgacaacgaccagaucuuccuguacgcccaggccagcggcagaaucaccgugagcaccaagagaagccagcagaccgugauccccaacaucggcagcagacccagagugagaaacauccccagcagaaucagcaucuacuggaccaucgugaagcccggcgacauccugcugaucaacagcaccggcaaccugaucgcccccagaggcuacuucaagaucagaagcggcaagagcagcaucaugagaagcgacgcccccaucggcaagugcaacagcgagugcaucacccccaacggcagcauccccaacgacaagcccuuccagaacgugaacagaaucaccuacggcgccugccccagauacgugaagcagaacacccugaagcuggccaccggcaugagaaacgugcccgagaagcagaccagaggcaucuucggcgccaucgccggcuucaucgagaacggcugggagggcaugguggacggcugguacggcuucagacaccagaacagcgagggcagaggccaggccgccgaccugaagagcacccaggccgccaucgaccagaucaacggcaagcugaacagacugaucggcaagaccaacgagaaguuccaccagaucgagaaggaguucagcgagguggagggcagaauccaggaccuggagaaguacguggaggacaccaagaucgaccuguggagcuacaacgccgagcugcugguggcccuggagaaccagcacaccaucgaccugaccgacagcgagaugaacaagcuguucgagaagaccaagaagcagcugagagagaacgccgaggacaugggcaacggcugcuucaagaucuaccacaagugcgacaacgccugcaucggcagcaucagaaacggcaccuacgaccacgacguguacagagacgaggcccugaacaacagauuccagaucaagggcguggagcugaagagcggcuacaaggacuggauccuguggaucagcuucgccaucagcugcuuccugcugugcguggcccugcugggcuucaucaugugggccugccagaagggcaacaucagaugcaacaucugcaucuga

SEQ ID NO: 165492 - RNA, 1701 nt, Artificial Sequence; identical to SEQ ID NO: 162494
  derived and/or modified CDS sequence (opt4) from hemagglutinin__InfluenzaA__ADL28066

SEQ ID NO: 165493 - RNA, 1701 nt, Artificial Sequence; identical to SEQ ID NO: 165411
  derived and/or modified CDS sequence (opt4) from hemagglutinin__InfluenzaA__ADL28077

SEQ ID NO: 165494 - RNA, 1701 nt, Artificial Sequence
  derived and/or modified CDS sequence (opt4) from hemagglutinin__InfluenzaA__ADL28088
augaagaccaucaucgcccugagcuacauccugugccugguguucgcccagaagcugcccggcaacgacaacagcaccgccacccugugccugggccaccacgccgugcccaacggcaccaucgugaagaccaucaccaacgaccagaucgaggugaccaacgccaccgagcuggugcagagcagcagcaccggcgagaucugcgacagcccccaccagauccuggacggcgagaacugcacccugaucgacgcccugcugggcgacccccagugcgacggcuuccagaacaagaagugggaccuguucguggagagaagcaaggccuacagcaacugcuaccccuacgacgugcccgacuacgccagccugagaagccugguggccagcagcggcacccuggaguucaacaacgagagcuucaacuggaccggcgugacccagaacggcaccagcagcgccugcaucagaagaagcaacaacagcuucuucagcagacugaacuggcugacccaccugaaguucaaguaccccgcccugaacgugaccaugcccaacaacgagcaguucgacaagcuguacaucuggggcgugcaccaccccggcaccgacaacgaccagaucuuccuguacagccaggccagcggcagaaucaccgugagcaccaagagaagccagcagaccgugauccccaacaucggcagcagacccagagugagaaacauccccagcagaaucagcaucuacuggaccaucgugaagcccggcgacauccugcugaucaacagcaccggcaaccugaucgcccccagaggcuacuucaagaucagaagcggcaagagcagcaucaugagaagcgacgcccccaucggcaagugcaacagcgagugcaucacccccaacggcagcauccccaacgacaagcccuuccagaacgugaacagaaucaccuacggcgccugccccagauacgugaagcagaacacccugaagcuggccaccggcaugagaaacgugcccgagaagcagaccagaggcaucuucggcgccaucgccggcuucaucgagaacggcugggagggcaugguggacggcugguacggcuucagacaccagaacagcgagggcagaggccaggccgccgaccugaagagcacccaggccgccaucgaccagaucaacggcaagcugaacagacugaucggcaagaccaacgagaaguuccaccagaucgagaaggaguucagcgagguggagggcagaauccaggaccuggagaaguacguggaggacaccaagaucgaccuguggagcuacaacgccgagcugcugguggcccuggagaaccagcacaccaucgaccugaccgacagcgagaugaacaagcuguucgagaagaccaagaagcagcugagagagaacgccgaggacaugggcaacggcugcuucaagaucuaccacaagugcgacaacgccugcaucggcagcaucagaaacggcaccuacgaccacgacguguacagagacgaggcccugaacaacagauuccagaucaagggcguggagcugaagagcggcuacaaggacuggauccuguggaucagcuucgccaucagcugcuuccugcugugcguggcccugcugggcuucaucaugugggccugccagaagggcaacaucagaugcaacaucugcaucuga

SEQ ID NO: 165495 - RNA, 1701 nt, Artificial Sequence; identical to SEQ ID NO: 162494
  derived and/or modified CDS sequence (opt4) from hemagglutinin__InfluenzaA__ADL28099

SEQ ID NO: 165496 - RNA, 1701 nt, Artificial Sequence
  derived and/or modified CDS sequence (opt4) from hemagglutinin__InfluenzaA__ADL28110
augaagaccaucaucgcccugagcuacauccugugccugguguucgcccagaagcugcccggcaacgacaacagcaccgccacccugugcaucggccaccacgccgugcccaacggcaccaucgugaagaccaucaccaacgaccagaucgaggugaccaacgccaccgagcuggugcagaacagcagcaccggcgagaucugcgacagcccccaccagauccuggacggcaagaacugcacccugaucgacgcccugcugggcgacccccagugcgacggcuuccagaacaagaagugggaccuguucguggagagaagcaaggccuacagcaacugcuaccccuacgacgugcccgacuacgccagccugagaagccugguggccagcagcggcacccuggaguucaacaacgagagcuucaacuggaccggcgugacccagaacggcaccagcagcgccugcaucagaagaagcaagaacagcuucuucagcagacugaacuggcugacccaccugaacuucaaguaccccgcccugaacgugaccaugcccaacaacgagcaguucgacaagcuguacaucuggggcgugcaccaccccggcaccgacaaggaccagaucuuccuguacgcccaggccagcggcagaaucaccgugagcaccaagagaagccagcagaccgccauccccaacaucggcagcagacccagagugagaaacauccccagcagaaucagcaucuacuggaccaucgugaagcccggcgacauccugcugaucaacagcaccggcaaccugaucgcccccagaggcuacuucaagaucagaagcggcaagagcagcaucaugagaagcgacgcccccaucgacaagugcaacagcgagugcaucacccccaacggcagcauccccaacgacaagcccuuccagaacgugaacagaaucaccuacggcgccugccccagauacgugaagcagaacacccugaagcuggccaccggcaugagaaacgugcccgagaagcagaccagaggcaucuucggcgccaucgccggcuucaucgagaacggcugggagggcaugguggacggcugguacggcuucagacaccagaacagcgagggcagaggccaggccgccgaccugaagagcacccaggccgccaucgaccagaucaacggcaagcugaacagacugaucggcaagaccaacgagaaguuccaccagaucgagaaggaguucagcgagguggagggcagaauccaggaccuggagaaguacguggaggacaccaagaucgaccuguggagcuacaacgccgagcugcugguggcccuggagaaccagcacaccaucgaccugaccgacagcgagaugaacaagcuguucgagaagaccaagaagcagcugagagagaacgccgaggacaugggcaacggcugcuucaagaucuaccacaagugcgacaacgccugcaucggcagcaucagaaacggcaccuacgaccacgacguguacagagacgaggcccugaacaacagauuccagaucaagggcguggagcugaagagcggcuacaaggacuggauccuguggaucagcuucgccaucagcugcuuccugcugugcguggcccugcugggcuucaucaugugggccugccagaagggcaacaucagaugcaacaucugcaucuga

SEQ ID NO: 165497 - RNA, 1701 nt, Artificial Sequence
  derived and/or modified CDS sequence (opt4) from hemagglutinin__InfluenzaA__ADL28126
augaagaccaucaucgcccugagcuacauccugugccugguguucgcccagaagcugcccggcaacgacaacagcaccgccacccugugccugggccaccacgccgugcccaacggcaccaucgugaagaccaucaccaacgaccagaucgaggugaccaacgccaccgagcuggugcagagcagcagcaccggcgagaucugcgacagcccccaccagauccuggacggcgagaacugcacccugaucgacgcccugcugggcgacccccagugcgacggcuuccagaacaagaagugggaccuguucguggagagaagcaaggccuacagcaacugcuaccccuacgacgugcccgacuacgccagccugagaagccugguggccagcagcggcacccuggaguucaacaacgagagcuucaacuggaccggcgugaaccagaacggcaccagcagcgccugcaucagaagaagcaacaacagcuucuucagcagacugaacuggcugacccaccugaaguucaaguaccccgcccugaacgugaccaugcccaacaacgagcaguucgacaagcuguacaucuggggcgugcaccaccccggcaccgacaacgaccagaucuuccuguacgcccaggccagcggcagaaucaccgugagcaccaagagaagccagcagaccgugauccccaacaucggcagcagacccagagugagaaacauccccagcagaaucagcaucuacuggaccaucgugaagcccggcgacauccugcugaucaacagcaccggcaaccugaucgcccccagaggcuacuucaagaucagaagcggcaagagcagcaucaugagaagcgacgcccccaucggcaagugcaacagcgagugcaucacccccaacggcagcauccccaacgacaagcccuuccagaacgugaacagaaucaccuacggcgccugccccagauacgugaagcagaacacccugaagcuggccaccggcaugagaaacgugcccgagaagcagaccagaggcaucuucggcgccaucgccggcuucaucgagaacggcugggagggcaugguggacggcugguacggcuucagacaccagaacagcgagggcagaggccaggccgccgaccugaagagcacccaggccgccaucgaccagaucaacggcaagcugaacagacugaucggcaagaccaacgagaaguuccaccagaucgagaaggaguucagcgagguggagggcagaauccaggaccuggagaaguacguggaggacaccaagaucgaccuguggagcuacaacgccgagcugcugguggcccuggagaaccagcacaccaucgaccugaccgacagcgagaugaacaagcuguucgagaagaccaagaagcagcugagagagaacgccgaggacaugggcaacggcugcuucaagaucuaccacaagugcgacaacgccugcaucggcagcaucagaaacggcaccuacgaccacgacguguacagagacgaggcccugaacaacagauuccagaucaagggcguggagcugaagagcggcuacaaggacuggauccuguggaucagcuucgccaucagcugcuuccugcugugcguggcccugcugggcuucaucaugugggccugccagaagggcaacaucagaugcaacaucugcaucuga

SEQ ID NO: 165498 - RNA, 1701 nt, Artificial Sequence
  derived and/or modified CDS sequence (opt4) from hemagglutinin__InfluenzaA__ADL28137
augaagaccaucaucgcccugagcuacauccugugccuggugagcgcccagaagcugcccggcaacgacaacagcaccgccacccugugccugggccaccacgccgugcccaacggcaccaucgugaagaccaucaccaacgaccagaucgaggugaccaacgccaccgagcuggugcagagcagcagcaccggcgagaucugcgacggcccccaccagauccuggacggcgagaacugcacccugaucgacgcccugcugggcgacccccagugcgacggcuuccagaacaagaagugggaccuguucguggagagaagcaaggccuacagcaacugcuaccccuacgacgugcccgacuacgccagccugagaagccugguggccagcagcggcacccuggaguucaacaacgagagcuucaacuggaccggcgugacccagaacggcaccagcagcgccugcaucagaagaagcaacaacagcuucuucagcagacugaacuggcugacccaccugaaguucaaguaccccgcccugaacgugaccaugcccaacaacgagcaguucgacaagcuguacaucuggggcgugcaccaccccggcaccgacaacgaccagaucuuccuguacgcccaggccagcggcagaaucaccgugagcaccaagagaagccagcagaccgugauccccaacaucggcagcagacccagagugagaaacauccccagcagaaucagcaucuacuggaccaucgugaagcccggcgacauccugcugaucaacagcaccggcaaccugaucgcccccagaggcuacuucaagaucagaagcggcaagagcagcaucaugagaagcgacgcccccaucggcaagugcaacagcgagugcaucacccccaacggcagcauccccaacgacaagcccuuccagaacgugaacagaaucaccuacggcgccugccccagauacgugaagcagaacacccugaagcuggccaccggcaugagaaacgugcccgagaagcagaccagaggcaucuucggcgccaucgccggcuucaucgagaacggcugggagggcaugguggacggcugguacggcuucagacaccagaacagcgagggcagaggccaggccgccgaccugaagagcacccaggccgccaucgaccagaucaacggcaagcugaacagacugaucggcaagaccaacgagaaguuccaccagaucgagaaggaguucagcgagguggagggcagaauccaggaccuggagaaguacguggaggacaccaagaucgaccuguggagcuacaacgccgagcugcugguggcccuggagaaccagcacaccaucgaccugaccgacagcgagaugaacaagcuguucgagaagaccaagaagcagcugagagagaacgccgaggacaugggcaacggcugcuucaagaucuaccacaagugcgacaacgccugcaucggcagcaucagaaacggcaccuacgaccacgacguguacagagacgaggcccugaacaacagauuccagaucaagggcguggagcugaagagcggcuacaaggacuggauccuguggaucagcuucgccaucagcugcuuccugcugugcguggcccugcugggcuucaucaugugggccugccagaagggcaacaucagaugcaacaucugcaucuga

SEQ ID NO: 165499 - RNA, 1701 nt, Artificial Sequence; identical to SEQ ID NO: 162494
  derived and/or modified CDS sequence (opt4) from hemagglutinin__InfluenzaA__ADL28148

SEQ ID NO: 165500 - RNA, 1701 nt, Artificial Sequence; identical to SEQ ID NO: 165411
  derived and/or modified CDS sequence (opt4) from hemagglutinin__InfluenzaA__ADL28170

SEQ ID NO: 165501 - RNA, 1701 nt, Artificial Sequence; identical to SEQ ID NO: 162494
  derived and/or modified CDS sequence (opt4) from hemagglutinin__InfluenzaA__ADL28181

SEQ ID NO: 165502 - RNA, 1701 nt, Artificial Sequence; identical to SEQ ID NO: 165406
  derived and/or modified CDS sequence (opt4) from hemagglutinin__InfluenzaA__ADL28192

SEQ ID NO: 165503 - RNA, 1701 nt, Artificial Sequence; identical to SEQ ID NO: 165412
  derived and/or modified CDS sequence (opt4) from hemagglutinin__InfluenzaA__ADL28203

SEQ ID NO: 165504 - RNA, 1701 nt, Artificial Sequence; identical to SEQ ID NO: 163471
  derived and/or modified CDS sequence (opt4) from hemagglutinin__InfluenzaA__ADL28214

SEQ ID NO: 165505 - RNA, 1701 nt, Artificial Sequence
  derived and/or modified CDS sequence (opt4) from hemagglutinin__InfluenzaA__ADL28225
augaagaccaucaucgcccugagcuacauccugugccugguguucgcccagaagcugcccggcaacgacaacagcaccgccacccugugccugggccaccacgccgugcccaacggcaccaucgugaagaccaucaccaacgaccagaucgaggugaccaacgccaccgagcuggugcagagcagcagcaccggcgagaucugcgacagcccccaccagauccuggacggcgagaacugcacccugaucgacgcccugcugggcgacccccagugcgacggcuuccagaacaagaagugggaccuguucguggagagaagcaaggccuacagcaacugcuaccccuacgacgugcccgacuacgccagccugagaagccugguggccagcagcggcacccuggaguucaacaacgagagcuucaacuggaccggcgugacccagaacggcaccagcagcgccugcaucagaagaagcaacaacagcuucuucagcagacugaacuggcugacccaccugaaguucaaguaccccgcccugaacgugaccaugcccaacaacgagcaguucgacaagcuguacaucuggggcgugcaccaccccggcaccgacaacgaccagaucuuccuguacagccaggccagcggcagaaucaccgugagcaccaagagaagccagcagaccgugauccccaacaucggcagcagacccagagugagaaacauccccagcagaaucagcaucuacuggaccaucgugaagcccggcgacauccugcugaucaacagcaccggcaaccugaucgcccccagaggcuacuucaagaucagaagcggcaagagcagcaucaugagaagcgacgcccccaucggcaagugcaacagcgagugcaucacccccaacggcagcauccccaacgacaagcccuuccagaacgugaacagaaucaccuacggcgccugccccagauacgugaagcagaacacccugaagcuggccaccggcaugagaaacgugcccgagaagcagaccagaggcaucuucggcgccaucgccggcuucaucgagaacggcugggagggcaugguggacggcugguacggcuucagacaccagaacagcgagggcagaggccaggccgccgaccugaagagcacccaggccgccaucgaccagaucaacggcaagcugaacagacugaucggcaagaccaacgagaaguuccaccagaucgagaaggaguucagcgagguggagggcagaauccaggaccuggagaaguacguggaggacaccaagaccgaccuguggagcuacaacgccgagcugcugguggcccuggagaaccagcacaccaucgaccugaccgacagcgagaugaacaagcuguucgagaagaccaagaagcagcugagagagaacgccgaggacaugggcaacggcugcuucaagaucuaccacaagugcgacaacgccugcaucggcagcaucagaaacggcaccuacgaccacgacguguacagagacgaggcccugaacaacagauuccagaucaagggcguggagcugaagagcggcuacaaggacuggauccuguggaucagcuucgccaucagcugcuuccugcugugcguggcccugcugggcuucaucaugugggccugccagaagggcaacaucagaugcaacaucugcaucuga

SEQ ID NO: 165506 - RNA, 1701 nt, Artificial Sequence; identical to SEQ ID NO: 165411
  derived and/or modified CDS sequence (opt4) from hemagglutinin__InfluenzaA__ADL28236

SEQ ID NO: 165507 - RNA, 1701 nt, Artificial Sequence; identical to SEQ ID NO: 162494
  derived and/or modified CDS sequence (opt4) from hemagglutinin__InfluenzaA__ADL28247

SEQ ID NO: 165508 - RNA, 1701 nt, Artificial Sequence; identical to SEQ ID NO: 165424
  derived and/or modified CDS sequence (opt4) from hemagglutinin__InfluenzaA__ADL28258

SEQ ID NO: 165509 - RNA, 1701 nt, Artificial Sequence; identical to SEQ ID NO: 162494
  derived and/or modified CDS sequence (opt4) from hemagglutinin__InfluenzaA__ADL28370

SEQ ID NO: 165510 - RNA, 1701 nt, Artificial Sequence; identical to SEQ ID NO: 162729
  derived and/or modified CDS sequence (opt4) from hemagglutinin__InfluenzaA__ADL29672

SEQ ID NO: 165511 - RNA, 1701 nt, Artificial Sequence; identical to SEQ ID NO: 162971
  derived and/or modified CDS sequence (opt4) from hemagglutinin__InfluenzaA__ADL29682

SEQ ID NO: 165512 - RNA, 1701 nt, Artificial Sequence; identical to SEQ ID NO: 162729
  derived and/or modified CDS sequence (opt4) from hemagglutinin__InfluenzaA__ADL29692

SEQ ID NO: 165513 - RNA, 1701 nt, Artificial Sequence
  derived and/or modified CDS sequence (opt4) from hemagglutinin__InfluenzaA__ADL29702
augaaggccauccugguggugcugcuguacaccuucgccaccgccaacgccgacacccugugcaucggcuaccacgccaacaacagcaccgacaccguggacaccgugcuggagaagaacgugaccgugacccacagcgugaaccugcuggaggacaagcacaacggcaagcugugcaagcugagaggcguggccccccugcaccugggcaagugcaacaucgccggcuggauccugggcaaccccgagugcgagagccugagcaccgccagcagcuggagcuacaucguggagaccagcagcagcgacaacggcaccugcuaccccggcgacuucaucgacuacgaggagcugagagagcagcugagcagcgugagcagcuucgagagauucgagaucuuccccaagaccagcagcuggcccaaccacgacagcaacaagggcgugaccgccgccugcccccacgccggcgccaagagcuucuacaagaaccugaucuggcuggugaagaagggcaacagcuaccccaagcugagcaagagcuacaucaacgacaagggcaaggaggugcuggugcuguggggcauccaccaccccagcaccagcgccgaccagcagagccuguaccagaacgccgacaccuacguguucgugggcaccagcagauacagcaagaaguucaagcccgagaucgccaucagacccaaggugagagaccaggagggcagaaugaacuacuacuggacccugguggagcccggcgacaagaucaccuucgaggccaccggcaaccugguggugcccagauacgccuucgccauggagagaaacgccggcagcggcaucaucaucagcgacacccccgugcacgacugcaacaccaccugccagacccccaagggcgccaucaacaccagccugcccuuccagaacauccaccccaucaccaucggcaagugccccaaguacgugaagagcaccaagcugagacuggccaccggccugagaaacgugcccagcauccagagcagaggccuguucggcgccaucgccggcuucaucgagggcggcuggaccggcaugguggacggcugguacggcuaccaccaccagaacgagcagggcagcggcuacgccgccgaccugaagagcacccagaacgccaucgacgagaucaccaacaaggugaacagcgugaucgagaagaugaacacccaguucaccgccgugggcaaggaguucaaccaccuggagaagagaaucgagaaccugaacaagaagaucgacgacggcuuccuggacaucuggaccuacaacgccgagcugcuggugcugcuggagaacgagagaacccuggacuaccacgacagcaacgugaagaaccuguacgagaaggugagaaaccagcugaagaacaacgccaaggagaucggcaacggcugcuucgaguucuaccacaagugcgacaacaccugcauggagagcgugaagaacggcaccuacgacuaccccaaguacagcgaggaggccaagcugaacagagaggagaucgacggcgugaagcuggagagcaccagaaucuaccagauccuggccaucuacagcaccguggccagcagccuggugcugguggugagccugggcgccaucagcuucuggaugugcagcaacggcagccugcagugcagaaucugcaucuga

SEQ ID NO: 165514 - RNA, 1701 nt, Artificial Sequence; identical to SEQ ID NO: 162729
  derived and/or modified CDS sequence (opt4) from hemagglutinin__InfluenzaA__ADL29730

SEQ ID NO: 165515 - RNA, 1701 nt, Artificial Sequence; identical to SEQ ID NO: 162729
  derived and/or modified CDS sequence (opt4) from hemagglutinin__InfluenzaA__ADL29740

SEQ ID NO: 165516 - RNA, 1701 nt, Artificial Sequence; identical to SEQ ID NO: 162729
  derived and/or modified CDS sequence (opt4) from hemagglutinin__InfluenzaA__ADL29750

SEQ ID NO: 165517 - RNA, 1701 nt, Artificial Sequence
  derived and/or modified CDS sequence (opt4) from hemagglutinin__InfluenzaA__ADL29760
augaaggccauccugguggugcugcuguacaccuucgccaccgccaacgccgacacccugugcaucggcuaccacgccaacaacagcaccgacaccguggacaccgugcuggagaagaacgugaccgugacccacagcgugaaccugcuggaguacaagcacaacggcaagcugugcaagcugagaggcguggccccccugcaccugggcaagugcaacaucgccggcuggauccugggcaaccccgagugcgagagccugagcaccgccagcagcuggagcuacaucguggagaccagcagcagcgacaacggcaccugcuaccccggcgacuucaucgacuacgaggagcugagagagcagcugagcagcgugagcagcuucgagagauucgagaucuuccccaagaccagcagcuggcccaaccacgacagcaacaagggcgugaccgccgccugcccccacgccggcgccaagagcuucuacaagaaccugaucuggcuggugaagaagggcaacagcuaccccaagcugagcaagagcuacaucaacgacaagggcaaggaggugcuggugcuguggggcauccaccaccccagcaccagcgccgaccagcagagccuguaccagaacgccgacgccuacguguucgugggcaccagcagauacagcaagaaguucaagcccgagaucgccaucagacccaaggugagagaccaggagggcagaaugaacuacuacuggacccugguggagcccggcgacaagaucaccuucgaggccaccggcaaccugguggugcccagauacgccuucgccauggagagaaacgccggcagcggcaucaucaucagcgacacccccgugcacgacugcaacaccaccugccagacccccaagggcgccaucaacaccagccugcccuuccagaacauccaccccaucaccaucggcaagugccccaaguacgugaagagcaccaagcugagacuggccaccggccugagaaacgugcccagcauccagagcagaggccuguucggcgccaucgccggcuucaucgagggcggcuggaccggcaugguggacggcugguacggcuaccaccaccagaacgagcagggcagcggcuacgccgccgaccugaagagcacccagaacgccaucgacgagaucaccaacaaggugaacagcgugaucgagaagaugaacacccaguucaccgccgugggcaaggaguucaaccaccuggagaagagaaucgagaaccugaacaagaagguggacgacggcuuccuggacaucuggaccuacaacgccgagcugcuggugcugcuggagaacgagagaacccuggacuaccacgacagcaacgugaagaaccuguacgagaaggugagaagccagcugaagaacaacgccaaggagaucggcaacggcugcuucgaguucuaccacaagugcgacaacaccugcauggagagcgugaagaacggcaccuacgacuaccccaaguacagcgaggaggccaagcugaacagagaggagaucgacggcgugaagcuggagagcaccagaaucuaccagauccuggccaucuacagcaccguggccagcagccuggugcugguggugagccugggcgccaucagcuucuggaugugcagcaacggcagccugcagugcagaaucugcaucuga

SEQ ID NO: 165518 - RNA, 1701 nt, Artificial Sequence; identical to SEQ ID NO: 162729
  derived and/or modified CDS sequence (opt4) from hemagglutinin__InfluenzaA__ADL29770

SEQ ID NO: 165519 - RNA, 1701 nt, Artificial Sequence; identical to SEQ ID NO: 164229
  derived and/or modified CDS sequence (opt4) from hemagglutinin__InfluenzaA__ADL29780

SEQ ID NO: 165520 - RNA, 1701 nt, Artificial Sequence
  derived and/or modified CDS sequence (opt4) from hemagglutinin__InfluenzaA__ADL29879
augaaggccauccugguggugcugcuguacaccuucgccaccgccaacgccgacacccugugcaucggcuaccacgccaacaacagcaccgacaccguggacaccgugcuggagaagaacgugaccgugacccacagcgugaaccugcuggaggacaagcacaacggcaagcugugcaagcugagaggcguggccccccugcaccugggcaagugcaacaucgccggcuggauccugggcaaccccgagugcgagagccugagcaccgccagcagcuggagcuacaucguggagaccagcagcagcgacaacggcaccugcuaccccggcgacuucaucgacuacgaggagcugagagagcagcugagcagcgugagcagcuucgagagauucgagaucuuccccaagaccagcagcuggcccaaccacgacagcaacaagggcgugaccgccgccugcccccacgccggcgccaagagcuucuacaagaaccugaucuggcuggugaagaagggcaacagcuaccccaagcugagcaagagcuacaucaacgacaagggcaaggaggugcuggugcuguggggcauccaccaccccagcaccagcgccgaccagcagagccuguaccagaacgccgacagcuacguguucgugggcaccagcaaguacagcaagaaguucaagcccgagaucgccaucagacccaaggugagagaccaggagggcagaaugaacuacuacuggacccugguggagcccggcgacaagaucaccuucgaggccaccggcaaccugguggugcccagauacgccuucgccauggagagaaacgccggcagcggcaucaucaucagcgacacccccgugcacgacugcaacaccaccugccagacccccaagggcgccaucaacaccagccugcccuuccagaacauccaccccaucaccaucggcaagugccccaaguacgugaagagcaccaagcugagacuggccaccggccugagaaacgugcccagcauccagagcagaggccuguucggcgccaucgccggcuucaucgagggcggcuggaccggcaugguggacggcugguacggcuaccaccaccagaacgagcagggcagcggcuacgccgccgaccugaagagcacccagaacgccaucgacgagaucaccaacaaggugaacagcgugaucgagaagaugaacacccaguucaccgccgugggcaaggaguucaaccaccuggagaagagaaucgagaaccugaacaagaagguggacgacggcuuccuggacaucuggaccuacaacgccgagcugcuggugcugcuggagaacgagagaacccuggacuaccacgacagcaacgugaagaaccuguacgagaaggugagaagccagcugaagaacaacgccaaggagaucggcaacggcugcuucgaguucuaccacaagugcgacaacaccugcauggagagcgugaagaacggcaccuacgacuaccccaaguacagcgaggaggccaagcugaacagagaggagaucgacggcgugaagcuggagagcaccagaaucuaccagauccuggccaucuacagcaccguggccagcagccuggugcugguggugagccugggcgccaucagcuucuggaugugcagcaacggcagccugcagugcagaaucugcaucuga

SEQ ID NO: 165521 - RNA, 1701 nt, Artificial Sequence
  derived and/or modified CDS sequence (opt4) from hemagglutinin__InfluenzaA__ADL32017
augaaggccauccugguggugcugcuguacaccuucgccaccgccaacgccgacacccugugcaucggcuaccacgccaacaacagcaccgacaccguggacaccgugcuggagaagaacgugaccgugacccacagcgugaaccugcuggaggacaagcacaacggcaagcugugccagcugagaggcguggccccccugcaccugggcaagugcaacaucgccggcuggauccugggcaaccccgagugcgagagccugagcaccgccagcagcuggagcuacaucguggagaccagcagcagcgacaacggcaccugcuaccccggcgacuucaucgacuacgaggagcugagagagcagcugagcagcgugagcagcuucgagagauucgagaucuuccccaagaccagcagcuggcccaaccacgacagcaacaagggcgugaccgccgccugcccccacgccggcgccaagagcuucuacaagaaccugaucuggcuggugaagaagggcaacagcuaccccaagcugagcaagagcuacaucaacgacaagggcaaggaggugcuggugcuguggggcauccaccaccccagcaccagcgccgaccagcagagccuguaccagaacgccgacaccuacguguucgugggcaccagcagauacagcaagaaguucaagcccgagaucgccaucagacccaaggugagagaccaggagggcagaaugaacuacuacuggacccugguggagcccggcgacaagaucaccuucgaggccaccggcaaccugguggugcccagauacgccuucgccauggagagaaacgccggcagcggcaucaucaucagcgacacccccgugcacgacugcaacaccaccugccagacccccaagggcgccaucaacaccagccugcccuuccagaacauccaccccaucaccaucggcaagugccccaaguacgugaagagcaccaagcugagacuggccaccggccugagaaacgugcccagcauccagagcagaggccuguucggcgccaucgccggcuucaucgagggcggcuggaccggcaugguggacggcugguacggcuaccaccaccagaacgagcagggcagcggcuacgccgccgaccugaagagcacccagaacgccaucgacgagaucaccaacaaggugaacagcgugaucgagaagaugaacacccaguucaccgccgugggcaaggaguucaaccaccuggagaagagaaucgagaaccugaacaagaagaucgacgacggcuuccuggacaucuggaccuacaacgccgagcugcuggugcugcuggagaacgagagaacccuggacuaccacgacagcaacgugaagaaccuguacgagaaggugagaagccagcugaagaacaacgccaaggagaucggcaacggcugcuucgaguucuaccacaagugcgacaacaccugcauggagagcgugaagaacggcaccuacgacuaccccaaguacagcgaggaggccaagcugaacagagaggagaucgacggcgugaagcuggagagcaccagaaucuaccagauccuggccaucuacagcaccguggccagcagccuggugcugguggugagccugggcgccaucagcuucuggaugugcagcaacggcagccugcagugcagaaucugcaucuga

SEQ ID NO: 165522 - RNA, 1701 nt, Artificial Sequence
  derived and/or modified CDS sequence (opt4) from hemagglutinin__InfluenzaA__ADL32037
augaaggccauccugguggugcugcuguacaccuucgccaccgccaacgccgacacccugugcaucggcuaccacgccaacaacagcaccgacaccguggacaccgugcuggagaagaacgugaccgugacccacagcgugaaccugcuggaggacaagcacaacggcaagcugugcaagcugagaggcguggccccccugcaccugggcaagugcaacaucgccggcuggauccugggcaaccccgagugcgagagccugagcaccgccagcagcuggagcuacaucguggagaccagcagcagcgacaacggcaccugcuaccccggcgacuucaucgacuacgaggagcugagagagcagcugagcagcgugagcagcuucgagagauucgagaucuuccccaagaccagcagcuggcccaaccacgacagcaacaagggcgugaccgccgccugcccccacgccggcgccaagagcuucuacaagaaccugaucuggcuggugaagaagggcaacagcuaccccaagcugagcaagagcuacaucaacgacaagggcaaggaggugcuggugcuguggggcauccaccaccccagcaccagcguggaccagcagagccuguaccagaacgccgacgccuacguguucgugggcaccagcagauacagcaagaaguucaagcccgagaucgccaucagacccaaggugagagaccaggagggcagaaugaacuacuacuggacccugguggagcccggcgacaagaucaccuucgaggccaccggcaaccugguggugcccagauacgccuucgccauggagagaaacgccggcagcggcaucaucaucagcgacacccccgugcacgacugcaacaccaccugccagacccccaagggcgccaucaacaccagccugcccuuccagaacauccaccccaucaccaucggcaagugccccaaguacgugaagagcaccaagcugagacuggccaccggccugagaaacgugcccagcauccagagcagaggccuguucggcgccaucgccggcuucaucgagggcggcuggaccggcaugguggacggcugguacggcuaccaccaccagaacgagcagggcagcggcuacgccgccgaccugaagagcacccagaacgccaucgacgagaucaccaacaaggugaacagcgugaucgagaagaugaacacccaguucaccgccgugggcaaggaguucaaccaccuggagaagagaaucgagaaccugaacaagaagguggacgacggcuuccuggacaucuggaccuacaacgccgagcugcuggugcugcuggagaacgagagaacccuggacuaccacgacagcaacgugaagaaccuguacgagaaggugagaagccagcugaagaacaacgccaaggagaucggcaacggcugcuucgaguucuaccacaagugcgacaacaccugcauggagagcgugaagaacggcaccuacgacuaccccaaguacagcgaggaggccaagcugaacagagaggagaucgacggcgugaagcuggagagcaccagaaucuaccagauccuggccaucuacagcaccguggccagcagccuggugcugguggugagccugggcgccaucagcuucuggaugugcagcaacggcagccugcagugcagaaucugcaucuga

SEQ ID NO: 165523 - RNA, 1701 nt, Artificial Sequence; identical to SEQ ID NO: 162729
  derived and/or modified CDS sequence (opt4) from hemagglutinin__InfluenzaA__ADL32047

SEQ ID NO: 165524 - RNA, 1701 nt, Artificial Sequence
  derived and/or modified CDS sequence (opt4) from hemagglutinin__InfluenzaA__ADL32057
augaaggccauccugguggugcugcuguacaccuucgccaccgccaacgccgacacccugugcaucggcuaccacgccaacaacagcaccgacaccguggacaccgugcuggagaagaacgugaccgugacccacagcgugaaccugcuggaggacaagcacaacggcaagcugugcaagcugagaggcguggccccccugcaccugggcaagugcaacaucgccggcuggauccugggcaaccccgagugcgagagccugagcaccgccagcagcuggagcuacaucguggagaccagcagcagcgacaacggcaccugcuaccccggcgacuucaucgacuacgaggagcugagagagcagcugagcagcgugagcagcuucgagagauucgagaucuuccccaagaccagcagcuggcccaaccacgacagcaacaagggcgugaccgccgccugcccccacgccggcgccaagagcuucuacaagaaccugaucuggcuggugaagaagggcaacagcuaccccaagcugagcaagagcuacaucaacgacaagggcaaggaggugcuggugcuguggggcauccaccaccccagcaccagcgccgaccagcagggccuguaccagaacgccgacgccuacguguucgugggcaccagcagauacagcaagaaguucaagcccgagaucgccaucagacccaaggugagagaccaggagggcagaaugaacuacuacuggacccugguggagcccggcgacaagaucaccuucgaggccaccggcaaccugguggugcccagauacgccuucgccauggagagaaacgccggcagcggcaucaucaucagcgacacccccgugcacgacugcaacaccaccugccagacccccaagggcgccaucaacaccagccugcccuuccagaacauccaccccaucaccaucggcaagugccccaaguacgugaagggcaccaagcugagacuggccaccggccugagaaacgugcccagcauccagagcagaggccuguucggcgccaucgccggcuucaucgagggcggcuggaccggcaugguggacggcugguacggcuaccaccaccagaacgagcagggcagcggcuacgccgccgaccugaagagcacccagaacgccaucgacgagaucaccaacaaggugaacagcgugaucgagaagaugaacacccaguucaccgccgugggcaaggaguucaaccaccuggagaagagaaucgagaaccugaacaagaagguggacgacggcuuccuggacaucuggaccuacaacgccgagcugcuggugcugcuggagaacgagagaacccuggacuaccacgacagcaacgugaagaaccuguacgagaaggugagaagccagcugaagaacaacgccaaggagaucggcaacggcugcuucgaguucuaccacaagugcgacaacaccugcauggagagcgugaagaacggcaccuacgacuaccccaaguacagcgaggaggccaagcugaacagagaggagaucgacggcgugaagcuggagagcaccagaaucuaccagauccuggccaucuacagcaccguggccagcagccuggugcugguggugagccugggcgccaucagcuucuggaugugcagcaacggcagccugcagugcagaaucugcaucuga

SEQ ID NO: 165525 - RNA, 1701 nt, Artificial Sequence; identical to SEQ ID NO: 162729
  derived and/or modified CDS sequence (opt4) from hemagglutinin__InfluenzaA__ADL32090

SEQ ID NO: 165526 - RNA, 1701 nt, Artificial Sequence; identical to SEQ ID NO: 162729
  derived and/or modified CDS sequence (opt4) from hemagglutinin__InfluenzaA__ADL32114

SEQ ID NO: 165527 - RNA, 1701 nt, Artificial Sequence; identical to SEQ ID NO: 162729
  derived and/or modified CDS sequence (opt4) from hemagglutinin__InfluenzaA__ADL32344

SEQ ID NO: 165528 - RNA, 1701 nt, Artificial Sequence; identical to SEQ ID NO: 163176
  derived and/or modified CDS sequence (opt4) from hemagglutinin__InfluenzaA__ADL32354

SEQ ID NO: 165529 - RNA, 1701 nt, Artificial Sequence
  derived and/or modified CDS sequence (opt4) from hemagglutinin__InfluenzaA__ADL32364
augaaggccauccugguggugcugcuguacaccuucgccaccgccaacgccgacacccugugcaucggcuaccacgccaacaacagcaccgacaccguggacaccgugcuggagaagaacgugaccgugacccacagcgugaaccugcuggaggacaagcacaacggcaagcugugcaagcugagaggcguggccccccugcaccugggcaagugcaacaucgccggcuggauccugggcaaccccgagugcgagagccugagcaccgccaucagcuggagcuacaucguggagaccagcagcagcgacaacggcaccugcuaccccggcgacuucaucgacuacgaggagcugagagagcagcugagcagcgugagcagcuucgagagauucgagaucuuccccaagaccagcagcuggcccaaccacgacagcaacaagggcgugaccgccgccugcccccacgccggcgccaagagcuucuacaagaaccugaucuggcuggugaagaagggcaacagcuaccccaagcugagcaagagcuacaucaacgacaagggcaaggaggugcuggugcuguggggcauccaccaccccagcaccagcgccgaccagcagagccuguaccagaacgccgacaccuacguguucgugggcaccagcagauacagcaagaaguucaagcccgagaucgccaucagacccaaggugagagaccaggagggcagaaugaacuacuacuggacccugguggagcccggcgacaagaucaccuucgaggccaccggcaaccugguggugcccagauacgccuucgccauggagagaaacgccggcagcggcaucaucaucagcgacacccccgugcacgacugcaacaccaccugccagacccccaagggcgccaucaacaccagccugcccuuccagaacauccaccccaucaccaucggcaagugccccaaguacgugaagagcaccaagcugagacuggccaccggccugagaaacgugcccagcauccagagcagaggccuguucggcgccaucgccggcuucaucgagggcggcuggaccggcaugguggacggcugguacggcuaccaccaccagaacgagcagggcagcggcuacgccgccgaccugaagagcacccagaacgccaucgacgagaucaccaacaaggugaacagcgugaucgagaagaugaacacccaguucaccgccgugggcaaggaguucaaccaccuggagaagagaaucgagaaccugaacaagaagaucgacgacggcuuccuggacaucuggaccuacaacgccgagcugcuggugcugcuggagaacgagagaacccuggacuaccacgacagcaacgugaagaaccuguacgagaaggugagaagccagcugaagaacaacgccaaggagaucggcaacggcugcuucgaguucuaccacaagugcgacaacaccugcauggagagcgugaagaacggcaccuacgacuaccccaaguacagcgaggaggccaagcugaacagagaggagaucgacggcgugaagcuggagagcaccagaaucuaccagauccuggccaucuacagcaccguggccagcagccuggugcugguggugagccugggcgccaucagcuucuggaugugcagcaacggcagccugcagugcagaaucugcaucuga

SEQ ID NO: 165530 - RNA, 1701 nt, Artificial Sequence; identical to SEQ ID NO: 162729
  derived and/or modified CDS sequence (opt4) from hemagglutinin__InfluenzaA__ADL32374

SEQ ID NO: 165531 - RNA, 1701 nt, Artificial Sequence
  derived and/or modified CDS sequence (opt4) from hemagglutinin__InfluenzaA__ADL32384
augaaggccauccugguggugcugcuguacaccuucgccaccgccaccgccgacacccugugcaucggcuaccacgccaacaacagcaccgacaccguggacaccgugcuggagaagaacgugaccgugacccacagcgugaaccugcuggaggacaagcacaacggcaagcugugcaagcugagaggcguggccccccugcaccugggcaagugcaacaucgccggcuggauccugggcaaccccgagugcgagagccugagcaccgccagcagcuggagcuacaucguggagaccagcagcagcgacaacggcaccugcuaccccggcgacuucaucgacuacgaggagcugagagagcagcugagcagcgugagcagcuucgagagauucgagaucuuccccaagaccagcagcuggcccaaccacgacagcaacaagggcgugaccgccgccugcccccacgccggcgccaagagcuucuacaagaaccugaucuggcuggugaagaagggcaacagcuaccccaagcugagcaagagcuacaucaacgacaagggcaaggaggugcuggugcuguggggcauccaccaccccagcaccagcgccgaccagcagagccuguaccagaacgccgacgccuacguguucgugggcaccagcagauacagcaagaaguucaagcccgagaucgccaucagacccaaggugagagaccaggagggcagaaugaacuacuacuggacccugguggagcccggcgacaagaucaccuucgaggccaccggcaaccugguggugcccagauacgccuucgccauggagagaaacgccggcagcggcaucaucaucagcgacacccccgugcacgacugcaacaccaccugccagacccccaagggcgccaucaacaccagccugcccuuccagaacauccaccccaucaccaucggcaagugccccaaguacgugaagagcaccaagcugagacuggccaccggccugagaaacgugcccagcauccagagcagaggccuguucggcgccaucgccggcuucaucgagggcggcuggaccggcaugguggacggcugguacggcuaccaccaccagaacgagcagggcagcggcuacgccgccgaccugaagagcacccagaacgccaucgacgagaucaccaacaaggugaacagcgugaucgagaagaugaacacccaguucaccgccgugggcaaggaguucaaccaccuggagaagagaaucgagaaccugaacaagaagguggacgacggcuuccuggacaucuggaccuacaacgccgagcugcuggugcugcuggagaacgagagaacccuggacuaccacgacagcaacgugaagaaccuguacgagaaggugagaagccagcugaagaacaacgccaaggagaucggcaacggcugcuucgaguucuaccacaagugcgacaacaccugcauggagagcgugaagaacggcaccuacgacuaccccaaguacagcgaggaggccaagcugaacagagaggagaucgacggcgugaagcuggagagcaccagaaucuaccagauccuggccaucuacagcaccguggccagcagccuggugcugguggugagccugggcgccaucagcuucuggaugugcagcaacggcagccugcagugcagaaucugcaucuga

SEQ ID NO: 165532 - RNA, 1701 nt, Artificial Sequence
  derived and/or modified CDS sequence (opt4) from hemagglutinin__InfluenzaA__ADL32394
augaaggccauccugguggugcugcuguacaccuucgccaccgccaacgccgacacccugugcaucggcuaccacgccaacaacagcaccgacaccguggacaccgugcuggagaagaacgugaccgugacccacagcgugaaccugcuggaggacaagcacaacggcaagcugugcaagcugagaggcguggccccccugcaccugggcaagugcaacaucgccggcuggauccugggcaaccccgagugcgagagcuucagcaccaccagcagcuggagcuacaucguggagaccagcagcagcgacaacggcaccugcuaccccggcgacuucaucgacuacgaggagcugagagagcagcugagcagcgugagcagcuucgagagauucgagaucuuccccaagaccagcagcuggcccaaccacgacagcaacaagggcgugaccgccgccugcccccacgccggcgccaagagcuucuacaagaaccugaucuggcuggugaagaagggcaacagcuaccccaagcugagcaagagcuacaucaacgacaagggcaaggaggugcuggugcuguggggcauccaccaccccagcaccagcgccgaccagcagagccuguaccagaacgccgacaccuacguguucgugggcaccagcagauacagcaagaaguucaagcccgagaucgccaucagacccaaggugagagaccaggagggcagaaugaacuacuacuggacccugguggagcccggcgacaagaucaccuucgaggccaccggcaaccugguggugcccagauacgccuucgccauggagagaaacgccggcagcggcaucaucaucagcgacacccccgugcacgacugcaacaccaccugccagacccccaagggcgccaucaacaccagccugcccuuccagaacauccaccccaucaccaucggcaagugccccaaguacgugaagagcaccaagcugagacuggccaccggccugagaaacgugcccagcauccagagcagaggccuguucggcgccaucgccggcuucaucgagggcggcuggaccggcaugguggacggcugguacggcuaccaccaccagaacgagcagggcagcggcuacgccgccgaccugaagagcacccagaacgccaucgacgagaucaccaacaaggugaacagcgugaucgagaagaugaacacccaguucaccgccgugggcaaggaguucaaccaccuggagaagagaaucgagaaccugaacaagaagaucgacgacggcuuccuggacaucuggaccuacaacgccgagcugcuggugcugcuggagaacgagagaacccuggacuaccacgacagcaacgugaagaaccuguacgagaaggugagaagccagcugaagaacaacgccaaggagaucggcaacggcugcuucgaguucuaccacaagugcgacaacaccugcauggagagcgugaagaacggcaccuacgacuaccccaaguacagcgaggaggccaagcugaacagagaggagaucgacggcgugaagcuggagagcaccagaaucuaccagauccuggccaucuacagcaccguggccagcagccuggugcugguggugagccugggcgccaucagcuucuggaugugcagcaacggcagccugcagugcagaaucugcaucuga

SEQ ID NO: 165533 - RNA, 1701 nt, Artificial Sequence; identical to SEQ ID NO: 162729
  derived and/or modified CDS sequence (opt4) from hemagglutinin__InfluenzaA__ADL32404

SEQ ID NO: 165534 - RNA, 1701 nt, Artificial Sequence
  derived and/or modified CDS sequence (opt4) from hemagglutinin__InfluenzaA__ADL32414
augaaggccauccugguggugcugcuguacaccuucgccaccgccaacgccgacacccugugcaucggcuaccacgccaacaacagcaccgacaccguggacaccgugcuggagaagaacgugaccgugacccacagcgugaaccugcuggaggacaagcacaacggcaagcugugcaagcugagaggcguggccccccugcaccugggcaagugcaacaucgccggcuggauccugggcaaccccgagugcgagagccugagcaccgccagcagcuggagcuacaucguggagaccagcagcagcgacaacggcaccugcuaccccggcgacuucaucgacuacgaggagcugagagagcagcugagcagcgugagcagcuucgagagauucgagaucuuccccaagaccagcagcuggcccaaccacgacagcaacaagggcgugaccgccgccugcccccacgccggcgccaagagcuucuacaagaaccugaucuggcuggugaagaagggcaacagcuaccccaagcugagcaagagcuacaucaacgacaagggcaaggaggugcuggugcuguggggcauccaccaccccagcaccagcgccgaccagcagagccuguaccagaacgccgacgccuacguguucgugggcaccagcagauacagcaagaaguucaagcccgagaucgccaucagacccaaggugagagcccaggagggcagaaugaacuacuacuggacccugguggagcccggcgacaagaucaccuucgaggccaccggcaaccugguggugcccagauacgccuucgccauggagagaaacgccggcagcggcaucaucaucagcgacacccccgugcacgacugcaacaccaccugccagacccccaagggcgccaucaacaccagccugcccuuccagaacauccaccccaucaccaucggcaagugccccaaguacgugaagagcaccaagcugagacuggccaccggccugagaaacgugcccagcauccagagcagaggccuguucggcgccaucgccggcuucaucgagggcggcuggaccggcaugguggacggcugguacggcuaccaccaccagaacgagcagggcagcggcuacgccgccgaccugaagagcacccagcacgccaucgacgagaucaccaacaaggugaacagcgugaucgagaagaugaacacccaguucaccgccgugggcaaggaguucaaccaccuggagaagagaaucgagaaccugaacaagaagguggacgacggcuuccuggacaucuggaccuacaacgccgagcugcuggugcugcuggagaacgagagaacccuggacuaccacgacagcaacgugaagaaccuguacgagaaggugagaagccagcugaagaacaacgccaaggagaucggcaacggcugcuucgaguucuaccacaagugcgacaacaccugcauggagagcgugaagaacggcaccuacgacuaccccaaguacagcgaggaggccaagcugaacagagaggagaucgacggcgugaagcuggagagcaccagaaucuaccagauccuggccaucuacagcaccguggccagcagccuggugcugguggugagccugggcgccaucagcuucuggaugugcagcaacggcagccugcagugcagaaucugcaucuga

SEQ ID NO: 165535 - RNA, 1701 nt, Artificial Sequence
  derived and/or modified CDS sequence (opt4) from hemagglutinin__InfluenzaA__ADL32424
augaaggccauccugguggugcugcuguacaccuucgccaucgccaacgccgacacccugugcaucggcuaccacgccaacaacagcaccgacaccguggacaccgugcuggagaagaacgugaccgugacccacagcgugaaccugcuggaggacaagcacaacggcaagcugugcaagcugagaggcguggccccccugcaccugggcaagugcaacaucgccggcuggauccugggcaaccccgagugcgagagccugagcaccgccagcagcuggagcuacaucguggagaccagcagcagcgacaacggcaccugcuaccccggcgacuucaucgacuacgaggagcugagagagcagcugagcagcgugagcagcuucgagagauucgagaucuuccccaagaccagcagcuggcccaaccacgacagcaacaagggcgugaccgccgccugcccccacgccggcgccaagagcuucuacaagaaccugaucuggcuggugaagaagggcaacagcuaccccaagcugagcaagagcuacaucaacgacaagggcaaggaggugcuggugcuguggggcauccaccaccccagcaccagcgccgaccagcagagccuguaccagaacgccgacgccuacguguucgugggcaccagcagauacagcaagaaguucaagcccgagaucgccaucagacccaaggugagagaccaggagggcagaaugaacuaccacuggacccugguggagcccggcgacaagaucaccuucgaggccaccggcaaccugguggugcccagauacgccuucgccauggagagaaacgccggcagcggcaucaucaucagcgacacccccgugcacgacugcaacaccaccugccagacccccaagggcgccaucaacaccagccugcccuuccagaacauccaccccaucaccaucggcaagugccccaaguacgugaagagcaccaagcugagacuggccaccggccugagaaacgugcccagcauccagagcagaggccuguucggcgccaucgccggcuucaucgagggcggcuggaccggcaugguggacggcugguacggcuaccaccaccagaacgagcagggcagcggcuacgccgccgaccugaagagcacccagcacgccaucgacgagaucaccaacaaggugaacagcgugaucgagaagaugaacacccaguucaccgccgugggcaaggaguucaaccaccuggagaagagaaucgagaaccugaacaagaagguggacgacggcuuccuggacaucuggaccuacaacgccgagcugcuggugcugcuggagaacgagagaacccuggacuaccacgacagcaacgugaagaaccuguacgagaaggugagaagccagcugaagaacaacgccaaggagaucggcaacggcugcuucgaguucuaccacaagugcgacaacaccugcauggagagcgugaagaacggcaccuacgacuaccccaaguacagcgaggaggccaagcugaacagagaggagaucaacggcgugaagcuggagagcaccagaaucuaccagauccuggccaucuacagcaccguggccagcagccuggugcugguggugagccugggcgccaucagcuucuggaugugcagcaacggcagccugcagugcagaaucugcaucuga

SEQ ID NO: 165536 - RNA, 1701 nt, Artificial Sequence
  derived and/or modified CDS sequence (opt4) from hemagglutinin__InfluenzaA__ADL32434
augaaggccauccugguggugcugcuguacaccuucgccaccgccaacgccgacacccugugcaucggcuaccacgccaacaacagcaccgacaccguggacaccgugcuggagaagaacgugaccgugacccacagcgugaaccugcuggaggacaagcacaacggcaagcugugcaagcugagaggcguggccccccugcaccugggcaagugcaacaucgccggcuggauccugggcaaccccgagugcgagagccugagcaccgccagcagcuggagcuacaucguggagaccagcagcagcgacaacggcaccugcuaccccggcgacuucaucgacuacgaggagcugagagagcagcugagcagcgugagcagcuucgagagauucgagaucuuccccaagaccagcagcuggcccauccacgacagcaacaagggcgugaccgccgccugcccccacgccggcgccaagagcuucuacaagaaccugaucuggcuggugaagaagggcaacagcuaccccaagcugagcaagagcuacaucaacgacaagggcaaggaggugcuggugcuguggggcauccaccaccccagcaccagcgccgaccagcagagccuguaccagaacgccgacgccuacguguucgugggcaccagcagauacagcaagaaguucaagcccgagaucgccaucagacccaaggugagagaccaggagggcagaaugaacuacuacuggauccugguggagcccggcgacaagaucaccuucgaggccaccggcaaccugguggugcccagauacgccuucgccauggagagaaacgccggcagcggcaucaucaucagcgacacccccgugcacgacugcaacaccaccugccagacccccaagggcgccaucaacaccagccugcccuuccagaacauccaccccaucaccaucggcaagugccccaaguacgugaagagcaccaagcugagacuggccaccggccugagaaacgugcccagcauccagagcagaggccuguucggcgccaucgccggcuucaucgagggcggcuggaccggcaugguggacggcugguacggcuaccaccaccagaacgagcagggcagcggcuacgccgccgaccugaagagcacccagcacgccaucgacgagaucaccaacaaggugaacagcgugaucgagaagaugaacacccaguucaccgccgugggcaaggaguucaaccaccuggagaagagaaucgagaaccugaacaagaagguggacgacggcuuccuggacaucuggaccuacaacgccgagcugcuggugcugcuggagaacgagagaacccuggacuaccacgacagcaacgugaagaaccuguacgagaaggugagaagccagcugaagaacaacgccaaggagaucggcaacggcugcuucgaguucuaccacaagugcgacaacaccugcauggagagcgugaagaacggcaccuacgacuaccccaaguacagcgaggaggccaagcugaacagagaggagaucgacggcgugaagcuggagagcaccagaaucuaccagauccuggccaucuacagcaccguggccagcagccuggugcugguggugagccugggcgccaucagcuucuggaugugcagcaacggcagccugcagugcagaaucugcaucuga

SEQ ID NO: 165537 - RNA, 1701 nt, Artificial Sequence; identical to SEQ ID NO: 164149
  derived and/or modified CDS sequence (opt4) from hemagglutinin__InfluenzaA__ADL32444

SEQ ID NO: 165538 - RNA, 1701 nt, Artificial Sequence
  derived and/or modified CDS sequence (opt4) from hemagglutinin__InfluenzaA__ADL32454
auggaggccauccugguggugcugcuguacaccuucgccaccgccaacgccgacacccugugcaucggcuaccacgccaacaacagcaccgacaccguggacaccgugcuggagaagaacgugaccgugacccacagcgugaaccugcuggaggacaagcacaacggcaagcugugcaagcugagaggcguggccccccugcaccugggcaagugcaacaucgccggcuggauccugggcaaccccgagugcgagagccugagcaccgccagcagcuggagcuacaucguggagaccagcagcagcgacaacggcaccugcuaccccggcgacuucaucgacuacgaggagcugagagagcagcugagcagcgugagcagcuucgagagauucgagaucuuccccaagaccagcagcuggcccaaccacgacagcaacaagggcgugaccgccgccugcccccacgccggcgccaagagcuucuacaagaaccugaucuggcuggugaagaagggcaacagcuaccccaagcugagcaagagcuacaucaacgacaagggcaaggaggugcuggugcuguggggcauccaccaccccagcaccagcgccgaccagcagagccuguaccagaacgccgacgccuacguguucgugggcagcagcagauacagcaagaaguucaagcccgagaucgccaucagacccaaggugagagaccaggagggcagaaugaacuacuacuggacccugguggagcccggcgacaagaucaccuucgaggccaccggcaaccugguggugcccagauacgccuucgccauggagagaaacgccggcagcggcaucaucaucagcgacacccccgugcacgacugcaacaccaccugccagacccccaagggcgccaucaacaccagccugcccuuccacaacauccaccccaucaccaucggcaagugccccaaguacgugaagagcaccaagcugagacuggccaccggccugagaaacgugcccagcauccagagcagaggccuguucggcgccaucgccggcuucaucgagggcggcuggaccggcaugguggacggcugguacggcuaccaccaccagaacgagcagggcagcggcuacgccgccgaccugaagagcacccagaacgccaucgacgagaucaccaacaaggugaacagcgugaucgagaagaugaacacccaguucaccgccgugggcaaggaguucaaccaccuggagaagagaaucgagaaccugaacaagaagguggacgacggcuuccuggacaucuggaccuacaacgccgagcugcuggugcugcuggagaacgagagaacccuggacuaccacgacagcaacgugaagaaccuguacgagaaggugagaagccagcugaagaacaacgccaaggagcugggcaacggcugcuucgaguucuaccacaagugcgacaacaccugcauggagagcgugaagaacggcaccuacgacuaccccaaguacagcgaggaggccaagcugaacagagaggagaucgacggcgugaagcuggagagcaccagaaucuaccagauccuggccaucuacagcaccguggccagcagccuggugcugguggugagccugggcgccaucagcuucuggaugugcagcaacggcagccugcagugcagaaucugcaucuga

SEQ ID NO: 165539 - RNA, 1701 nt, Artificial Sequence; identical to SEQ ID NO: 164896
  derived and/or modified CDS sequence (opt4) from hemagglutinin__InfluenzaA__ADL32464

SEQ ID NO: 165540 - RNA, 1701 nt, Artificial Sequence; identical to SEQ ID NO: 164896
  derived and/or modified CDS sequence (opt4) from hemagglutinin__InfluenzaA__ADL32484

SEQ ID NO: 165541 - RNA, 1701 nt, Artificial Sequence
  derived and/or modified CDS sequence (opt4) from hemagglutinin__InfluenzaA__ADL32504
augaaggccauccugguggugcugcuguacaccuucgccaccgccaacgccgacacccugugcaucggcuaccacgccaacaacagcaccgacaccguggacaccgugcuggagaagaacgugaccgugacccacagcgugaaccugcuggaggacaagcacaacggcaagcugugcaagcugagaggcguggccccccugcaccugggcaagugcaacaucgccggcuggauccugggcaaccccgagugcgagagccugagcaccgccagcagcuggagcuacaucguggagaccagcagcagcgacaacggcaugugcuaccccggcgacuucaucgacuacgaggagcugagagagcagcugagcagcgugagcagcuucgagagauucgagaucuuccccaagaccagcagcuggcccaaccacgacagcaacaagggcgugaccgccgccugcccccacgccggcgccaagagcuucuacaagaaccugaucuggcuggugaagaagggcaacagcuaccccaagcugagcaagagcuacaucaacgacaagggcaaggaggugcuggugcuguggggcauccaccaccccagcaccagcgccgaccagcagagccuguaccagaacgccgacgccuacguguucgugggcaccagcagauacagcaagaaguucaagcccgagaucgccaucagacccaaggugagagaccaggagggcagaaugaacuacuacuggacccugguggagcccggcgacaagaucaccuucgaggccaccggcaaccugguggugcccagauacgccuucgccauggagagaaacgccggcagcggcaucaucaucagcgacacccccgugcacgacugcaacaccaccugccagacccccaagggcgccaucaacaccagccugcccuuccagaacauccaccccaucaccaucggcaagugccccaaguacgugaagagcaccaagcugagacuggccaccggccugagaaacgugcccagcauccagagcagaggccuguucggcgccaucgccggcuucaucgagggcggcuggaccggcaugguggacggcugguacggcuaccaccaccagaacgagcagggcagcggcuacgccgccgaccugaagagcacccagcacgccaucgacgagaucaccaacaaggugaacagcgugaucgagaagaugaacacccaguucaccgccgugggcaaggaguucaaccaccuggagaagagaaucgagaaccugaacaagaagguggacgacggcuuccuggacaucuggaccuacaacgccgagcugcuggugcugcuggagaacgagagaacccuggacuaccacgacagcaacgugaagaaccuguacgagaaggugagaagccagcugaagaacaacgccaaggagaucggcaacggcugcuucgaguucuaccacaagugcgacaacaccugcauggagagcgugaagaacggcaccuacgacuaccccaaguacagcgaggaggccaagcugaacagagaggagaucgacggcgugaagcuggagagcaccagaaucuaccagauccuggccaucuacagcaccguggccagcagccuggugcugguggugagccugggcgccaucagcuucuggaugugcagcaacggcagccugcagugcagaaucugcaucuga

SEQ ID NO: 165542 - RNA, 1701 nt, Artificial Sequence; identical to SEQ ID NO: 164149
  derived and/or modified CDS sequence (opt4) from hemagglutinin__InfluenzaA__ADL32514

SEQ ID NO: 165543 - RNA, 1701 nt, Artificial Sequence; identical to SEQ ID NO: 164896
  derived and/or modified CDS sequence (opt4) from hemagglutinin__InfluenzaA__ADL32524

SEQ ID NO: 165544 - RNA, 1701 nt, Artificial Sequence
  derived and/or modified CDS sequence (opt4) from hemagglutinin__InfluenzaA__ADL32544
augaaggccauccugguggugcugcuguacaccuucgccaccagcaacgccgacacccugugcaucggcuaccacgccaacaacagcaccgacaccguggacaccgugcuggagaagaacgugaccgugacccacagcgugaaccugcuggaggacaagcacaacggcaagcugugcaagcugagaggcguggccccccugcaccugggcaagugcaacaucgccggcuggauccugggcaaccccgagugcgagagccugagcaccgccagcagcuggagcuacaucguggagaccagcagcagcgacaacggcaccugcuaccccggcgacuucaucgacuacgaggagcugagagagcagcugagcagcgugagcagcuucgagagauucgagaucuuccccaagaccagcagcuggcccaaccacgacagcaacaagggcgugaccgccgccugcccccacgccggcgccaagagcuucuacaagaaccugaucuggcuggugaagaagggcaacagcuaccccaagcugagaaagagcuacaucaacgacaagggcaaggaggugcuggugcuguggggcauccaccaccccagcaccagcgccgaccagcagagccuguaccagaacgccgacgccuacguguucgugggcaccagcagauacagcaagaaguucaagcccgagaucgccaucagacccaaggugagagaccaggagggcagaaugaacuacuacuggacccugguggagcccggcgacaagaucaccuucgaggccaccggcaaccugguggugcccagauacgccuucgccauggagagaaacgccggcagcggcaucaucaucagcgacacccccgugcacgacugcaacaccaccugccagacccccaagggcgccaucaacaccagccugcccuuccagaacauccaccccaucaccaucggcaagugccccaaguacgugaagagcaccaagcugagacuggccaccggccugagaaacgugcccagcauccagagcagaggccuguucggcgccaucgccggcuucaucgagggcggcuggaccggcaugguggacggcugguacggcuaccaccaccagaacgagcagggcagcggcuacgccgccgaccugaagagcacccagcacgccaucgacgagaucaccaacaaggugaacagcgugaucgagaagaugaacacccaguucaccgccgugggcaaggaguucaaccaccuggagaagagaaucgagaaccugaacaagaagguggacgacggcuuccuggacaucuggaccuacaacgccgagcugcuggugcugcuggagaacgagagaacccuggacuaccacgacagcaacgugaagaaccuguacgagaaggugagaagccagcugaagaacaacgccaaggagaucggcaacggcugcuucgaguucuaccacaagugcgacaacaccugcauggagagcgugaagaacggcaccuacgacuaccccaaguacagcgaggaggccaagcugaacagagaggagaucgacggcgugaagcuggagagcaccagaaucuaccagauccuggccaucuacagcaccguggccagcagccuggugcugguggugagccugggcgccaucagcuucuggaugugcagcaacggcagccugcagugcagaaucugcaucuga

SEQ ID NO: 165545 - RNA, 1701 nt, Artificial Sequence; identical to SEQ ID NO: 165330
  derived and/or modified CDS sequence (opt4) from hemagglutinin__InfluenzaA__ADL32554

SEQ ID NO: 165546 - RNA, 1701 nt, Artificial Sequence; identical to SEQ ID NO: 164342
  derived and/or modified CDS sequence (opt4) from hemagglutinin__InfluenzaA__ADL32670

SEQ ID NO: 165547 - RNA, 1701 nt, Artificial Sequence
  derived and/or modified CDS sequence (opt4) from hemagglutinin__InfluenzaA__ADL32690
augaaggccauccugguggugcugcuguacaccuucgccaccgccaacgccgacacccugugcaucggcuaccacgccaacaacagcaccgacaccguggacaccgugcuggagaagaacgugaccgugacccacagcgugaacauccuggaggacaagcacaacggcaagcugugcaagcugagaggcguggccccccugcaccugggcaagugcaacaucgccggcuggauccugggcaaccccgagugcgagagccugagcaccgccagcagcuggagcuacaucguggagaccagcagcagcgacaacggcaccugcuaccccggcgacuucaucgacuacgaggagcugagagagcagcugagcagcgugagcagcuucgagagauucgagaucuuccccaagaccagcagcuggcccaaccacgacagcaacaagggcgugaccgccgccugcccccacgccggcgccaagagcuucuacaagaaccugauguggcuggugaagaagggcaacagcuaccccaagcugagcaagagcuacaucaacgacaagggcaaggaggugcuggugcuguggggcauccaccaccccagcaccagcgccgaccagcagagccuguaccagaacgccgacgccuacguguucgugggcagcagcagauacagcaagaaguucaagcccgagaucgccaucagacccaaggugagagaccaggagggcagaaugaacuacuacuggacccugguggagcccggcgacaagaucaccuucgaggccaccggcaaccugguggugcccagauacgccuucgccauggagagaaacgccggcagcggcaucaucaucagcgacacccccgugcacgacugcaacaccaccugccagacccccaagggcgccaucaacaccagccugcccuuccagaacauccaccccaucaccaucggcaagugccccaaguacgugaagagcaccaagcugagacuggccaccggccugagaaacgugcccagcauccagagcagaggccuguucggcgccaucgccggcuucaucgagggcggcuggaccggcaugguggacggcugguacggcuaccaccaccagaacgagcagggcagcggcuacgccgccgaccugaagagcacccagaacgccaucgacgagaucaccaacaaggugaacagcgugaucgagaagaugaacacccaguucaccgccgugggcaaggaguucaaccaccuggagaagagaaucgagaaccugaacaagaagguggacgacggcuuccuggacaucuggaccuacaacgccgagcugcuggugcugcuggagaacgagagaacccuggacuaccacgacagcaacgugaagaaccuguacgagaaggugagaagccagcugaagaacaacgccaaggagaucggcaacggcugcuucgaguucuaccacaagugcgacaacaccugcauggagagcgugaagaacggcaccuacgacuaccccaaguacagcgaggaggccaagcugaacagagaggagaucgacggcgugaagcuggagagcaccagaaucuaccagauccuggccaucuacagcaccguggccagcagccuggugcugguggugagccugggcgccaucagcuucuggaugugcagcaacggcagccugcagugcagaaucugcaucuga

SEQ ID NO: 165548 - RNA, 1701 nt, Artificial Sequence; identical to SEQ ID NO: 162909
  derived and/or modified CDS sequence (opt4) from hemagglutinin__InfluenzaA__ADL32710

SEQ ID NO: 165549 - RNA, 1701 nt, Artificial Sequence; identical to SEQ ID NO: 162729
  derived and/or modified CDS sequence (opt4) from hemagglutinin__InfluenzaA__ADL32720

SEQ ID NO: 165550 - RNA, 1701 nt, Artificial Sequence; identical to SEQ ID NO: 164501
  derived and/or modified CDS sequence (opt4) from hemagglutinin__InfluenzaA__ADL32730

SEQ ID NO: 165551 - RNA, 1701 nt, Artificial Sequence; identical to SEQ ID NO: 164501
  derived and/or modified CDS sequence (opt4) from hemagglutinin__InfluenzaA__ADL32740

SEQ ID NO: 165552 - RNA, 1701 nt, Artificial Sequence; identical to SEQ ID NO: 163673
  derived and/or modified CDS sequence (opt4) from hemagglutinin__InfluenzaA__ADL39137

SEQ ID NO: 165553 - RNA, 1698 nt, Artificial Sequence
  derived and/or modified CDS sequence (opt4) from hemagglutinin__InfluenzaA__ADL39148
augaaggugaagcugcuggugcugcugugcaccuucaccgccaccuacgccgacaccaucugcaucggcuaccacgccaacaacagcaccgacaccguggacaccgugcuggagaagaacgugaccgugacccacagcgugaaccugcuggagaacagccacaacggcaagcugugccugcugaagggcaucgccccccugcagcugggcaacugcagcguggccggcuggauccugggcaaccccgagugcgagcugcugaucagcaaggagagcuggagcuacaucguggagaagcccaaccccgagaacggcaccugcuaccccggccacuucgccgacuacgaggagcugagagagcagcugagcagcgugagcagcuucgagagauucgagaucuuccccaaggagagcagcuggcccaaccacaccgugaccggcgugagcgccagcugcagccacaacggcgagagcagcuucuacagaaaccugcuguggcugaccggcaagaacggccuguaccccaaccugagcaagagcuacgccaacaacaaggagaaggaggugcuggugcuguggggcgugcaccacccccccaacaucguggaccagaagacccuguacagaaccgagaacgccuacgugagcguggugagcagccacuacagcagaaaguucacccccgagaucgccaagagacccaaggugagagaccaggagggcagaaucaacuacuacuggacccugcuggagcccggcgacaccaucaucuucgaggccaacggcaaccugaucgcccccagauacgccuucgcccugagcagagacuucggcagcggcaucaucaacagcaacgcccccauggacaagugcgacgccaagugccagaccccccagggcgccaucaacagcagccugcccuuccagaacgugcaccccgugaccaucggcgagugccccaaguacgugagaagcgccaagcugagaauggugaccggccugagaaacauccccagcauccagagcagaggccuguucggcgccaucgccggcuucaucgagggcggcuggaccggcaugguggacggcugguacggcuaccaccaccagaacgagcagggcagcggcuacgccgccgaccagaagagcacccagaacgccaucaacggcaucaccaacaaggugaacagcgugaucgagaagaugaacacccaguucaccgccgugggcaaggaguucaacaagcuggagagaagaauggagaaccugaacaagaagguggacgacggcuucaucgacaucuggaccuacaacgccgagcugcuggugcugcuggagaacgagagaacccuggacuuccacgacagcaacgugaagaaccuguacgagaaggugaagagccagcugaagaacaacgccaaggagaucggcaacggcugcuucgaguucuaccacaagugcaacgacgagugcauggagagcgugaagaacggcaccuacgacuaccccaaguacagcgaggagagcaagcugaacagagagaagaucgacggcgugaagcuggagagcaugggcguguaccagauccuggccaucuacagcaccguggccagcagccuggugcugcuggugagccugggcgccaucagcuucuggaugugcagcaacggcagccugcagugcagaaucugcaucuga

SEQ ID NO: 165554 - RNA, 1701 nt, Artificial Sequence
  derived and/or modified CDS sequence (opt4) from hemagglutinin__InfluenzaA__ADL39159
augaagaccaucaucgcccugagcuacauccugugccugguguucgcccagaagcugcccggcaacgacaacagcaccgccacccugugccugggccaccacgccgugcccaacggcaccaucgugaagaccaucaccaacgaccagaucgaggugaccaacgccaccgagcuggugcagagcagcagcaccggcgagaucugcgacagcccccaccagaucaucgacggcgagaacugcacccugaucgacgcccugcugggcgacccccagugcgacggcuuccagaacaagaagugggaccuguucguggagagaagcaaggccuacagcaacugcuaccccuacgacgugcccgacuacgccagccugagaagccugguggccagcagcggcacccuggaguucaacaacgagagcuucaacuggaccggcgugacccagaacggcaccagcagcgccugcaucagaagaagcaacaacagcuucuucagcagacugaacuggcugacccaccugaaguucaaguaccccgcccugaacgugaccaugcccaacaacgagcaguucgacaagcuguacaucuggggcgugcaccaccccggcaccgacaacgaccagaucuuccuguacgcccaggccagcggcagaaucaccgugagcaccaagagaagccagcagaccgugauccccaacaucggcagcagacccagagugagaaacauccccagcagaaucagcaucuacuggaccaucgugaagcccggcgacauccugcugaucaacagcaccggcaaccugaucgcccccagaggcuacuucaagaucagaagcggcaagagcagcaucaugagaagcgacgcccccaucggcaagugcaacagcgagugcaucacccccaacggcagcauccccaacgacaagcccuuccagaacgugaacagaaucaccuacggcgccugccccagauacgugaagcagaacacccugaagcuggccaccggcaugagaaacgugcccgagaagcagaccagaggcaucuucggcgccaucgccggcuucaucgagaacggcugggagggcaugguggacggcugguacggcuucagacaccagaacagcgagggcagaggccaggccgccgaccugaagagcacccaggccgccaucgaccagaucaacggcaagcugaacagacugaucggcaagaccaacgagaaguuccaccagaucgagaaggaguucagcgagguggagggcagaauccaggaccuggagaaguacguggaggacaccaagaucgaccuguggagcuacaacgccgagcugcugguggcccuggagaaccagcacaccaucgaccugaccgacagcgagaugaacaagcuguucgagaagaccaagaagcagcugagagagaacgccgaggacaugggcaacggcugcuucaagaucuaccacaagugcgacaacgccugcaucagaagcaucagaaacggcaccuacgaccacgacguguacagagacgaggcccugaacaacagauuccagaucaagggcguggagcugaagagcggcuacaaggacuggauccuguggaucagcuucgccaucagcugcuuccugcugugcuucgcccugcugggcuucaucaugugggccugccagaagggcaacaucagaugcaacaucugcaucuga

SEQ ID NO: 165555 - RNA, 1701 nt, Artificial Sequence
  derived and/or modified CDS sequence (opt4) from hemagglutinin__InfluenzaA__ADL39170
augaagaccaucaucgcccugagcuacauccugugccugguguucgcccagaagcugcccggcaacgacaacagcaccgccacccugugccugggccaccacgccgugcccaacggcaccaucgugaagaccaucaccaacgaccagaucgaggugaccaacgccaccgagcuggugcagagcagcagcaccggcgagaucugcgacagcccccaccagauccuggacggcaagaacugcacccugaucgacgcccugcugggcgacccccagugcgacggcuuccagaacaagaagugggaccuguucguggagagaagcaaggccuacagcaacugcuaccccuacgacgugcccgacuacgccagccugagaagccugguggccagcagcggcacccuggaguucaacaacgagagcuucaacuggaccggcgugacccagaacggcaccagcagcgccugcaucagaagaagcaagaacagcuucuucagcagacugaacuggcugacccaccugaacuucaaguaccccgcccugaacgugaccgugcccaacaacgagcaguucgacaagcuguacaucuggggcgugcaccaccccggcaccgacaaggaccagaucuuccuguacgcccaggccagcggcagaaucaccgugagcaccaagagaagccagcagaccgugauccccaacaucggcagcagacccagagugagaaacauccccagcagaaucagcaucuacuggaccaucgugaagcccggcgacgugcugcugaucaacagcaccggcaaccugaucgcccccagaggcuacuucaagaucagaagcggcaagagcagcaucaugagaagcgacgcccccaucggcaagugcaacagcgagugcaucacccccaacggcagcauccccaacgacaagcccuuccagaacgugaacagaaucaccuacggcgccugccccagauacgugaagcagaacacccugaagcuggccaccggcaugagaaacgugcccgagaagcagaccagaggcaucuucggcgccaucgccggcuucaucgagaacggcugggagggcaugguggacggcugguacggcuucagacaccagaacagcgagggcagaggccaggccgccgaccugaagagcacccaggccgccaucgaccagaucaacggcaagcugaacagacugaucggcaagaccaacgagaaguuccaccagaucgagaaggaguucagcgagguggagggcagaauccaggaccuggagaaguacguggaggacaccaagaucgaccuguggagcuacaacgccgagcugcugguggcccuggagaaccagcacaccaucgaccugaccgacagcgagaugaacaagcuguucgagaagaccaagaagcagcugagagagaacgccgaggacaugggcaacggcugcuucaagaucuaccacaagugcgacaacgccugcaucggcagcaucagaaacggcaccuacgaccacgacguguacagagacgaggcccugaacaacagauuccagaucaagggcguggagcugaagagcggcuacaaggacuggauccuguggaucagcuucgccaucagcugcuuccugcugugcguggcccugcugggcuucaucaugugggccugccagaagggcaacaucagaugcaacaucugcaucuga

SEQ ID NO: 165556 - RNA, 1701 nt, Artificial Sequence; identical to SEQ ID NO: 163673
  derived and/or modified CDS sequence (opt4) from hemagglutinin__InfluenzaA__ADL39203

SEQ ID NO: 165557 - RNA, 1701 nt, Artificial Sequence; identical to SEQ ID NO: 162494
  derived and/or modified CDS sequence (opt4) from hemagglutinin__InfluenzaA__ADL39214

SEQ ID NO: 165558 - RNA, 1698 nt, Artificial Sequence
  derived and/or modified CDS sequence (opt4) from hemagglutinin__InfluenzaA__ADL39225
augaaggugaagcugcuggugcugcugugcaccuucaccgccaccuacgccgacaccaucugcaucggcuaccacgccaacaacagcaccgacaccguggacaccgugcuggagaagaacgugaccgugacccacagcgugaaccugcuggagaacagccacaacggcaagcugugccugcugaagggcaucgccccccugcagcugggcaacugcagcguggccggcuggauccugggcaaccccgagugcgagcugcugaucagcaaggagagcuggagcuacaucguggagaagcccaaccccgagaacggcaccugcuaccccggcuacuucgccgacuacgaggagcugagagagcagcugagcagcgugagcagcuucgagagauucgagaucuuccccaaggagagcagcuggcccaaccacaccgugaccggcgccagcgccagcugcagccacaacggcgagaacagcuucuacagaaaccugcuguggcugaccggcaagaacggccuguaccccaaccugagcaagagcuacgccaacaacaaggagaaggaggugcuggugcuguggggcgugcaccacccccccaacaucgccgaccagaagacccuguaccacaccgagaacgccuacgugagcguggugagcagccacuacagcagaaaguucacccccgagaucgccaagagacccaaggugagagaccaggagggcagaaucaacuacuacuggacccugcuggagcccggcgacaccaucaucuucgaggccaacggcaaccugaucgcccccagauacgccuucgcccugagcagaggcuucggcagcggcaucaucaacagcaacgcccccauggacaagugcgacgccaagugccagaccccccagggcgccaucaacagcagccugcccuuccagaacgugcaccccgugaccaucggcgagugccccaaguacgugagaagcgccaagcugagaauggugaccggccugagaaacauccccagcauccagagcagaggccuguucggcgccaucgccggcuucaucgagggcggcuggaccggcaugguggacggcugguacggcuaccaccaccagaacgagcagggcagcggcuacgccgccgaccagaagagcacccagaacgccaucaacggcaucaccaacaaggugaacagcgugaucgagaagaugaacacccaguucaccgccgugggcaaggaguucaacaagcuggagagaagaauggagaaccugaacaagaagguggacgacggcuucaucgacaucuggaccuacaacgccgagcugcuggugcugcuggagaacgagagaacccuggacuuccacgacagcaacgugaagaaccuguacgagaaggugaagagccagcugaagaacaacgccaaggagaucggcaacggcugcuucgaguucuaccacaagugcaacgacgagugcauggagagcgugaagaacggcaccuacgacuaccccaaguacagcgaggagagcaagcugaacagagagaagaucgacggcgugaagcuggagagcaugggcguguaccagauccuggccaucuacagcaccguggccagcagccuggugcugcuggugagccugggcgccaucagcuucuggaugugcagcaacggcagccugcagugcagaaucugcaucuga

SEQ ID NO: 165559 - RNA, 1698 nt, Artificial Sequence
  derived and/or modified CDS sequence (opt4) from hemagglutinin__InfluenzaA__ADL39236
augaaggugaagcugcuggugcugcugugcaccuucaccgccaccuacgccgacaccaucugcaucggcuaccacgccaacaacagcaccgacaccguggacaccgugcuggagaagaacgugaccgugacccacagcgugaaccugcuggagaacagccacaacggcaagcugugccugcugaagggcaucgccccccugcagcugggcaacugcagcguggccggcuggauccugggcaaccccgagugcgagcugcugaucagcaaggagagcuggagcuacaucguggagaagcccaaccccgagaacggcaccugcuaccccggcuacuucgccgacuacgaggagcugagagagcagcugagcagcgugagcagcuucgagagauucgagaucuuccccaaggagagcagcuggcccaaccacaccgugaccggcgugagcgccagcugcagccacaacggcgagagcagcuucuacagaaaccugcuguggcugaccggcaagaacggccuguaccccaaccugagcaagagcuacaccaacaacaaggagaaggaggugcuggugcuguggggcgugcaccacccccccaacaucguggaccagaagacccuguacagaaccgagaacgccuacgugagcguggugagcagccacuacagcagaaaguucacccccgagaucgccaagagacccaaggugagagaccaggagggcagaaucaacuacuacuggacccugcuggagcccggcgacaccaucaucuucgaggccaacggcaaccugaucgcccccagauacgccuucgcccugagcagaggcuucggcagcggcaucaucaacagcaacgcccccaugggcaagugcgacgccaagugccagaccccccagggcgccaucaacagcagccugcccuuccagaacgugcaccccgugaccaucggcgagugccccaaguacgugagaagcgccaagcugagaauggugaccggccugagaaacauccccagcauccagagcagaggccuguucggcgccaucgccggcuucaucgagggcggcuggaccggcaugguggacggcugguacggcuaccaccaccagaacgagcagggcagcggcuacgccgccgaccagaagagcacccagaacgccaucaacggcaucaccaacaaggugaacagcgugaucgagaagaugaacacccaguucaccgccgugggcaaggaguucaacaagcuggagagaagaauggagaaccugaacaagaagguggacgacggcuucaucgacaucuggaccuacaacgccgagcugcuggugcugcuggagaacgagagaacccuggacuuccacgacagcaacgugaagaaccuguacgagaaggugaagagccagcugaagaacaacgccaaggagaucggcaacggcugcuucgaguucuaccacaagugcaacgacgagugcauggagagcgugaagaacggcaccuacgacuaccccaaguacagcgaggagagcaagcugaacagagagaagaucgacggcgugaagcuggagagcaugggcguguaccagauccuggccaucuacagcaccguggccagcagccuggugcugcuggugagccugggcgccaucagcuucuggaugugcagcaacggcagccugcagugcagaaucugcaucuga

SEQ ID NO: 165560 - RNA, 1701 nt, Artificial Sequence
  derived and/or modified CDS sequence (opt4) from hemagglutinin__InfluenzaA__ADL39280
augaagaccaucaucgcccugagcuacauccugugccugguguucgcccagaagcugcccggcaacgacaacagcaccgccacccugugccugggccaccacgccgugcccaacggcaccaucgugaagaccaucaccaacgaccagaucgaggugaccaacgccaccgagcuggugcagagcagcagcaccggcgagaucugcgacagcccccaccagauccuggacggcgagaacugcacccugaucgacgcccugcugggcgacccccagugcgacggcuuccagaacaagaagugggaccuguucguggagagaagcaaggccuacagcaacugcuaccccuacgacgugcccgacuacgccagccugagaagccugguggccagcagcggcacccuggaguucaacaacgagagcuucaacuggaccggcgugacccagaacggcaccagcagcgccugcaucagaagaagcaacaacagcuucuucagcagacugaacuggcugacccaccugagauucaaguaccccgcccugaacgugaccaugcccaacaacgagcaguucgacaagcuguacaucuggggcgugcaccaccccggcaccgacaacgaccagaucuuccuguacgcccaggccagcggcagaaucaccgugagcaccaagagaagccagcagaccgugauccccaacaucggcagcagacccagagugagaaacauccccagcagaaucagcaucuacuggaccaucgugaagcccggcgacauccugcugaucaacagcaccggcaaccugaucgcccccagaggcuacuucaagaucagaagcggcaagagcagcaucaugagaagcgacgcccccaucggcaagugcaacagcgagugcaucacccccaacggcagcauccccaacgacaagcccuuccagaacgugaacagaaucaccuacggcgccugccccagauacgugaagcagaacacccugaagcuggccaccggcaugagaaacgugcccgagaagcagaccagaggcaucuucggcgccaucgccggcuucaucgagaacggcugggagggcaugguggacggcugguacggcuucagacaccagaacagcgagggcagaggccaggccgccgaccugaagagcacccaggccgccaucgaccagaucaacggcaagcugaacagacugaucggcaagaccaacgagaaguuccaccagaucgagaaggaguucagcgagguggagggcagaauccaggaccuggagaaguacguggaggacaccaagaucgaccuguggagcuacaacgccgagcugcugguggcccuggagaaccagcacaccaucgaccugaccgacagcgagaugaacaagcuguucgagaagaccaagaagcagcugagagagaacgccgaggacaugggcaacggcugcuucaagaucuaccacaagugcgacaacgccugcaucggcagcaucagaaacggcaccuacgaccacgacguguacagagacgaggcccugaacaacagauuccagaucaagggcguggagcugaagagcggcuacaaggacuggauccuguggaucagcuucgccaucagcugcuuccugcugugcguggcccugcugggcuucaucaugugggccugccagaagggcaacaucagaugcaacaucugcaucuga

SEQ ID NO: 165561 - RNA, 1698 nt, Artificial Sequence
  derived and/or modified CDS sequence (opt4) from hemagglutinin__InfluenzaA__ADL39291
augaaggugaagcugcuggugcugcugugcaccuucaccgccaccuacgccgacaccaucugcaucggcuaccacgccaacaacagcaccgacaccguggacaccgugcuggagaagaacgugaccgugacccacagcgugaaccugcuggagaacagccacaacggcaagcugugccugcugaagggcaucgccccccugcagcugggcaacugcagcguggccggcuggauccugggcaaccccgagugcgagcugcugaucagcaaggagagcuggagcuacaucguggagaagcccaaccccgagaacggcaccugcuaccccggccacuucgccgacuacgaggagcugagagagcagcugagcagcgugagcagcuucgagagauucgagaucuuccccaaggagagcagcuggcccaaccacaccgugaccggcgugagcgccagcugcagccacaacggcgagagcagcuucuacagaaaccugcuguggcugaccgagaagaacggccuguaccccaaccugagcaagagcuacgccaacaacaaggagaaggaggugcuggugcuguggggcgugcaccacccccccaacaugggcgaccagaagacccuguaccacaccgagaacgccuacgugagcguggugagcagccacuacagcagaaaguucacccccgagaucgccaagagacccaaggugagagaccaggagggcagaaucaacuacuacuggacccugcuggagcccggcgacaccaucaucuucgaggccaacggcaaccugaucgcccccagauacgccuucgcccugagcagaggcuucggcagcggcaucaucaacagcaacgcccccauggacaagugcgacgccaagugccagaccccccagggcgccaucaacagcagccugcccuuccagaacgugcaccccgugaccaucggcgagugccccaaguacgugagaagcgccaagcugagaauggugaccggccugagaaacauccccagcauccagagcagaggccuguucggcgccaucgccggcuucaucgagggcggcuggaccggcaugguggacggcugguacggcuaccaccaccagaacgagcagggcagcggcuacgccgccgaccagaagagcacccagaacgccaucaacggcaucaccaacaaggugaacagcgugaucgagaagaugaacacccaguucaccgccgugggcaaggaguucaacaagcuggagagaagaauggagaaccugaacaagaagguggacgacggcuucaucgacaucuggaccuacaacgccgagcugcuggugcugcuggagaacgagagaacccuggacuuccacgacagcaacgugaagaaccuguacgagaaggugaagagccagcugaagaacaacgccaaggagaucggcaacggcugcuucgaguucuaccacaagugcaacgacgagugcauggagagcgugaagaacggcaccuacgacuaccccaaguacagcgaggagagcaagcugaacagagagaagaucgacggcgugaagcuggagagcaugggcguguaccagauccuggccaucuacagcaccguggccagcagccuggugcugcuggugagccugggcgccaucagcuucuggaugugcagcaacggcagccugcagugcagaaucugcaucuga

SEQ ID NO: 165562 - RNA, 1701 nt, Artificial Sequence; identical to SEQ ID NO: 162494
  derived and/or modified CDS sequence (opt4) from hemagglutinin__InfluenzaA__ADL39302

SEQ ID NO: 165563 - RNA, 1701 nt, Artificial Sequence; identical to SEQ ID NO: 165560
  derived and/or modified CDS sequence (opt4) from hemagglutinin__InfluenzaA__ADL39313

SEQ ID NO: 165564 - RNA, 1701 nt, Artificial Sequence
  derived and/or modified CDS sequence (opt4) from hemagglutinin__InfluenzaA__ADL39335
augaagaccaucaucgcccugagcuacauccugugccugguguucgcccagaagcugcccggcaacgacaacagcaccgccacccugugccugggccaccacgccgugcccaacggcaccaucgugaagaccaucaccaacgaccagaucgaggugaccaacgccaccgagcuggugcagagcagcagcaccggcgagaucugcgacagcccccaccagauccuggacggcgagaacugcacccugaucgacgcccugcugggcgacccccagugcgacggcuuccagaacaagaagugggaccuguucguggagagaagcaaggccuacagcaacugcuaccccuacgacgugcccgacuacgccagccugagaagccugguggccagcagcggcacccuggaguucaacaacgagagcuucaacuggaccggcgugacccagaacggcaccagcagcgccugcaucagaagaagcaacaacagcuucuucagcagacugaacuggcugacccaccugagauucaaguaccccgcccugaacgugaccaugcccaacaacgagcaguucgacaagcuguacaucuggggcgugcaccaccccggcaccgacaacgaccagaucuuccuguacgcccaggccagcggcagaaucaccgugagcaccaagagaagccagcagaccgugauccccaacaucggcagcagacccagagugagaaacauccccagcagaaucagcaucuacuggaccaucgugaagcccggcgacauccugcugaucaacagcaccggcaaccugaucgcccccagaggcuacuucaagaucagaagcggcaagagcagcaucaugagaagcgacgcccccaucggcaagugcaacagcgagugcaucacccccaacggcagcauccccaacgacaagcccuuccagaacgugaacagaaucaccuacggcgccugccccagauacgugaagcagaacacccugaagcuggccaccggcaugagaaacgugcccgagaagcagaccagaggcaucuucggcgccaucgccggcuucaucgagaacggcugggagggcaugguggacggcugguacggcuucagacaccagaacagcgagggcagaggccaggccgccgaccugaagagcacccaggccgccaucgaccagaucaacggcaagcugaacagacugaucggcaagaccaacgagaaguuccaccagaucgagaaggaguucagcgagguggagggcagaauccaggaccuggagaaguacguggaggacaccaagaucgaccuguggagcuacaacgccgagcugcugguggcccuggagaaccagcacaccauccaccugaccgacagcgagaugaacaagcuguucgagaagaccaagaagcagcugagagagaacgccgaggacaugggcaacggcugcuucaagaucuaccacaagugcgacaacgccugcaucggcagcaucagaaacggcaccuacgaccacgacguguacagagacgaggcccugaacaacagauuccagaucaagggcguggagcugaagagcggcuacaaggacuggauccuguggaucagcuucgccaucagcugcuuccugcugugcguggcccugcugggcuucaucaugugggccugccagaagggcaacaucagaugcaacaucugcaucuga

SEQ ID NO: 165565 - RNA, 1701 nt, Artificial Sequence; identical to SEQ ID NO: 162494
  derived and/or modified CDS sequence (opt4) from hemagglutinin__InfluenzaA__ADL39368

SEQ ID NO: 165566 - RNA, 1698 nt, Artificial Sequence
  derived and/or modified CDS sequence (opt4) from hemagglutinin__InfluenzaA__ADL39390
augaaggugaagcugcuggugcugcugugcaccuucaccgccaccuacgccgacaccaucugcaucggcuaccacgccaacaacagcaccgacaccguggacaccgugcuggagaagaacgugaccgugacccacagcgugaaccugcuggagaacagccacaacggcaagcugugccugcugaagggcaucgccccccugcagcugggcaacugcagcguggccggcuggauccugggcaaccccgagugcgagcugcugaucagcaaggagagcuggagcuacaucguggagaagcccaaccccgagaacggcaccugcuaccccggccacuucgccgacuacgaggagcugagagagcagcugagcagcgugagcagcuucgagagauucgagaucuuccccaaggagagcagcuggcccaaccacaccgugaccggcgugagcgccagcugcagccacaacggcgagagcagcuucuacagaaaccugcuguggcugaccggcaagaacggccuguaccccagccugagcaagagcuacgccaacaacaaggagaaggaggugcuggugcuguggggcgugcaccacccccccaacaucguggaccagaagacccuguacagaaccgagaacgccuacgugagcguggugagcagccacuacagcagaaaguucacccccgagaucgccaagagacccaaggugagagaccaggagggcagaaucaacuacuacuggacccugcuggagcccggcgacaccaucaucuucgaggccaacggcaaccugaucgcccccagauacgccuucgcccugagcagaggcuucggcagcggcaucaucaacagcaacgcccccaugggcaagugcgacgccaagugccagaccccccagggcgccaucaacagcagccugcccuuccagaacgugcaccccgugaccaucggcgagugccccaaguacgugagaagcgccaagcugagaauggugaccggccugagaaacauccccagcauccagagcagaggccuguucggcgccaucgccggcuucaucgagggcggcuggaccggcaugguggacggcugguacggcuaccaccaccagaacgagcagggcagcggcuacgccgccgaccagaagagcacccagaacgccaucaacggcaucaccaacaaggugaacagcgugaucgagaagaugaacacccaguucaccgccgugggcaaggaguucaacaagcuggagagaagaauggagaaccugaacaagaagguggacgacggcuucaucgacaucuggaccuacaacgccgagcugcuggugcugcuggagaacgagagaacccuggacuuccacgacagcaacgugaagaaccuguacgagaaggugaagagccagcugaagaacaacgccaaggagaucggcaacggcugcuucgaguucuaccacaagugcaacgacgagugcauggagagcgugaagaacggcaccuacgacuaccccaaguacagcgaggagagcaagcugaacagagagaagaucgacggcgugaagcuggagagcaugggcguguaccagauccuggccaucuacagcaccguggccagcagccuggugcugcuggugagccugggcgccaucagcuucuggaugugcagcaacggcagccugcagugcagaaucugcaucuga

SEQ ID NO: 165567 - RNA, 1701 nt, Artificial Sequence
  derived and/or modified CDS sequence (opt4) from hemagglutinin__InfluenzaA__ADL39401
augaagaccaucaucgcccugagcuacauccugugccugguguucgcccagaagcugcccggcaacgacaacagcaccgccacccugugccugggccaccacgccgugcccaacggcaccaucgugaagaccaucaccaacgaccagaucgaggugaccaacgccaccgagcuggugcagagcagcagcaccggcgagaucugcgacagcccccaccagauccuggacggcgagaacugcacccugaucgacgcccugcugggcgacccccagugcgacggcuuccagaacaagaagugggaccuguucguggagagaagcaaggccuacagcaacugcuaccccuacgacgugcccgacuacgccagccugagaagccugguggccagcagcggcacccuggaguucaacaacgagagcuucaacuggaccggcgugacccagaacggcaccagcagcagcugcaugagaagaagcaacaacagcuucuucagcagacugaacuggcugacccaccugaaguucaaguaccccgcccugaacgugaccaugcccaacaacgagcaguucgacaagcuguacaucuggggcgugcaccaccccggcaccgacaacgaccagaucuuccuguacgcccaggccagcggcagaaucaccgugagcaccaagagaagccagcagaccgugauccccaacaucggcagcagacccagagugagaaacauccccagcagaaucagcaucuacuggaccaucgugaagcccggcgacauccugcugaucaacagcaccggcaaccugaucgcccccagaggcuacuucaagaucagaagcggcaagagcagcaucaugagaagcgacgcccccaucggcaagugcaacagcgagugcaucacccccaacggcagcauccccaacgacaagcccuuccagaacgugaacagaaucaccuacggcgccugccccagauacgugaagcagaacacccugaagcuggccaccggcaugagaaacgugcccgagaagcagaccagaggcaucuucggcgccaucgccggcuucaucgagaacggcugggagggcaugguggacggcugguacggcuucagacaccagaacagcgagggcagaggccaggccgccgaccugaagagcacccaggccgccaucgaccagaucaacggcaagcugaacagacugaucggcaagaccaacgagaaguuccaccagaucgagaaggaguucagcgagguggagggcagaauccaggaccuggagaaguacguggaggacaccaagaucgaccuguggagcuacaacgccgagcugcugguggcccuggagaaccagcacaccaucgaccugaccgacagcgagaugaacaagcuguucgagaagaccaagaagcagcugagagagaacgccgaggacaugggcaacggcugcuucaagaucuaccacaagugcgacaacgccugcaucggcagcaucagaaacggcaccuacgaccacgacguguacagagacgaggcccugaacaacagauuccagaucaagggcguggagcugaagagcggcuacaaggacuggauccuguggaucagcuucgccaucagcugcuuccugcugugcguggcccugcugggcuucaucaugugggccugccagaagggcaacaucagaugcaacaucugcaucuga

SEQ ID NO: 165568 - RNA, 1701 nt, Artificial Sequence
  derived and/or modified CDS sequence (opt4) from hemagglutinin__InfluenzaA__ADL39412
augaagaccaucaucgcccugagcuacauccugugccugguguucgcccagaagcugcccggcaacgacaacagcaccgccacccugugccugggccaccacgccgugcccaacggcaccaucgugaagaccaucaccaacgaccagaucgaggugaccaacgccaccgagcuggugcagagcagcagcaccggcgagaucugcgacagcccccaccagauccuggacggcgagaacugcacccugaucgacgcccugcugggcgacccccagugcgacggcuuccagaacaagaagugggaccuguucguggagagaagcaaggccuacagcaacugcuaccccuacgacgugcccgacuacgccagccugagaagccugguggccagcagcggcacccuggaguucaacaacgagagcuucaacuggaccggcgugacccagaacggcaccagcagcgccugcaucagaagaagcaacaacagcuucuucagcagacugaacuggcugacccaccugaaguucaaguaccccgcccugaacgugaccaugcccaacaacgagcaguucgacaagcuguacaucuggggcgugcaccaccccggcaccgacaacgaccagaucuuccuguacgcccaggccagcggcagaaucaccgugagcaccaagagaagccagcagaccgugauccccaacaucggcagcagacccagagugagaaacauccccagcagaaucagcaucuacuggaccaucgugaagcccggcgacauccugcugaucaacagcaccggcaaccugaucgcccccagaggcuacuucaagaucagaagcgagaagagcagcaucaugagaagcgacgcccccaucggcaagugcaacagcgagugcaucacccccaacggcagcauccccaacgacaagcccuuccagaacgugaacagaaucaccuacggcgccugccccagauacgugaagcagaacacccugaagcuggccaccggcaugagaaacgugcccgagaagcagaccagaggcaucuucggcgccaucgccggcuucaucgagaacggcugggagggcaugguggacggcugguacggcuucagacaccagaacagcgagggcagaggccaggccgccgaccugaagagcacccaggccgccaucgaccagaucaacggcaagcugaacagacugaucggcaagaccaacgagaaguuccaccagaucgagaaggaguucagcgagguggagggcagaauccaggaccuggagaaguacguggaggacaccaagaucgaccuguggagcuacaacgccgagcugcugguggcccuggagaaccagcacaccaucgaccugaccgacagcgagaugaacaagcuguucgagaagaccaagaagcagcugagagagaacgccgaggacaugggcaacggcugcuucaagaucuaccacaagugcgacaacgccugcaucggcagcaucagaaacggcaccuacgaccacgacguguacagagacgaggcccugaacaacagauuccagaucaagggcguggagcugaagagcggcuacaaggacuggauccuguggaucagcuucgccaucagcugcuuccugcugugcguggcccugcugggcuucaucaugugggccugccagaagggcaacaucagaugcaacaucugcaucuga

SEQ ID NO: 165569 - RNA, 1698 nt, Artificial Sequence
  derived and/or modified CDS sequence (opt4) from hemagglutinin__InfluenzaA__ADL39423
augaaggugaagcugcuggugcugcugugcaccuucaccgccaccuacgccgacaccaucugcaucggcuaccacgccaacaacagcaccgacaccguggacaccgugcuggagaagaacgugaccgugacccacagcgugaaccugcuggagaacagccacaacggcaagcugugccugcugaagggcaucgccccccugcagcugggcaacugcagcguggccggcuggauccugggcaaccccgagugcgagcugcugaucagcaaggagagcuggagcuacaucguggagaagcccaaccccgagaacggcaccugcuaccccggccacuucgccgacuacgaggagcugagagagcagcugagcagcgugagcagcuucgagagauucgagaucuuccccaaggagagcagcuggcccagccacaccgugaccggcgugagcgccagcugcagccacaacggcgagaacagcuucuacagaaaccugcuguggcugaccggcaagaacggccuguaccccaaccugagcaagagcuacgccaacaacaaggagaaggaggugcuggugcuguggggcgugcaccacccccccaacaucgccgaccagaagacccuguaccacaccgagaacgccuacgugagcguggugagcagccacuacagcagaaaguucacccccgagaucgccaagagacccaaggugagagaccaggagggcagaaucaacuacuacuggacccugcuggagcccggcgacaccaucaucuucgaggccaacggcaaccugaucgcccccagauacgccuucgcccugagcagaggcuucggcagcggcaucaucaacagcaacgcccccauggacaagugcgacgccaagugccagaccccccagggcgccaucaacagcagccugcccuuccagaacgugcaccccgugaccaucggcgagugccccaaguacgugagaagcgccaagcugagaauggugaccggccugagaaacauccccagcauccagagcagaggccuguucggcgccaucgccggcuucaucgagggcggcuggaccggcaugguggacggcugguacggcuaccaccaccagaacgagcagggcagcggcuacgccgccgaccagaagagcacccagaacgccaucaacggcaucaccaacaaggugaacagcgugaucgagaagaugaacacccaguucaccgccgugggcaaggaguucaacaagcuggagagaagaauggagaaccugaacaagaagguggacgacggcuucaucgacaucuggaccuacaacgccgagcugcuggugcugcuggagaacgagagaacccuggacuuccacgacagcaacgugaagaaccuguacgagaaggugaagaaccagcugaagaacaacgccaaggagaucggcaacggcugcuucgaguucuaccacaagugcaacgacgagugcauggagagcgugaagaacggcaccuacgacuaccccaaguacagcgaggagagcaagcugaacagagagaagaucgacggcgugaagcuggagagcaugggcguguaccagauccuggccaucuacagcaccguggccagcagccuggugcugcuggugagccugggcgccaucagcuucuggaugugcagcaacggcagccugcagugcagaaucugcaucuga

SEQ ID NO: 165570 - RNA, 1701 nt, Artificial Sequence
  derived and/or modified CDS sequence (opt4) from hemagglutinin__InfluenzaA__ADL39434
augaagaccaucaucgcccugagcuacauccugugccugguguucgcccagaagcugcccggcaacgacaacagcaccgccacccugugccugggccaccacgccgugcccaacggcaccaucgugaagaccaucaccaacgaccagaucgaggugaccaacgccaccgagcuggugcagagcagcagcaccggcgagaucugcgacagcccccaccagauccuggacggcgagaacugcacccugaucgacgcccugcugggcgacccccagugcgacggcuuccagaacaagaagugggaccuguucguggagagaagcaaggccuacagcaacugcuaccccuacgacgugcccgacuacgccagccugagaagccugguggccagcagcggcacccuggaguucaacaacgagagcuucaacuggaccggcgugacccagaacggcaccagcagcgccugcaucagaagaagcaacaacagcuucuucagcagacugaacuggcugacccaccugagauucaaguaccccgcccugaacgugaccaugcccaacaacgagcaguucgacaagcuguacaucuggggcgugcaccaccccggcaccgacaacgaccagaucuuccuguacgcccaggccagcggcagaaucaccgugagcaccaagagaagccagcagaccgugauccccaacaucggcagcagacccagagugagagacauccccagcagaaucagcaucuacuggaccaucgugaagcccggcgacauccugcugaucaacagcaccggcaaccugaucgcccccagaggcuacuucaagaucagaagcggcaagagcagcaucaugagaagcgacgcccccaucggcaagugcaacagcgagugcaucacccccaacggcagcauccccaacgacaagcccuuccagaacgugaacagaaucaccuacggcgccugccccagauacgugaagcagaacacccugaagcuggccaccggcaugagaaacgugcccgagaagcagaccagaggcaucuucggcgccaucgccggcuucaucgagaacggcugggagggcaugguggacggcugguacggcuucagacaccagaacagcgagggcagaggccaggccgccgaccugaagagcacccaggccgccaucgaccagaucaacggcaagcugaacagacugaucggcaagaccaacgagaaguuccaccagaucgagaaggaguucagcgagguggagggcagaauccaggaccuggagaaguacguggaggacaccaagaucgaccuguggagcuacaacgccgagcugcugguggcccuggagaaccagcacaccaucgaccugaccgacagcgagaugaacaagcuguucgagaagaccaagaagcagcugagagagaacgccgaggacaugggcaacggcugcuucaagaucuaccacaagugcgacaacgccugcaucggcagcaucagaaacggcaccuacgaccacgacguguacagagacgaggcccugaacaacagauuccagaucaagggcguggagcugaagagcggcuacaaggacuggauccuguggaucagcuucgccaucagcugcuuccugcugugcguggcccugcugggcuucaucaugugggccugccagaagggcaacaucagaugcaacaucugcaucuga

SEQ ID NO: 165571 - RNA, 1698 nt, Artificial Sequence
  derived and/or modified CDS sequence (opt4) from hemagglutinin__InfluenzaA__ADL39445
augaaggugaagcugcuggugcugcugugcaccuucaccgccaccuacgccgacaccaucugcaucggcuaccacgccaacaacagcaccgacaccguggacaccgugcuggagaagaacgugaccgugacccacagcgugaaccugcuggagaacagccacaacggcaagcugugccugcugaagggcaucgccccccugcagcugggcaacugcagcguggccggcuggauccugggcaaccccgagugcgagcugcugaucagcaaggagagcuggagcuacaucguggagaagcccaaccccgagaacggcaccugcuaccccggccacuucgccgacuacgaggagcugagagagcagcugagcagcgugagcagcuucgagagauucgagaucuuccccaaggagagcagcuggcccaaccacaccgugaccggcgugagcgccagcugcagccacaacggcgagagcagcuucuacagaaaccugcuguggcugaccggcaagaacggccuguaccccacccugagcaagagcuacgccaacaacaaggagaaggaggugcuggugcuguggggcgugcaccacccccccaacaucguggaccagaagacccuguacagaaccgagaacgccuacgugagcguggugagcagccacuacagcagaaaguucacccccgagaucgccaagagacccaaggugagagaccaggagggcagaaucaacuacuacuggacccugcuggagcccggcgacaccaucaucuucgaggccaacggcaaccugaucgcccccagauacgccuucgcccugagcagaggcuucggcagcggcaucaucaacagcaacgcccccauggacaagugcgacgccaagugccagaccccccagggcgccaucaacagcagccugcccuuccagaacgugcaccccgugaccaucggcgagugccccaaguacgugagaagcgccaagcugagaauggugaccggccugagaaacauccccagcauccagagcagaggccuguucggcgccaucgccggcuucaucgagggcggcuggaccggcaugguggacggcugguacggcuaccaccaccagaacgagcagggcagcggcuacgccgccgaccagaagagcacccagaacgccaucaacggcaucaccaacaaggugaacagcgugaucgagaagaugaacacccaguucaccgccgugggcaaggaguucaacaagcuggagagaagaauggagaaccugaacaagaagguggacgacggcuucaucgacaucuggaccuacaacgccgagcugcuggugcugcuggagaacgagagaacccuggacuuccacgacagcaacgugaagaaccuguacgagaaggugaagagccagcugaagaacaacgccaaggagaucggcaacggcugcuucgaguucuaccacaagugcaacgacgagugcauggagagcgugaagaacggcaccuacgacuaccccaaguacagcgaggagagcaagcugaacagagagaagaucgacggcgugaagcuggagagcaugggcguguaccagauccuggccaucuacagcaccguggccagcagccuggugcugcuggugagccugggcgccaucagcuucuggaugugcagcaacggcagccugcagugcagaaucugcaucuga

SEQ ID NO: 165572 - RNA, 1698 nt, Artificial Sequence
  derived and/or modified CDS sequence (opt4) from hemagglutinin__InfluenzaA__ADL39456
augaaggugaagcugcuggugcugcugugcaccuucaccgccaccuacgccgacaccaucugcaucggcuaccacgccaacaacagcaccgacaccguggacaccgugcuggagaagaacgugaccgugacccacagcgugaaccugcuggagaacagccacaacggcaagcugugccugcugaagggcaucgccccccugcagcugggcaacugcagcguggccggcuggauccugggcaaccccgagugcgagcugcugaucagcaaggagagcuggagcuacaucguggagaagcccaaccccgagaacggcaccugcuaccccggccacuucgccgacuacgaggagcugagagagcagcugagcagcgugagcagcuucgagagauucgagaucuuccccaaggagagcagcuggcccagccacaccgugaccggcgugagcgccagcugcagccacaacggcgagaacagcuucuacagaaaccugcuguggcugaccggcaagaacggccuguaccccaaccugagcaagagcuacgccaacaacaaggagaaggaggugcuggugcuguggggcgugcaccacccccccaacaucgccgaccagaagacccuguaccacaccgagaacgccuacgugagcguggugagcagccacuacagcagaaaguucacccccgagaucgccaagagacccaaggugagagaccaggagggcagaaucaacuacuacuggacccugcuggagcccggcgacaccaucaucuucgaggccaacggcaaccugaucgcccccagauacgccuucgcccugagcagaggcuucggcagcggcaucaucaacagcaacgcccccauggacaagugcgacgccaagugccagaccccccagggcgccaucaacagcagccugcccuuccagaacgugcaccccgugaccaucggcgagugccccaaguacgugagaagcgccaagcugagaauggugaccggccugagaaacauccccagcauccagagcagaggccuguucggcgccaucgccggcuucaucgagggcggcuggaccggcaugguggacggcugguacggcuaccaccaccagaacgagcagggcagcggcuacgccgccgaccagaagagcacccagaacgccaucaacggcaucaccaacaaggugaacagcgugaucgagaagaugaacacccaguucaccgccgugggcaaggaguucaacaagcuggagagaagaauggagaaccugaacaagaagguggacgacggcuucaucgacaucuggaccuacaacgccgagcugcuggugcugcuggagaacgagagaacccuggacuuccacgacagcaacgugaagaaccuguacgagaaggugaagagccagcugaagaacaacgccaaggagaucggcaacggcugcuucgaguucuaccacaagugcaacgacgagugcauggagagcgugaagaacggcaccuacgacuaccccaaguacagcgaggagagcaagcugaacagagagaagaucgacggcgugaagcuggagagcaugggcguguaccagauccuggccaucuacagcaccguggccagcagccuggugcugcuggugagccugggcgccaucagcuucuggaugugcagcaacggcagccugcagugcagaaucugcaucuga

SEQ ID NO: 165573 - RNA, 1698 nt, Artificial Sequence
  derived and/or modified CDS sequence (opt4) from hemagglutinin__InfluenzaA__ADL39467
augaaggugaagcugcuggugcugcugugcaccuucaccgccaccuacgccgacaccaucugcaucggcuaccacgccaacaacagcaccgacaccguggacaccgugcuggagaagaacgugaccgugacccacagcgugaaccugcuggagaacagccacaacggcaagcugugccugcugaagggcaucgccccccugcagcugggcaacugcagcguggccggcuggauccugggcaaccccgagugcgagcugcugaucagcaaggagagcuggagcuacaucguggagaagcccaaccccgagaacggcaccugcuaccccggccacuucgccgacuacgaggagcugagagagcagcugagcagcgugagcagcuucgagagauucgagaucuuccccaaggagagcagcuggcccaaccacaccgugaccggcgugagcgccagcugcagccacaacggcgagagcagcuucuacagaaaccugcuguggcugaccggcaagaacggccuguaccccaaccugagcaagagcuacgccaacaacaaggagaaggaggugcuggugcuguggggcgugcaccacccccccaacaucguggaccagaagacccuguacagaaccgagaacgccuacgugagcguggugagcagccacuacagcagaaaguucacccccgagaucgccaagagacccaaggugagagaccaggagggcagaaucaacuacuacuggacccugcuggagcccggcgacaccaucaucuucgaggccaacggcaaccugaucgcccccagauacgccuucgcccugagcagaggcuucggcagcggcaucaucaacagcaacgcccccaugggcaagugcgacgccaagugccagaccccccagggcgccaucaacagcagccugcccuuccagaacgugcaccccgugaccaucggcgagugccccaaguacgugagaagcgccaagcugagaauggugaccggccugagaaacauccccagcauccagagcagaggccuguucggcgccaucgccggcuucaucgagggcggcuggaccggcaugguggacggcugguacggcuaccaccaccagaacgagcagggcagcggcuacgccgccgaccagaagagcacccagaacgccaucaacggcaucaccaacaaggugaacagcgugaucgagaagaugaacacccaguucaccgccgugggcaaggaguucaacaagcuggagagaagaauggagaaccugaacaagaagguggacgacggcuucaucgacaucuggaccuacaacgccgagcugcuggugcugcuggagaacgagagaacccuggacuuccacgacagcaacgugaagaaccuguacgagaaggugaagagccagcugaagaacaacgccaaggagaucggcaacggcugcuucgaguucuaccacaagugcaacgacgagugcauggagagcgugaagaacggcaccuacgacuaccccaaguacagcgaggagagcaagcugaacagagagaagaucgacggcgugaagcuggagagcaugggcguguaccagauccuggccaucuacagcaccguggccagcagccuggugcugcuggugagccugggcgccaucagcuucuggaugugcagcaacggcagccugcagugcagaaucugcaucuga

SEQ ID NO: 165574 - RNA, 1701 nt, Artificial Sequence; identical to SEQ ID NO: 162729
  derived and/or modified CDS sequence (opt4) from hemagglutinin__InfluenzaA__ADL41164

SEQ ID NO: 165575 - RNA, 1701 nt, Artificial Sequence; identical to SEQ ID NO: 162822
  derived and/or modified CDS sequence (opt4) from hemagglutinin__InfluenzaA__ADL41173

SEQ ID NO: 165576 - RNA, 1698 nt, Artificial Sequence
  derived and/or modified CDS sequence (opt4) from hemagglutinin__InfluenzaA__ADL60242
augaaggugaagcugcuggugcugcugugcaccuucaccgccaccuacgccgacaccaucugcaucggcuaccacgccaacaacagcaccgacaccguggacaccgugcuggagaagaacgugaccgugacccacagcgugaaccugcuggagaacagccacaacggcaagcugugccugcugaagggcaucgccccccugcagcugggcaacugcagcguggccggcuggauccugggcaaccccgagugcgagcugcugaucagcaaggagagcuggagcuacaucguggagaagcccaaccccgagaacggcaccugcuaccccggccacuucgccgacuacgaggagcugagagagcagcugagcagcgugagcagcuucgagagauucgagaucuuccccaaggagagcagcuggcccaaccacaccgugaccggcgugagcgccagcugcagccacaacggcgagagaagcuucuacagaaaccugcuguggcugaccggcaagaacggccuguaccccaaccugagcaagagcuacgccaacaacaaggagaaggaggugcuggugcuguggggcgugcaccacccccccgacaucggcaaccagaagacccuguaccacaccgagaacgccuacgugagcguggugagcagccacuacagcagaaaguucacccccgagaucgccaagagacccaaggugagagaccaggagggcagaaucaacuacuacuggacccugcuggagcccggcgacaccaucaucuucgaggccaacggcaaccugaucgcccccagauacgccuucgcccugagcagaggcuucggcagcggcaucaucaacagcaacgcccccauggacaagugcgacgccaagugccagaccccccagggcgccaucaacagcagccugcccuuccagaacgugcaccccgugaccaucggcgagugccccaaguacgugagaagcgccaagcugagaauggugaccggccugagaaacauccccagcauccagagcagaggccuguucggcgccaucgccggcuucaucgagggcggcuggaccggcaugguggacggcugguacggcuaccaccaccagaacgagcagggcagcggcuacgccgccgaccagaagagcacccagaacgccaucaacggcaucaccaacaaggugaacagcgugaucgagaagaugaacacccaguucaccgccgugggcaaggaguucaacaagcuggagagaagaauggagaaccugaacaagaagguggacgacggcuucaucgacaucuggaccuacaacgccgagcugcuggugcugcuggagaacgagagaacccuggacuuccacgacagcaacgugaagaaccuguacgagaaggugaagagccagcugaagaacaacgccaaggagaucggcaacggcugcuucgaguucuaccacaagugcaacgacgagugcauggagagcgugaagaacggcaccuacgacuaccccaaguacagcgaggagagcaagcugaacagagagaagaucgacggcgugaagcuggagagcaugggcguguaccagauccuggccaucuacagcaccguggccagcagccuggugcugcuggugagccugggcgccaucagcuucuggaugugcagcaacggcagccugcagugcagaaucugcaucuga

SEQ ID NO: 165577 - RNA, 1698 nt, Artificial Sequence
  derived and/or modified CDS sequence (opt4) from hemagglutinin__InfluenzaA__ADL60253
augaaggugaagcugcuggugcugcugugcaccuucaccgccaccuacgccgacaccaucugcaucggcuaccacgccaacaacagcaccgacaccguggacaccgugcuggagaagaacgugaccgugacccacagcgugaaccugcuggagaacagccacaacggcaagcugugccugcugaagggcaucgccccccugcagcugggcaacugcagcguggccggcuggauccugggcaaccccgagugcggccugcugaucagcaaggagagcuggagcuacaucguggagaagcccaaccccgagaacggcaccugcuaccccggcuacuucgccgacuacgaggagcugagagagcagcugagcagcgugagcagcuucgagagauucgagaucuuccccaaggagagcagcuggcccaaccacaccgugaccggcgugagcgccagcugcagccacaacggcgagagcagcuucuacagaaaccugcuguggcugaccggcaagaacggccuguaccccaaccugagcaagagcuacgccaacaacaaggagaaggaggugcuggugcuguggggcgugcaccacccccccaacaucggcaaccagaaggcccuguaccacaccgagaacgccuacgugagcguggugagcagccacuacagcagaaaguucacccccgagaucgccaagagacccaaggugagagaccaggagggcagaaucaacuacuacuggacccugcuggagcccggcgacaccaucaucuucgaggccaacggcaaccugaucgcccccagauacgccuucgcccugagcagaggcuucggcagcggcaucaucaacagcaacgcccccauggacaagugcgacgccaagugccagaccccccagggcgccaucaacagcagccugcccuuccagaacgugcaccccgugaccaucggcgagugccccaaguacgugagaagcgccaagcugagaauggugaccggccugagaaacauccccagcauccagagcagaggccuguucggcgccaucgccggcuucaucgagggcggcuggaccggcaugguggacggcugguacggcuaccaccaccagaacgagcagggcagcggcuacgccgccgaccagaagagcacccagaacgccaucaacggcaucaccaacaaggugaacagcgugaucgagaagaugaacacccaguucaccgccgugggcaaggaguucaacaagcuggagagaagaauggagaaccugaacaagaagguggacgacggcuucaucgacaucuggaccuacaacgccgagcugcuggugcugcuggagaacgagagaacccuggacuuccacgacagcaacgugaagaaccuguacgagaaggugaagagccagcugaagaacaacgccaaggagaucggcaacggcugcuucgaguucuaccacaagugcaacgacgagugcauggagagcgugaagaacggcaccuacgacuaccccaaguacagcgaggagagcaagcugaacagagagaagaucgacggcgugaagcuggagagcaugggcguguaccagauccuggccaucuacagcaccguggccagcagccuggugcugcuggugagccugggcgccaucagcuucuggaugugcagcaacggcagccugcagugcagaaucugcaucuga

SEQ ID NO: 165578 - RNA, 1698 nt, Artificial Sequence; identical to SEQ ID NO: 165576
  derived and/or modified CDS sequence (opt4) from hemagglutinin__InfluenzaA__ADL60264

SEQ ID NO: 165579 - RNA, 1698 nt, Artificial Sequence; identical to SEQ ID NO: 165576
  derived and/or modified CDS sequence (opt4) from hemagglutinin__InfluenzaA__ADL60275

SEQ ID NO: 165580 - RNA, 1698 nt, Artificial Sequence
  derived and/or modified CDS sequence (opt4) from hemagglutinin__InfluenzaA__ADL60286
augaaggugaagcugcuggugcugcugugcaccuucaccgccaccuacgccgacaccaucugcaucggcuaccacgccaacaacagcaccgacaccguggacaccgugcuggagaagaacgugaccgugacccacagcgugaaccugcuggagaacagccacaacggcaagcugugccugcugaagggcaucgccccccugcagcugggcaacugcagcguggccggcuggauccugggcaaccccgagugcgagcugcugaucagcaaggagagcuggagcuacaucguggagaagcccaaccccgagaacggcaccugcuaccccggccacuucgccgacuacgaggagcugagagagcagcugagcagcgugagcagcuucgagagauucgagaucuuccccaaggagagcagcuggcccaaccacaccgugaccggcgugagcgccagcugcagccacaacggcgagagcagcuucuacagaaaccugcuguggcugaccggcaagaacggccuguaccccaaccugagcaagagcuacgccaacaacaaggagaaggaggugcuggugcuguggggcgugcaccacccccccagcaucagcaaccagaagacccuguaccacaccgagaacgccuacgugagcguggugagcagccacuacagcagaaaguucacccccgagguggccaagagacccaaggugagagaccaggagggcagaaucaacuacuacuggacccugcuggagcccggcgacaccaucaucuucgaggccaacggcaaccugaucgcccccagauacgccuucgcccugagcagaggcuucggcagcggcaucaucaacagcaacgcccccauggacaagugcgacgccaagugccagaccccccagggcgccaucaacagcagccugcccuuccagaacgugcaccccgugaccaucggcgagugccccaaguacgugagaagcgccaagcugagaauggugaccggccugagaaacauccccagcauccagagcagaggccuguucggcgccaucgccggcuucaucgagggcggcuggaccggcaugguggacggcugguacggcuaccaccaccagaacgagcagggcagcggcuacgccgccgaccagaagagcacccagaacgccaucaacggcaucaccaacaaggugaacagcgugaucgagaagaugaacacccaguucaccgccgugggcaaggaguucaacaagcuggagagaagaauggagaaccugaacaagaagguggacgacggcuucaucgacaucuggaccuacaacgccgagcugcuggugcugcuggagaacgagagaacccuggacuuccacgacagcaacgugaagaaccuguacgagaaggugaagagccagcugaagaacaacgccaaggagaucggcaacggcugcuucgaguucuaccacaagugcaacgacgagugcauggagagcgugaagaacggcaccuacgacuaccccaaguacagcgaggagagcaagcugaacagagagaagaucgacggcgugaagcuggagagcaugggcguguaccagauccuggccaucuacagcaccguggccagcagccuggugcugcuggugagccugggcgccaucagcuucuggaugugcagcaacggcagccugcagugcagaaucugcaucuga

SEQ ID NO: 165581 - RNA, 1698 nt, Artificial Sequence
  derived and/or modified CDS sequence (opt4) from hemagglutinin__InfluenzaA__ADL60297
augaaggugaagcugcuggugcugcugugcaccuucaccgccaccuacgccgacaccaucugcaucggcuaccacgccaacaacagcaccgacaccguggacaccgugcuggagaagaacgugaccgugacccacagcgugaaccugcuggagaacagccacaacggcaagcugugccugcugaagggcaucgccccccugcagcugggcaacugcagcguggccggcuggauccugggcaaccccgagugcgagcugcugaucagcaaggagagcuggagcuacaucguggagaagcccaaccccgagaacggcaccugcuaccccggccacuucgccgacuacgaggagcugagagagcagcugagcagcgugagcagcuucgagagauucgagaucuuccccaaggagagcagcuggcccaaccacaccgugaccggcgugagcgccagcugcagccacaacggcgagagcagcuucuacagaaaccugcuguggcugaccagaaagaacggccuguaccccaaccugagcaagagcuacgccaacaacaaggagaaggaggugcuggugcuguggggcgugcaccacccccccaacaucggcgaccagaagacccuguaccacaccgagaacgccuacgugagcguggugagcagccacuacagcagaaaguucacccccgagaucgccaagagacccaaggugagagaccaggagggcagaaucaacuacuacuggacccugcuggagcccggcgacaccaucaucuucgaggccaacggcaaccugaucgcccccagauacgccuucgcccugagcagaggcuucggcagcggcaucaucaacagcaacgcccccauggacaagugcgacgccaagugccagaccccccagggcgccaucaacagcagccugcccuuccagaacgugcaccccgugaccaucggcgagugccccaaguacgugagaagcgccaagcugagaauggugaccggccugagaaacauccccagcauccagagcagaggccuguucggcgccaucgccggcuucaucgagggcggcuggaccggcaugguggacggcugguacggcuaccaccaccagaacgagcagggcagcggcuacgccgccgaccagaagagcacccagaacgccaucaacggcaucaccaacaaggugaacagcgugaucgagaagaugaacacccaguucaccgccgugggcaaggaguucaacaagcuggagagaagaauggagaaccugaacaagaagguggacgacggcuucaucgacaucuggaccuacaacgccgagcugcuggugcugcuggagaacgagagaacccuggacagccacgacagcaacgugaagaaccuguacgagaaggugaagagccagcugaagaacaacgccaaggagaucggcaacggcugcuucgaguucuaccacaagugcaacgacgagugcauggagagcgugaagaacggcaccuacgacuaccccaaguacagcgaggagagcaagcugaacagagagaagaucgacggcgugaagcuggagagcaugggcguguaccagauccuggccaucuacagcaccguggccagcagccuggugcugcuggugagccugggcgccaucagcuucuggaugugcagcaacggcagccugcagugcagaaucugcaucuga

SEQ ID NO: 165582 - RNA, 1698 nt, Artificial Sequence
  derived and/or modified CDS sequence (opt4) from hemagglutinin__InfluenzaA__ADL60308
augaaggugaagcugcuggugcugcugugcaccuucgccgccaccuacgccgacaccaucugcaucggcuaccacgccaacaacagcaccgacaccguggacaccgugcuggagaagaacgugaccgugacccacagcgugaaccugcuggagaacagccacaacggcaagcugugccugcugaagggcaucgccccccugcagcugggcaacugcagcguggccggcuggauccugggcaaccccgagugcgagcugcugaucagcaaggagagcuggagcuacaucguggagaagcccaaccccgagaacggcaccugcuaccccggccacuucgccgacuacgaggagcugagagagcagcugagcagcgugagcagcuucgagagauucgagaucuuccccaaggagagcagcuggcccaaccacaccgugaccggcgugagcgccagcugcagccacaacggcgagagcagcuucuacagaaaccugcuguggcugaccggcaagaacggccuguaccccaaccugagcaagagcuacgccaacaacaaggagaaggaggugcuggugcuguggggcgugcaccacccccccaacaucggcgugcagaaggcccuguaccacaccgagaacgccuacgugagcguggugagcagccacuacagcagaaaguucacccccgagaucgccaagagacccaaggugagagaccaggagggcagaaucaacuacuacuggacccugcuggagcccggcgacaccaucaucuucgaggccaacggcaaccugaucgcccccagauacgccuucgcccugagcagaggcuucggcagcggcaucaucaacagcaacgcccccauggacaagugcgacgccaagugccagaccccccagggcgccaucaacagcagccugcccuuccagaacgugcaccccgugaccaucggcgagugccccaaguacgugagaagcgccaagcugagaauggugaccggccugagaaacauccccagcauccagagcagaggccuguucggcgccaucgccggcuucaucgagggcggcuggaccggcaugguggacggcugguacggcuaccaccaccagaacgagcagggcagcggcuacgccgccgaccagaagagcacccagaacgccaucaacggcaucaccaacaaggugaacagcgugaucgagaagaugaacacccaguucaccgccgugggcaaggaguucaacaagcuggagagaagaauggagaaccugaacaagaagguggacgacggcuucaucgacaucuggaccuacaacgccgagcugcuggugcugcuggagaacgagagaacccuggacuuccacgacagcaacgugaagaaccuguacgagaaggugaagagccagcugaagaacaacgccaaggagaucggcaacggcugcuucgaguucuaccacaagugcaacgacgagugcauggagagcgugaagaacggcaccuacgacuaccccaaguacagcgaggagagcaagcugaacagagagaagaucgacggcgugaagcuggagagcaugggcguguaccagauccuggccaucuacagcaccguggccagcagccuggugcugcuggugagccugggcgccaucagcuucuggaugugcagcaacggcagccugcagugcagaaucugcaucuga

SEQ ID NO: 165583 - RNA, 1698 nt, Artificial Sequence
  derived and/or modified CDS sequence (opt4) from hemagglutinin__InfluenzaA__ADL60341
augaaggugaagcugcuggugcugcugugcaccuucaccgccaccuacgccgacaccaucugcaucggcuaccacgccaacaacagcaccgacaccguggacaccgugcuggagaagaacgugaccgugacccacagcgugaaccugcuggagaacagccacaacggcaagcugugccugcugaagggcaucgccccccugcagcugggcaacugcagcguggccggcuggauccugggcaaccccgagugcgagcugcugaucagcaaggagagcuggagcuacaucguggagaagcccaaccccgagaacggcaccugcuaccccggccacuucgccgacuacgaggagcugagagagcagcugagcagcgugagcagcuucgagagauucgagaucuuccccaaggagagcagcuggcccaaccacaccgugaccggcgugagcgccagcugcagccacaacggcgagagcagcuucuacagaaaccugcuguggcugaccggcaagaacggccuguaccccaaccugagcaagagcuacgccaacaacaaggagaaggaggugcuggugcuguggggcgugcaccacccccccaacaucggcgugcagaaggcccuguaccacaccgagaucgccuacgugagcguggugagcagccacuacagcagaaaguucacccccgagaucgccaagagacccaaggugagagaccaggagggcagaaucaacuacuacuggaccauccuggagcccggcgacaccaucaucuucgaggccaacggcaaccugaucgcccccagauacgccuucgcccugagcagaggcuucggcagcggcaucaucaacagcaacgcccccauggacaagugcgacgccaagugccagaccccccagggcgccaucaacagcagccugcccuuccagaacgugcaccccgugaccaucggcgagugccccaaguacgugagaagcgccaagcugagaauggugaccggccugagaaacauccccagcauccagagcagaggccuguucggcgccaucgccggcuucaucgagggcggcuggaccggcaugguggacggcugguacggcuaccaccaccagaacgagcagggcagcggcuacgccgccgaccagaagagcacccagaacgccaucaacggcaucaccaacaaggugaacagcgugaucgagaagaugaacacccaguucaccgccgugggcaaggaguucaacaagcuggagagaagaauggagaaccugaacaagaagguggacgacggcuucaucgacaucuggaccuacaacgccgagcugcuggugcugcuggagaacgagagaacccuggacuuccacgacagcaacgugaagaaccuguacgagaaggugaagagccagcugaagaacaacgccaaggagaucggcaacggcugcuucgaguucuaccacaagugcaacgacgagugcauggagagcgugaagaacggcaccuacgacuaccccaaguacagcgaggagagcaagcugaacagagagaagaucgacggcgugaagcuggagagcaugggcguguaccagauccuggccaucuacagcaccguggccagcagccuggugcugcuggugagccugggcgccaucagcuucuggaugugcagcaacggcagccugcagugcagaaucugcaucuga

SEQ ID NO: 165584 - RNA, 1698 nt, Artificial Sequence
  derived and/or modified CDS sequence (opt4) from hemagglutinin__InfluenzaA__ADL60352
augaaggugaagcugcuggugcugcugugcaccuucaccgccaccuacgccgacaccaucugcaucggcuaccacgccaacaacagcaccgacaccguggacaccgugcuggagaagaacgugaccgugacccacagcgugaaccugcuggagaacagccacaacggcaagcugugccugcugaagggcaucgccccccugcagcugggcaacugcagcguggccggcuggauccugggcaaccccgagugcgagcugcugaucagcaaggagagcuggagcuacaucguggagaagcccaaccccgagaacggcaccugcuaccccggccacuucgccggcuacgaggagcugagagagcagcugagcagcgugagcagcuucgagagauucgagaucuuccccaaggagagcagcuggcccaaccacaccgugaccggcgugagcgccagcugcagccacaacggcgagagaagcuucuacagaaaccugcuguggcugaccggcaagaacggccuguaccccaaccugagcaagagcuacgccaacaacaaggagaaggaggugcuggugcuguggggcgugcaccacccccccgacaucggcaaccagaagacccuguaccacaccgagaacgccuacgugagcguggugagcagccacuacagcagaaaguucacccccgagaucgccaagagacccaaggugagagaccaggagggcagaaucaacuacuacuggacccugcuggagcccggcgacaccaucaucuucgaggccaacggcaaccugaucgcccccagauacgccuucgcccugagcagaggcuucggcagcggcaucaucaacagcaacgcccccauggacaagugcgacgccaagugccagaccccccagggcgccaucaacagcagccugcccuuccagaacgugcaccccgugaccaucggcgagugccccaaguacgugagaagcgccaagcugagaauggugaccggccugagaaacauccccagcauccagagcagaggccuguucggcgccaucgccggcuucaucgagggcggcuggaccggcaugguggacggcugguacggcuaccaccaccagaacgagcagggcagcggcuacgccgccgaccagaagagcacccagaacgccaucaacggcaucaccaacaaggugaacagcgugaucgagaagaugaacacccaguucaccgccgugggcaaggaguucaacaagcuggagagaagaauggagaaccugaacaagaagguggacgacggcuucaucgacaucuggaccuacaacgccgagcugcuggugcugcuggagaacgagagaacccuggacuuccacgacagcaacgugaagaaccuguacgagaaggugaagagccagcugaagaacaacgccaaggagaucggcaacggcugcuucgaguucuaccacaagugcaacgacgagugcauggagagcgugaagaacggcaccuacgacuaccccaaguacagcgaggagagcaagcugaacagagagaagaucgacggcgugaagcuggagagcaugggcguguaccagauccuggccaucuacagcaccguggccagcagccuggugcugcuggugagccugggcgccaucagcuucuggaugugcagcaacggcagccugcagugcagaaucugcaucuga

SEQ ID NO: 165585 - RNA, 1701 nt, Artificial Sequence
  derived and/or modified CDS sequence (opt4) from hemagglutinin__InfluenzaA__ADL60363
augaagaccaucaucgcccugagcuacauccugugccugguguucgcccagaaguuccccggcaacgacaacagcaccgccacccugugccugggccaccacgccgugcccaacggcaccaucgugaagaccaucaccaacgaccagaucgaggugaccaacgccaccgagcuggugcagagcagcagcaccggcgagaucugcgacagcccccaccagauccuggacggcgagaacugcacccugaucgacgcccugcugggcgacccccagugcgacggcuuccagaacaagaacugggaccuguucguggagagaagcaaggccuacagcaacugcuaccccuacgacgugcccgacuacgccagccugagaagccugaucgccagcagcggcacccuggaguucaacaacgagagcuucaacuggaccggcgugacccagaacggcaccagcagcgccugcaucagaagaagcaacaacagcuucuucagcagacugaacuggcugacccacagcaaguucaaguaccccgcccugaacgugaccaugcccaacaacgagaacuucgacaagcuguacaucuggggcgugcaccaccccggcaccgacaacgaccagaucuuccuguacgcccaggccagcggcagaaucaccaucagcaccaagagaagccagcagaccgugauccccaacaucggcagcagacccagagugagagacauccccagcagaaucagcaucuacuggaccaucgugaagcccggcgacauccugcugaucaacagcaccggcaaccugaucgcccccagaggcuacuucaagaucagaagcggcaagagcagcaucaugagaagcgacgcccccaucggcaagugcaacagcgagugcaucacccccaacggcagcauccccaacgacaagcccuuccagaacgugaacagaaucaccuacggcgccugccccagauacgugaagcagaacacccugaagcuggccaccggcaugagaaacgugcccgagaagcagaccagaggcaucuucggcgccaucgccggcuucaucgagaacggcugggagggcaugguggacggcugguacggcuucagacaccagaacagcgagggcgugggccaggccgccgaccugaagagcacccaggccgccaucgaccagaucaacggcaagcugaacagacugaucggcaagaccaacgagaaguuccaccagaucgagaaggaguucagcgagguggagggcagaauccaggaccuggagaaguacguggaggacaccaagaucgaccuguggagcuacaacgccgagcugcugguggcccuggagaaccagcacaccaucgaccugaccgacagcgagaugaacaagcuguucgagaagaccaagaagcagcugagagagaacgccgaggacaugggcaacggcugcuucaagaucuaccacaagugcgacaacgccugcaucggcagcaucagaaacggcaccuacgaccacgacguguacagagacgaggcccugaacaacagauuccagaucaagggcguggagcugaagagcggcuacaaggacuggauccuguggaucagcuucgccaucagcugcuuccugcugugcaucgcccugcugggcuucaucaugugggccugccagaagggcaacaucagaugcaacaucugcaucuga

SEQ ID NO: 165586 - RNA, 1698 nt, Artificial Sequence
  derived and/or modified CDS sequence (opt4) from hemagglutinin__InfluenzaA__ADL60374
augaaggugaagcugcuggugcugcugugcaccuucaccgccaccuacgccgacaccaucugcaucggcuaccacgccaacaacagcaccgacaccguggacaccgugcuggagaagaacgugaccgugacccacagcgugaaccugcuggagaacagccacaacggcaagcugugccugcugaagggcaucgccccccugcagcugggcaacugcagcguggccggcuggauccugggcaaccccgagugcgagcugcugaucagcaaggagagcuggagcuacaucguggagaagcccaaccccgagaacggcaccugcuaccccggccacuucgccgacuacgaggagcugagagagcagcugagcagcgugagcagcuucgagagauucgagaucuuccccaaggagagcagcuggcccaaccacaccgugaccggcgugagcgccagcugcagccacgacggcgagagcagcuucuacagaaaccugcuguggcugaccggcaagaacggccuguaccccaaccugagcaagagcuacgccaacaacaaggagaaggaggugcuggugcuguggggcgugcaccacccccccaacaucggcgaccagaaggcccuguaccacaccgagaacgccuacgugagcguggugagcagccacuacagcagaaaguucacccccgagaucgccaagagacccaaggugagagaccaggagggcagaaucaacuacuacuggacccugcuggagcccggcgacaccaucaucuucgaggccaacggcaaccugaucgcccccagauacgccuucgcccugagcagaggcuucggcagcggcaucaucaacagcaacgcccccauggacaagugcgacgccaagugccagaccccccagggcgccaucaacagcagccugcccuuccagaacgugcaccccgugaccaucggcgagugccccaaguacgugagaagcgccaagcugagaguggugaccggccugagaaacauccccagcauccagagcagaggccuguucggcgccaucgccggcuucaucgagggcggcuggaccggcaugguggacggcugguacggcuaccaccaccagaacgagcagggcagcggcuacgccgccgaccagaagagcacccagaacgccaucaacggcaucaccaacaaggugaacagcgugaucgagaagaugaacacccaguucaccgccgugggcaaggaguucaacaagcuggagagaagaauggagaaccugaacaagaagguggacgacggcuucaucgacaucuggaccuacaacgccgagcugcuggugcugcuggagaacgagagaacccuggacuuccacgacagcaacgugaagaaccuguacgagaaggugaagagccagcugaagaacaacgccaaggagaucggcaacggcugcuucgaguucuaccacaagugcaacgacgagugcauggagagcgugaagaacggcaccuacgacuaccccaaguacagcgaggagagcaagcugaacagagagaagaucgacggcgugaagcuggagagcaugggcguguaccagauccuggccaucuacagcaccguggccagcagccuggugcugcuggugagccugggcgccaucagcuucuggaugugcagcaacggcagccugcagugcagaaucugcaucuga

SEQ ID NO: 165587 - RNA, 1701 nt, Artificial Sequence
  derived and/or modified CDS sequence (opt4) from hemagglutinin__InfluenzaA__ADM07135
augaaggccauccugguggugcugcuguacaccuucgccaccgccaacgccgacacccugugcaucggcuaccacgccaacaacagcaccgacaccguggacaccgugcuggagaagaacgugaccgugacccacagcgugaaccugcuggaggacaagcacaacggcaagcugugcaagcugagaggcguggccccccugcaccugggcaagugcaacaucgccggcuggauccugggcaaccccgagugcgagagccugagcaccgccagcagcuggagcuacaucguggagaccagcagcagcgacaacggcaccugcuaccccggcgacuucaucgacuacgaggagcugagagagcagcugagcagcgugagcagcuucgagagauucgagaucuuccccaagaccagcagcuggcccaaccacgagagcaacaagggcgugaccgccgccugcccccacgccggcgccaagagcuucuacaagaaccugaucuggcuggugaagaagggcaacagcuaccccaagcugagcaagagcuacaucaacgacaagggcaaggaggugcuggugcuguggggcauccaccaccccagcaccagcgccgaccagcagagccuguaccagaacgccgacgccuacguguucgugggcaccagcagauacagcaagaaguucaagcccgagaucgccaucagacccaaggugagagaccaggagggcagaaugaacuacuacuggacccugguggagcccggcgacaagaucaccuucgaggccaccggcaaccugguggugcccagauacgccuucgccauggagagaaacgccggcagcggcaucaucaucagcgacacccccgugcacgacugcaacaccaccugccagacccccaagggcgccaucaacaccagccugcccuuccagaacauccaccccaucaccaucggcaagugccccaaguacgugaagagcaccaagcugagacuggccaccggccugagaaacgugcccagcauccagagcagaggccuguucggcgccaucgccggcuucaucgagggcggcuggaccggcaugguggacggcugguacggcuaccaccaccagaacgagcagggcagcggcuacgccgccgaccugaagagcacccagaacgccaucgacgagaucaccaacaaggugaacagcgugaucgagaagaugaacacccaguucaccgccgugggcaaggaguucaaccaccuggagaagagaaucgagaaccugaacaagaagguggacgacggcuuccuggacaucuggaccuacaacgccgagcugcuggugcugcuggagaacgagagaacccuggacuaccacgacagcaacgugaagaaccuguacgagaaggugagaagccagcugaagaacaacgccaaggagaucggcaacggcugcuucgaguucuaccacaagugcgacaacaccugcauggagagcgugaagaacggcaccuacgacuaccccaaguacagcgaggaggccaagcugaacagagaggagaucgacggcgugaagcuggagagcaccagaaucuaccagauccuggccaucuacagcaccguggccagcagccuggugcugguggugagccugggcgccaucagcuucuggaugugcagcaacggcagccugcagugcagaaucugcaucuga

SEQ ID NO: 165588 - RNA, 1701 nt, Artificial Sequence; identical to SEQ ID NO: 163214
  derived and/or modified CDS sequence (opt4) from hemagglutinin__InfluenzaA__ADM07144

SEQ ID NO: 165589 - RNA, 1701 nt, Artificial Sequence
  derived and/or modified CDS sequence (opt4) from hemagglutinin__InfluenzaA__ADM07154
augaaggccauccugguggugcugcuguacaccuucgccaccgccaacgccgacacccugugcaucggcuaccacgccaacaacagcaccgacaccguggacaccgugcuggagaagaacgugaccgugacccacagcgugaaccugcuggaggacaagcacaacggcaagcugugcaagcugagaggcguggccccccugcaccugggcaagugcaacaucgccggcuggauccugggcaaccccgagugcgagagccugagcaccgccagcagcuggagcuacaucguggagaccagcagcagcgacaacggcaccugcuaccccggcgacuucaucgacuacgaggagcugagagagcagcugagcagcgugagcagcuucgagagauucgagaucuuccccaagaccagcagcuggcccaaccacgacagcaacaagggcgugaccgccgccugcccccacgccggcgccaagagcuucuacaagaaccugaucuggcuggugaagaagggcaacagcuaccccaagcugagcaagagcuacaucaacgacaagggcaaggaggugcuggugcuguggggcauccaccacccccccaccagcgccgaccagcagagccuguaccagaacgccgacgccuacguguucgugggcaccagcagauacagcaagaaguucaagcccgagaucgccaucagacccaaggugagagaccaggagggcagaaugaacuacuacuggacccugguggagcccggcgacaagaucaccuucgaggccaccggcaaccugguggugcccagauacgccuucgccauggugagaaacgccggcagcggcaucaucaucagcgacacccccgugcacgacugcaacaccaccugccagacccccaagggcgccaucaacaccagccugcccuuccagaacauccaccccaucaccaucggcaagugccccaaguacgugaagagcaccaagcugagacuggccaccggccugagaaacgugcccagcauccagagcagaggccuguucggcgccaucgccggcuucaucgagggcggcuggaccggcaugguggacggcugguacggcuaccaccaccagaacgagcagggcagcggcuacgccgccgaccugaagagcacccagaacgccaucgacgagaucaccaacaaggugaacagcgugaucgagaagaugaacacccaguucaccgccgugggcaaggaguucaaccaccuggagaagagaaucgagaaccugaacaagaagguggacgacggcuuccuggacaucuggaccuacaacgccgagcugcuggugcugcuggagaacgagagaacccuggacuaccacgacagcaacgugaagaaccuguacgagaaggugagaagccagcugaagaacaacgccaaggagaucggcaacggcugcuucgaguucuaccacaagugcgacaacaccugcauggagagcgugaagaacggcaccuacgacuaccccaaguacagcgaggaggccaagcugaacagagaggagaucgacggcgugaagcuggagagcaccagaaucuaccagauccuggccaucuacagcaccguggccagcagccuggugcugguggugagccugggcgccaucagcuucuggaugugcagcaacggcagccugcagugcagaaucugcaucuga

SEQ ID NO: 165590 - RNA, 1701 nt, Artificial Sequence; identical to SEQ ID NO: 163214
  derived and/or modified CDS sequence (opt4) from hemagglutinin__InfluenzaA__ADM07163

SEQ ID NO: 165591 - RNA, 1698 nt, Artificial Sequence; identical to SEQ ID NO: 165573
  derived and/or modified CDS sequence (opt4) from hemagglutinin__InfluenzaA__ADM07460

SEQ ID NO: 165592 - RNA, 1701 nt, Artificial Sequence
  derived and/or modified CDS sequence (opt4) from hemagglutinin__InfluenzaA__ADM07504
augaagaccaucaucgcccugagcuacauccugugccugguguucgcccagaagcugcccggcaacgacaacagcaccgccacccugugccugggccaccacgccgugcccaacggcaccaucgugaagaccaucaccaacgaccagaucgaggugaccaacgccaccgagcuggugcagagcagcagcaccggcgagaucugcgacagcccccaccagauccuggacggcgagaacugcacccugaucgacgcccugcugggcgacccccagugcgacggcuuccagaacaagaagugggaccuguucguggagagaagcaaggccuacagcaacugcuaccccuacgacgugcccgacuacgccagccugagaagccugguggccagcagcggcacccuggaguucaacaacgagagcuucaacuggaccggcgugacccagaacggcaccagcagcgccugcaucagaagaagcaacaacagcuucuucagcagacugaacuggcugacccaccugaacuucaaguaccccgcccugaacgugaccaugcccaacaacgagcaguucgacaagcuguacaucuggggcgugcaccaccccggcaccgacaaggaccagaucuuccuguacgcccaggccagcggcagaaucaccgugagcaccaagagaagccagcaggccgugauccccaacaucggcagcagacccagagugagaaacauccccagcagaaucagcaucuacuggaccaucgugaagcccggcgacauccugcugaucaacagcaccggcaaccugaucgcccccagaggcuacuucaagaucagaaacggcaagagcagcaucaugagaagcgacgcccccaucggcaagugcaacagcgagugcaucacccccaacggcagcauccccaacgacaagcccuuccagaacgugaacagaaucaccuacggcgccugccccagauacgugaagcagaacacccugaagcuggccaccggcaugagaaacgugcccgagaagcagaccagaggcaucuucggcgccaucgccggcuucaucgagaacggcugggagggcaugguggacggcugguacggcuucagacaccagaacagcgagggcagaggccaggccgccgaccugaagagcacccaggccgccaucgaccagaucaacggcaagcugaacagacugaucggcaagaccaacgagaaguuccaccagaucgagaaggaguucagcgagguggagggcagaauccaggaccuggagaaguacguggaggacaccaagaucgaccuguggagcuacaacgccgagcugcugguggcccuggagaaccagcacaccaucgaccugaccgacagcgagaugaacaagcuguucgagaagaccaagaagcagcugagagagaacgccgaggacaugggcaacggcugcuucaagaucuaccacaagugcgacaacgccugcaucggcagcaucagaaacggcaccuacgaccacgacguguacagagacgaggcccugaacaacagauuccagaucaagggcguggagcugaagagcggcuacaaggacuggauccuguggaucagcuucgccaucagcugcuuccugcugugcguggcccugcugggcuucaucaugugggccugccagaagggcaacaucagaugcaacaucugcaucuga

SEQ ID NO: 165593 - RNA, 1701 nt, Artificial Sequence
  derived and/or modified CDS sequence (opt4) from hemagglutinin__InfluenzaA__ADM12806
augaagaccaucaucgcccugagcuacauccugugccugguguucgcccagaagcugcccggcaacgacaacagcaccgccacccugugccugggccaccacgccgugcccaacggcaccaucgugaagaccaucaccaacgaccagaucgaggugaccaacgccaccgagcuggugcagagcagcagcaccggcgagaucugcgacagcccccaccagauccuggacggcgagaacugcacccugaucgacgcccugcugggcgacccccagugcgacggcuuccagaacaagaagugggaccuguucguggagagaagcaaggccuacagcaacugcuaccccuacgacgugcccgacuacgccagccugagaagccugguggccagcagcggcacccuggaguucaacaacgagagcuucaacuggaccggcgugacccagaacggcaccagcagcgccugcaucagaagaagcaacaacagcuucuucagcagacugaacuggcugacccaccugaacuucaaguaccccgcccugaacgugaccaugcccaacaacgagcaguucgacaagcuguacaucuggggcgugcaccaccccggcaccgacaaggaccagaucuuccuguacgcccaggccagcggcagaaucaccgugagcaccaagagaagccagcaggccgugauccccaacaucggcagcagacccagagugagaaacauccccagcagaaucagcaucuacuggaccaucgugaagcccggcgacauccugcugaucaacagcaccggcaaccugaucgcccccagaggcuacuucaagaucagaagcggcaagagcagcaucaugagaagcgacgcccccaucggcaagugcaacagcgagugcaucacccccaacggcagcauccccaacgacaagcccuuccagaacgugaacagaaucaccuacggcgccugccccagauacgugaagcagagcacccugaagcuggccaccggcaugagaaacgugcccgagaagcagaccagaggcaucuucggcgccaucgccggcuucaucgagaacggcugggagggcaugguggacggcugguacggcuucagacaccagaacagcgagggcagaggccaggccgccgaccugaagagcacccaggccgccaucgaccagaucaacggcaagcugaacagacugaucggcaagaccaacgagaaguuccaccagaucgagaaggaguucagcgagguggagggcagaauccaggaccuggagaaguacguggaggacaccaagaucgaccuguggagcuacaacgccgagcugcugguggcccuggagaaccagcacaccaucgaccugaccgacagcgagaugaacaagcuguucgagaagaccaagaagcagcugagagagaacgccgaggacaugggcaacggcugcuucaccaucuaccacaagugcgacaacgccugcaucggcagcaucagaaacggcaccuacgaccacaacguguacagagacgaggcccugaacaacagauuccagaucaagggcguggagcugaagagcggcuacaaggacuggauccuguggaucagcuucgccaucagcugcuuccugcugugcguggcccugcugggcuucaucaugugggccugccagaagggcaacaucagaugcaacaucugcaucuga

SEQ ID NO: 165594 - RNA, 1701 nt, Artificial Sequence; identical to SEQ ID NO: 165593
  derived and/or modified CDS sequence (opt4) from hemagglutinin__InfluenzaA__ADM12817

SEQ ID NO: 165595 - RNA, 1701 nt, Artificial Sequence; identical to SEQ ID NO: 165593
  derived and/or modified CDS sequence (opt4) from hemagglutinin__InfluenzaA__ADM12828

SEQ ID NO: 165596 - RNA, 1701 nt, Artificial Sequence; identical to SEQ ID NO: 165593
  derived and/or modified CDS sequence (opt4) from hemagglutinin__InfluenzaA__ADM12839

SEQ ID NO: 165597 - RNA, 1701 nt, Artificial Sequence
  derived and/or modified CDS sequence (opt4) from hemagglutinin__InfluenzaA__ADM12850
augaaggccaucaucgcccugagcuacauccugugccugguguucgcccagaagcugcccggcaacgacaacagcaccgccacccugugccugggccaccacgccgugcccaacggcaccaucgugaagaccaucaccaacgaccagaucgaggugaccaacgccaccgagcuggugcagagcagcagcaccggcgagaucugcgacagcccccaccagauccuggacggcgagaacugcacccugaucgacgcccugcugggcgacccccagugcgacggcuuccagaacaagaagugggaccuguucguggagagaagcaaggccuacagcaacugcuaccccuacgacgugcccgacuacgccagccugagaagccugguggccagcagcggcacccuggaguucaacaacgagagcuucaacuggaccggcgugacccagaacggcaccagcagcgccugcaucagaagaagcaacaacagcuucuucagcagacugaacuggcugacccaccugaacuucaaguaccccgcccugaacgugaccaugcccaacaacgagcaguucgacaagcuguacaucuggggcgugcaccaccccggcaccgacaaggaccagaucuuccuguacgcccaggccagcggcagaaucaccgugagcaccaagagaagccagcaggccgugauccccaacaucggcagcagacccagagugagaaacauccccagcagaaucagcaucuacuggaccaucgugaagcccggcgacauccugcugaucaacagcaccggcaaccugaucgcccccagaggcuacuucaagaucagaagcggcaagagcagcaucaugagaagcgacgcccccaucggcaagugcaacagcgagugcaucacccccaacggcagcauccccaacgacaagcccuuccagaacgugaacagaaucaccuacggcgccugccccagauacgugaagcagagcacccugaagcuggccaccggcaugagaaacgugcccgagaagcagaccagaggcaucuucggcgccaucgccggcuucaucgagaacggcugggagggcaugguggacggcugguacggcuucagacaccagaacagcgagggcagaggccaggccgccgaccugaagagcacccaggccgccaucgaccagaucaacggcaagcugaacagacugaucggcaagaccaacgagaaguuccaccagaucgagaaggaguucagcgagguggagggcagaauccaggaccuggagaaguacguggaggacaccaagaucgaccuguggagcuacaacgccgagcugcugguggcccuggagaaccagcacaccaucgaccugaccgacagcgagaugaacaagcuguucgagaagaccaagaagcagcugagagagaacgccgaggacaugggcaacggcugcuucaccaucuaccacaagugcgacaacgccugcaucggcagcaucagaaacggcaccuacgaccacaacguguacagagacgaggcccugaacaacagauuccagaucaagggcguggagcugaagagcggcuacaaggacuggauccuguggaucagcuucgccaucagcugcuuccugcugugcguggcccugcugggcuucaucaugugggccugccagaagggcaacaucagaugcaacaucugcaucuga

SEQ ID NO: 165598 - RNA, 1701 nt, Artificial Sequence; identical to SEQ ID NO: 162729
  derived and/or modified CDS sequence (opt4) from hemagglutinin__InfluenzaA__ADM12861

SEQ ID NO: 165599 - RNA, 1701 nt, Artificial Sequence; identical to SEQ ID NO: 162729
  derived and/or modified CDS sequence (opt4) from hemagglutinin__InfluenzaA__ADM12871

SEQ ID NO: 165600 - RNA, 1701 nt, Artificial Sequence; identical to SEQ ID NO: 162729
  derived and/or modified CDS sequence (opt4) from hemagglutinin__InfluenzaA__ADM12881

SEQ ID NO: 165601 - RNA, 1701 nt, Artificial Sequence; identical to SEQ ID NO: 162729
  derived and/or modified CDS sequence (opt4) from hemagglutinin__InfluenzaA__ADM12891

SEQ ID NO: 165602 - RNA, 1701 nt, Artificial Sequence; identical to SEQ ID NO: 162729
  derived and/or modified CDS sequence (opt4) from hemagglutinin__InfluenzaA__ADM12901

SEQ ID NO: 165603 - RNA, 1701 nt, Artificial Sequence; identical to SEQ ID NO: 163831
  derived and/or modified CDS sequence (opt4) from hemagglutinin__InfluenzaA__ADM12911

SEQ ID NO: 165604 - RNA, 1701 nt, Artificial Sequence; identical to SEQ ID NO: 162729
  derived and/or modified CDS sequence (opt4) from hemagglutinin__InfluenzaA__ADM12921

SEQ ID NO: 165605 - RNA, 1701 nt, Artificial Sequence; identical to SEQ ID NO: 162729
  derived and/or modified CDS sequence (opt4) from hemagglutinin__InfluenzaA__ADM12931

SEQ ID NO: 165606 - RNA, 1701 nt, Artificial Sequence; identical to SEQ ID NO: 162729
  derived and/or modified CDS sequence (opt4) from hemagglutinin__InfluenzaA__ADM12941

SEQ ID NO: 165607 - RNA, 1701 nt, Artificial Sequence; identical to SEQ ID NO: 162729
  derived and/or modified CDS sequence (opt4) from hemagglutinin__InfluenzaA__ADM12951

SEQ ID NO: 165608 - RNA, 1701 nt, Artificial Sequence
  derived and/or modified CDS sequence (opt4) from hemagglutinin__InfluenzaA__ADM12961
augaaggccgugcugguggugcugcuguacaccuucgccaccgccaacgccgacacccugugcaucggcuaccacgccaacaacagcaccgacaccguggacaccgugcuggagaagaacgugaccgugacccacagcgugaacauccuggaggacaagcacaacggcaagcugugcaagcugggcggcguggccccccugcaccugggcaagugcaacaucgccggcuggauccugggcaaccccgagugcgagagccugagcaccgccagcagcuggagcuacaucguggagaccagcagcagcgacaacggcaccugcuaccccggcgacuucaucgacuacgaggagcugagagagcagcugagcagcgugagcagcuucgagagauucgagaucuuccccaagaccagcagcuggcccaaccacgacagcaacaagggcgugaccgccgccugcccccacgccggcgccaagagcuucuacaagaaccugaucuggcuggugaagaagggcaacagcuaccccaagcugagcaagagcuacaucaacgacaagggcaaggaggugcuggugcuguggggcauccaccaccccagcaccagcgccgaccagcagagccuguaccagaacgccgacgccuacguguucgugggcaccagcagauacagcaagaaguucaagcccgagaucgccaucagacccaaggugagagaccaggagggcagaaugaacuacuacuggacccugguggagcccggcgacaagaucaccuucgaggccaccggcaaccugguggugcccagauacgccuucgccauggagagaaacgccggcagcggcaucaucaucagcgacacccccgugcacgacugcaacaccaccugccagacccccaagggcgccaucaacaccagccugcccuuccagaacauccaccccaucaccaucggcaagugccccaaguacgugaagagcaccaagcugagacuggccaccggccugagaaacgugcccagcauccagagcagaggccuguucggcgccaucgccggcuucaucgagggcggcuggaccggcaugguggacggcugguacggcuaccaccaccagaacgagcagggcagcggcuacgccgccgaccugaagagcacccagaacgccaucgacgagaucaccaacaaggugaacagcgugaucgagaagaugaacacccaguucaccgccgugggcaaggaguucaaccaccuggagaagagaaucgagaaccugaacaagaagguggacgacggcuuccuggacaucuggaccuacaacgccgagcugcuggugcugcuggagaacgagagaacccuggacuaccacgacagcaacgugaagaaccuguacgagaaggugagaagccagcugaagaacaacgccaaggagaucggcaacggcugcuucgaguucuaccacaagugcgacaacaccugcauggagagcgugaagaacggcaccuacgacuaccccaaguacagcgaggaggccaagcugaacagagaggagaucgacggcgugaagcuggagagcaccagaaucuaccagauccuggccaucuacagcaccguggccagcagccuggugcugguggugagccugggcgccaucagcuucuggaugugcagcaacggcagccugcagugcagaaucugcaucuga

SEQ ID NO: 165609 - RNA, 1701 nt, Artificial Sequence; identical to SEQ ID NO: 164378
  derived and/or modified CDS sequence (opt4) from hemagglutinin__InfluenzaA__ADM12971

SEQ ID NO: 165610 - RNA, 1701 nt, Artificial Sequence; identical to SEQ ID NO: 163830
  derived and/or modified CDS sequence (opt4) from hemagglutinin__InfluenzaA__ADM12981

SEQ ID NO: 165611 - RNA, 1701 nt, Artificial Sequence
  derived and/or modified CDS sequence (opt4) from hemagglutinin__InfluenzaA__ADM12991
augaaggccauccugguggugcugcuguacaccuucgagaccgccaacgccgacacccugugcaucggcuaccacgccaacaacagcaccgacaccguggacaccgugcuggagaagaacgugaccgugacccacagcgugaaccugcuggaggacaagcacaacggcaagcugugcaagcugagaggcguggccccccugcaccugggcaagugcaacaucgccggcuggauccugggcaaccccgagugcgagagccugagcaccgccagcagcuggagcuacaucguggagaccagcagcagcgacaacggcaccugcuaccccggcgacuucaucgacuacgaggagcugagagagcagcugagcagcgugagcagcuucgagagauucgagaucuuccccaagaccagcagcuggcccaaccacgacagcaacaagggcgugaccgccgccugcccccacgccggcgccaagagcuucuacaagaaccugaucuggcuggugaagaagggcaacagcuaccccaagcugagcaagagcuacaucaacgacaagggcaaggaggugcuggugcuguggggcauccaccaccccagcaccagcgccgaccagcagagccuguaccagaacgccgacgccuacguguucgugggcaccagcagauacagcaagaaguucaagcccgagaucgccaucagacccaaggugagagaccaggagggcagaaugaacuacuacuggacccugguggagcccggcgacaagaucaccuucgaggccaccggcaaccugguggugcccagauacgccuucgccauggagagaaacgccggcagcggcaucaucaucagcgacacccccgugcacgacugcaacaccaccugccagacccccaagggcgccaucaacaccagccugcccuuccagaacauccaccccaucaccaucggcaagugccccaaguacgugaagagcaccaagcugagacuggccaccggccugagaaacgugcccagcauccagagcagaggccuguucggcgccaucgccggcuucaucgagggcggcuggaccggcaugguggacggcugguacggcuaccaccaccagaacgagcagggcagcggcuacgccgccgaccugaagagcacccagcacgccaucgacgagaucaccaacaaggugaacagcgugaucgagaagaugaacacccaguucaccgccgugggcaaggaguucaaccaccuggagaagagaaucgagaaccugaacaagaagguggacgacggcuuccuggacaucuggaccuacaacgccgagcugcuggugcugcuggagaacgagagaacccuggacuaccacgacagcaacgugaagaaccuguacgagaaggugagaagccagcugaagaacaacgccaaggagaucggcaacggcugcuucgaguucuaccacaagugcgacaacaccugcauggagagcgugaagaacggcaccuacgacuaccccaaguacagcgaggaggccaagcugaacagagaggagaucgacggcgugaagcuggagagcaccagaaucuaccagauccuggccaucuacagcaccguggccagcagccuggugcugguggugagccugggcgccaucagcuucuggaugugcagcaacggcagccugcagugcagaaucugcaucuga

SEQ ID NO: 165612 - RNA, 1701 nt, Artificial Sequence
  derived and/or modified CDS sequence (opt4) from hemagglutinin__InfluenzaA__ADM13001
augaaggccauccugguggugcugcuguacaccuucgccaccgccaacgccgacacccugugcaucggcuaccacgccaacaacagcaccgacaccguggacaccgugcuggagaagaacgugaccgugacccacagcgugaaccugcuggaggacaagcacaacggcaagcugugcaagcugagaggcguggccccccugcaccugggcaagugcaacaucgccggcuggauccugggcaaccccgagugcgagagccugagcaccgccagcagcuggagcuacaucguggagaccagcagcagcgacaacggcaccugcuaccccggcgacuucaucgacuacgaggagcugagagagcagcugagcagcgugagcagcuucgagagauucgagaucuuccccaagaccagcagcuggcccaaccacgacagcaacaagggcgugaccgccgccugcccccacgccggcgccaagagcuucuacaagaaccugaucuggcuggugaagaagggcaacagcuaccccaagcugagcaagagcuacaucaacgacaagggcaaggaggugcuggugcuguggggcauccaccaccccagcaccagcgccgaccagcagagccuguaccagaacgccgacgccuacguguucgugggcaccagcagauacagcaagaaguucaagcccgagaucgccaucagacccaaggugagagaccaggagggcagaaugaacuacuacuggacccugguggagcccggcgacaagaucaccuucgaggccaccggcaaccugguggugcccagauacgccuucgccauggagagaaacgccggcagcggcaucaucaucagcgacacccccgugcacgacugcaacaccaccugccagacccccaagggcgccaucaacaccagccugcccuuccagaacauccaccccaucaccaucggcaagugccccaaguacgugaagagcaccaagcugagacuggccaccggccugagaaacauccccagcauccagagcagaggccuguucggcgccaucgccggcuucaucgagggcggcuggaccggcaugguggacggcugguacggcuaccaccaccagaacgagcagggcagcggcuacgccgccgaccugaagagcacccagcacgccaucgacgagaucaccaacaaggugaacagcgugaucgagaagaugaacacccaguucaccgccgugggcaaggaguucaaccaccuggagaagagaaucgagaaccugaacaagaagguggacgacggcuuccuggacaucuggaccuacaacgccgagcugcuggugcugcuggagaacgagagaacccuggacuaccacgacagcaacgugaagaaccuguacgagaaggugagaagccagcugaagaacaacgccaaggagaucggcaacggcugcuucgaguucuaccacaagugcgacaacaccugcauggagagcgugaagaacggcaccuacgacuaccccaaguacagcgaggaggccaagcugaacagagaggagaucgacggcgugaagcuggagagcaccagaaucuaccagauccuggccaucuacagcaccguggccagcagccuggugcugguggugagccugggcgccaucagcuucuggaugugcagcaacggcagccugcagugcagaaucugcaucuga

SEQ ID NO: 165613 - RNA, 1701 nt, Artificial Sequence; identical to SEQ ID NO: 163893
  derived and/or modified CDS sequence (opt4) from hemagglutinin__InfluenzaA__ADM13011

SEQ ID NO: 165614 - RNA, 1701 nt, Artificial Sequence
  derived and/or modified CDS sequence (opt4) from hemagglutinin__InfluenzaA__ADM13021
augaaggccauccugguggugcugcuguacaccuucgccaccgccaacgccgacacccugugcaucggcuaccacgccaacaacagcaccgacaccaucgacaccgugcuggagaagaacgugaccgugacccacagcgugaaccugcuggaggacaagcacaacggcaagcugugcaagcugagaggcguggccccccugcaccugggcaagugcaacaucgccggcuggauccugggcaaccccgagugcgagagccugagcaccgccagcagcuggagcuacaucguggagaccagcagcagcgacaacggcaccugcuaccccggcgacuucaucgacuacgaggagcugagagagcagcugagcagcgugagcagcuucgagagauucgagaucuuccccaagaccagcagcuggcccaaccacgacagcaacaagggcgugaccgccgccugcccccacgccggcgccaagagcuucuacaagaaccugaucuggcuggugaagaagggcaacagcuaccccaagcugagcaagagcuacaucaacgacaagggcaaggaggugcuggugcuguggggcauccaccaccccagcaccagcgccgaccagcagagccuguaccagaacgccgacgccuacguguucgugggcaccagcagauacagcaagaaguucaagcccgagaucgccaucagacccaaggugagagaccaggagggcagaaugaacuacuacuggacccugguggagcccggcgacaagaucaccuucgaggccaccggcaaccugguggugcccagauacgccuucgccauggagagaaacgccggcagcggcaucaucaucagcgacacccccgugcacgacugcaacaccaccugccagacccccaagggcgccaucaacaccagccugcccuuccagaacauccaccccaucaccaucggcaagugccccaaguacgugaagagcaccaagcugagacuggccaccggccugagaaacgugcccagcauccagagcagaggccuguucggcgccaucgccggcuucaucgagggcggcuggaccggcaugguggacggcugguacggcuaccaccaccagaacgagcagggcagcggcuacgccgccgaccugaagagcacccagaacgccaucgacaagaucaccaacaaggugaacagcgugaucgagaagaugaacacccaguucaccgccgugggcaaggaguucaaccaccuggagaagagaaucgagaaccugaacaagaagguggacgacggcuuccuggacaucuggaccuacaacgccgagcugcuggugcugcuggagaacgagagaacccuggacuaccacgacagcaacgugaagaaccuguacgagaaggugagaagccagcugaagaacaacgccaaggagaucggcaacggcugcuucgaguucuaccacaagugcgacaacaccugcauggagagcgugaagaacggcaccuacgacuaccccaaguacagcgaggaggccaagcugaacagagaggagaucgacggcgugaagcuggagagcaccagaaucuaccagauccuggccaucuacagcaccguggccagcagccuggugcugguggugagccugggcgccaucagcuucuggaugugcagcaacggcagccugcagugcagaaucugcaucuga

SEQ ID NO: 165615 - RNA, 1701 nt, Artificial Sequence; identical to SEQ ID NO: 164075
  derived and/or modified CDS sequence (opt4) from hemagglutinin__InfluenzaA__ADM13031

SEQ ID NO: 165616 - RNA, 1701 nt, Artificial Sequence
  derived and/or modified CDS sequence (opt4) from hemagglutinin__InfluenzaA__ADM13041
augaaggccauccugguggugcugcuguacaccuucgccaccgccaacgccgacacccugugcaucggcuaccacgccaacaacagcaccgacaccguggacaccgugcuggagaagaacgugaccgugacccacagcgugaaccugcuggaggacaagcacaacggcaagcugugcaagcugagaggcguggccccccugcaccugggcaagugcaacaucgccggcuggauccugggcaaccccgagugcgagagccugagcaccgccagcagcuggagcuacaucguggagaccagcagcagcgacaacggcaccugcuaccccggcgacuucaucgacuacgaggagcugagagagcagcugagcagcgugagcagcuucgagagauucgagaucuuccccaagaccagcagcuggcccaaccacgacagcaacaagggcgugaccgccgccugcccccacgccggcgccaagagcuucuacaagaaccugaucuggcuggugaagaagggcaacagcuaccccaagcugagcaagagcuacaucaacgacaagggcaaggaggugcuggugcuguggggcauccaccaccccagcaccagcgccgaccagcagagccuguaccagaacgccgacgccuacguguucgugggcaccagcagauacagcaagaaguucaagcccgagaucgccaucagacccaaggugagagagcaggagggcagaaugaacuacuacuggacccugguggagcccggcgacaagaucaccuucgaggccaccggcaaccugguggugcccagauacgccuucgccauggagagaaacgccggcagcggcaucaucaucagcgacacccccgugcacgacugcaacaccaccugccagacccccaagggcgccaucaacaccagccugcccuuccagaacgugcaccccaucaccaucggcaagugccccaaguacgugaagagcaccaagcugagacuggccaccggccugagaaacgugcccagcauccagagcagaggccuguucggcgccaucgccggcuucaucgagggcggcuggaccggcaugguggacggcugguacggcuaccaccaccagaacgagcagggcagcggcuacgccgccgaccugaagagcacccagaacgccaucgacgagaucaccaacaaggugaacagcgugaucgagaagaugaacacccaguucaccgccgugggcaaggaguucaaccaccuggagaagagaaucgagaaccugaacaagaagguggacgacggcuuccuggacaucuggaccuacaacgccgagcugcuggugcugcuggagaacgagagaacccuggacuaccacgacagcaacgugaagaaccuguacgagaaggugagaagccagcugaagaacaacgccaaggagaucggcaacggcugcuucgaguucuaccacaagugcgacaacaccugcauggagagcgugaagaacggcaccuacgacuaccccaaguacagcgaggaggccaagcugaacagagaggagaucgacggcgugaagcuggagagcaccagaaucuaccagauccuggccaucuacagcaccguggccagcagccuggugcugguggugagccugggcgccaucagcuucuggaugugcagcaacggcagccugcagugcagaaucugcaucuga

SEQ ID NO: 165617 - RNA, 1701 nt, Artificial Sequence
  derived and/or modified CDS sequence (opt4) from hemagglutinin__InfluenzaA__ADM13051
augaaggccauccugguggugcugcuguacaccuucgccaccaccaacgccgacacccugugcaucggcuaccacgccaacaacagcaccgacaccguggacaccgugcuggagaagaacgugaccgugacccacagcgugaaccugcuggaggacaagcacaacggcaagcugugcaagcugagaggcguggccccccugcaccugggcaagugcaacaucgccggcuggauccugggcaaccccgagugcgagagccugagcaccgccagcagcuggagcuacaucguggagaccagcagcagcgacaacggcaccugcuaccccggcgacuucaucgacuacgaggagcugagagagcagcugagcagcgugagcagcuucgagagauucgagaucuuccccaagaccagcagcuggcccaaccacgacagcaacaagggcgugaccgccgccugcccccacgccggcgccaagagcuucuacaagaaccugaucuggcuggugaagaagggcaacagcuaccccaagcugagcaagagcuacaucaacgacaagggcaaggaggugcuggugcuguggggcauccaccaccccagcaccagcgccgaccagcagagccuguaccagaacgccgacgccuacguguucgugggcaccagcagauacagcaagaaguucaagcccgagaucgccaucagacccaaggugagagaccaggagggcagaaugaacuacuacuggacccugguggagcccggcgacaagaucaccuucgaggccaccggcaaccugguggugcccagauacgccuucgccauggagagaaacgccggcagcggcaucaucaucagcgacacccccgugcacgacugcaacaccaccugccagacccccaagggcgccaucaacaccagccugcccuuccagaacauccaccccaucaccaucggcaagugccccaaguacgugaagagcaccaagcugagacuggccaccggccugagaaacgugcccagcauccagagcagaggccuguucggcgccaucgccggcuucaucgagggcggcuggaccggcaugguggacggcugguacggcuaccaccaccagaacgagcagggcagcggcuacgccgccgaccugaagagcacccagaacgccaucgacaagaucaccaacaaggugaacagcgugaucgagaagaugaacacccaguucaccgccgugggcaaggaguucaaccaccuggagaagagaaucgagaaccugaacaagaagguggacgacggcuuccuggacaucuggaccuacaacgccgagcugcuggugcugcuggagaacgagagaacccuggacuaccacgacagcaacgugaagaaccuguacgagaaggugagaagccagcugaagaacaacgccaaggagaucggcaacggcugcuucgaguucuaccacaagugcgacaacaccugcauggagagcgugaagaacggcaccuacgacuaccccaaguacagcgaggaggccaagcugaacagagaggagaucgacggcgugaagcuggagagcaccagaaucuaccagauccuggccaucuacagcaccguggccagcagccuggugcugguggugagccugggcgccaucagcuucuggaugugcagcaacggcagccugcagugcagaaucugcaucuga

SEQ ID NO: 165618 - RNA, 1701 nt, Artificial Sequence
  derived and/or modified CDS sequence (opt4) from hemagglutinin__InfluenzaA__ADM13061
augaaggccauccugguggugcugcuguacaccuucgccaccgccaacgccgacacccugugcaucggcuaccacgccaacaacagcaccgacaccguggacaccgugcuggagaagaacgugaccgugacccacagcgugaaccugcuggaggacaagcacaacggcaagcugugcaagcugagaggcaucgccccccugcaccugggcaagugcaacaucgccggcuggauccugggcaaccccgagugcgagagccugagcaccgccagcagcuggagcuacaucguggagaccagcagcagcgacaacggcaccugcuaccccggcgacuucaucgacuacgaggagcugagagagcagcugagcagcgugagcagcuucgagagauucgagaucuuccccaagaccagcagcuggcccaaccacgacagcaacaagggcgugaccgccgccugcccccacgccggcgccaagagcuucuacaagaaccugaucuggcuggugaagaagggcaacagcuaccccaagcugagcaagagcuacaucaacgacaagggcaaggaggugcuggugcuguggggcauccaccaccccagcaccagcgccgaccagcagagccuguaccagaacgccgacgccuacguguucgugggcaccagcagauacagcaagaaguucaagcccgagaucgccaucagacccaaggugagagaccaggagggcagaaugaacuacuacuggacccugguggagcccggcgacaagaucaccuucgaggccaccggcaaccugguggugcccagauacgccuucgccauggagagaaacgccggcagcggcaucaucaucagcgacacccccgugcacgacugcaacaccagcugccagacccccaagggcgccaucaacaccagccugcccuuccagaacauccaccccaucaccaucggcaagugccccaaguacgugaagagcaccaagcugagacuggccaccggccugagaaacgugcccagcauccagagcagaggccuguucggcgccaucgccggcuucaucgagggcggcuggaccggcaugguggacggcugguacggcuaccaccaccagaacgagcagggcagcggcuacgccgccgaccugaagagcacccagaacgccaucgacgagaucaccaacaaggugaacagcgugaucgagaagaugaacacccaguucaccgccgugggcaaggaguucaaccaccuggagaagagaaucgagaaccugaacaagaagguggacgacggcuuccuggacaucuggaccuacaacgccgagcugcuggugcugcuggagaacgagagaacccuggacuaccacgacagcaacgugaagaaccuguacgagaaggugagaagccagcugaagaacaacgccaaggagaucggcaacggcugcuucgaguucuaccacaagugcgacaacaccugcauggagagcgugaagaacggcaccuacgacuaccccaaguacagcgaggaggccaagcugaacagagaggagaucgacggcgugaagcuggagagcaccagaaucuaccagauccuggccaucuacagcaccguggccagcagccuggugcugguggugagccugggcgccaucagcuucuggaugugcagcaacggcagccugcagugcagaaucugcaucuga

SEQ ID NO: 165619 - RNA, 1701 nt, Artificial Sequence; identical to SEQ ID NO: 164896
  derived and/or modified CDS sequence (opt4) from hemagglutinin__InfluenzaA__ADM13071

SEQ ID NO: 165620 - RNA, 1701 nt, Artificial Sequence
  derived and/or modified CDS sequence (opt4) from hemagglutinin__InfluenzaA__ADM13081
augaaggccauccugguggugcugcuguacaccuucgccaccgccaacgccgacacccugugcaucggcuaccacgccaacaacagcaccgacaccguggacaccgugcuggagaagaacgugaccgugacccacagcgugaaccugcuggaggacaagcacaacggcaagcugugcaagcugagaggcaucgccccccugcaccugggcaagugcaacaucgccggcuggauccugggcaaccccgagugcgagagccugagcaccgccagcagcuggagcuacaucguggagaccagcggcagcgacaacggcaccugcuaccccggcgacuucaucgacuacgaggagcugagagagcagcugagcagcgugagcagcuucgagagauucgagaucuuccccaagaccagcagcuggcccaaccacgacagcaacaagggcgugaccgccgccugcccccacgccggcgccaagagcuucuacaagaaccugaucuggcuggugaagaagggcaacagcuaccccaagcugagcaagagcuacaucaacgacaaggagaaggaggugcuggugcuguggggcauccaccaccccagcaccagcgccgaccagcagagccuguaccagaacgccgacgccuacguguucgugggcaccagcagauacagcaagaaguucaagcccgagaucgccaucagacccaaggugagagaccaggagggcagaaugaacuacuacuggacccugguggagcccggcgacaagaucaccuucgaggccaccggcaaccugguggugcccagauacgccuucgccauggagagaaacgccggcagcggcaucaucaucagcgacacccccgugcacgacugcaacaccaccugccagacccccaagggcgccaucaacaccagccugcccuuccagaacauccaccccaucaccaucggcaagugccccaaguacgugaagagcaccaagcugagacuggccaccggccugagaaacgugcccagcauccagagcagaggccuguucggcgccaucgccggcuucaucgagggcggcuggaccggcaugguggacggcugguacggcuaccaccaccagaacgagcagggcagcggcuacgccgccgaccugaagagcacccagaacgccaucgacgagaucaccaacaaggugaacagcgugaucgagaagaugaacacccaguucaccgccgugggcaaggaguucaaccaccuggagaagagaaucgagaaccugaacaagaagguggacgacggcuuccuggacaucuggaccuacaacgccgagcugcuggugcugcuggagaacgagagaacccuggacuaccacgacagcaacgugaagaaccuguacgagaaggugagaagccagcugaagaacaacgccaaggagaucggcaacggcugcuucgaguucuaccacaagugcgacaacaccugcauggagagcgugaagaacggcaccuacgacuaccccaaguacagcgaggaggccaagcugaacagagaggagaucgacggcgugaagcuggagagcaccagaaucuaccagauccuggccaucuacagcaccguggccagcagccuggugcugguggugagccugggcgccaucagcuucuggaugugcagcaacggcagccugcagugcagaaucugcaucuga

SEQ ID NO: 165621 - RNA, 1701 nt, Artificial Sequence; identical to SEQ ID NO: 164149
  derived and/or modified CDS sequence (opt4) from hemagglutinin__InfluenzaA__ADM13091

SEQ ID NO: 165622 - RNA, 1701 nt, Artificial Sequence; identical to SEQ ID NO: 163893
  derived and/or modified CDS sequence (opt4) from hemagglutinin__InfluenzaA__ADM13101

SEQ ID NO: 165623 - RNA, 1701 nt, Artificial Sequence
  derived and/or modified CDS sequence (opt4) from hemagglutinin__InfluenzaA__ADM13111
augaaggccauccugguggugcugcuguacaccuucgagaccgccaacgccgacacccugugcaucggcuaccacgccaacaacagcaccgacaccguggacaccgugcuggagaagaacgugaccgugacccacagcgugaaccugcuggaggacaagcacaacggcaagcugugcaagcugagaggcguggccccccugcaccugggcaagugcaacaucgccggcuggauccugggcaaccccgagugcgagagccugagcaccgccagcagcuggagcuacaucguggagaccagcagcagcgacaacggcaccugcuaccccggcgacuucaucaacuacgaggagcugagagagcagcugagcagcgugagcagcuucgagagauucgagaucuuccccaagaccagcagcuggcccaaccacgacagcaacaagggcgugaccgccgccugcccccacgccggcgccaagagcuucuacaagaaccugaucuggcuggugaagaagggcaacagcuaccccaagcugagcaagagcuacaucaacgacaagggcaaggaggugcuggugcuguggggcauccaccaccccagcaccagcgccgaccagcagagccuguaccagaacgccgacgccuacguguucgugggcaccagcagauacagcaagaaguucaagcccgagaucgccaucagacccaaggugagagaccaggagggcagaaugaacuacuacuggacccugguggaccccggcgacaagaucaccuucgaggccaccggcaaccugguggugcccagauacgccuucgccauggagagaaacgccggcagcggcaucaucaucagcgacacccccgugcacgacugcaacaccaccugccagacccccaacggcgccaucaacaccagccugcccuuccagaacauccaccccaucaccaucggcaagugccccaaguacgugaagagcaccaagcugagacuggccaccggccugagaaacgugcccagcauccagagcagaggccuguucggcgccaucgccggcuucaucgagggcggcuggaccggcaugguggacggcugguacggcuaccaccaccagaacgagcagggcagcggcuacgccgccgaccugaagagcacccagaacgccaucgacaagaucaccaacaaggugaacagcgugaucgagaagaugaacacccaguucaccgccgugggcaaggaguucaaccaccuggagaagagaaucgagaaccugaacaagaagguggacgacggcuuccuggacaucuggaccuacaacgccgagcugcuggugcugcuggagaacgagagaacccuggacuaccacgacagcaacgugaagaaccuguacgagaaggugagaagccagcugaagaacaacgccaaggagaucggcaacggcugcuucgaguucuaccacaagugcgacaacaccugcauggagagcgugaagaacggcaccuacgacuaccccaaguacagcgaggaggccaagcugaacagagaggagaucgacggcgugaagcuggagagcaccagaaucuaccagauccuggccaucuacagcaccguggccagcagccuggugcugguggugagccugggcgccaucagcuucuggaugugcagcaacggcagccugcagugcagaaucugcaucuga

SEQ ID NO: 165624 - RNA, 1701 nt, Artificial Sequence; identical to SEQ ID NO: 162729
  derived and/or modified CDS sequence (opt4) from hemagglutinin__InfluenzaA__ADM13121

SEQ ID NO: 165625 - RNA, 1701 nt, Artificial Sequence; identical to SEQ ID NO: 163893
  derived and/or modified CDS sequence (opt4) from hemagglutinin__InfluenzaA__ADM13131

SEQ ID NO: 165626 - RNA, 1701 nt, Artificial Sequence; identical to SEQ ID NO: 164057
  derived and/or modified CDS sequence (opt4) from hemagglutinin__InfluenzaA__ADM13141

SEQ ID NO: 165627 - RNA, 1701 nt, Artificial Sequence; identical to SEQ ID NO: 164057
  derived and/or modified CDS sequence (opt4) from hemagglutinin__InfluenzaA__ADM13151

SEQ ID NO: 165628 - RNA, 1701 nt, Artificial Sequence; identical to SEQ ID NO: 163830
  derived and/or modified CDS sequence (opt4) from hemagglutinin__InfluenzaA__ADM13161

SEQ ID NO: 165629 - RNA, 1701 nt, Artificial Sequence; identical to SEQ ID NO: 164378
  derived and/or modified CDS sequence (opt4) from hemagglutinin__InfluenzaA__ADM13171

SEQ ID NO: 165630 - RNA, 1701 nt, Artificial Sequence; identical to SEQ ID NO: 164378
  derived and/or modified CDS sequence (opt4) from hemagglutinin__InfluenzaA__ADM13181

SEQ ID NO: 165631 - RNA, 1701 nt, Artificial Sequence
  derived and/or modified CDS sequence (opt4) from hemagglutinin__InfluenzaA__ADM13191
augaaggccauccugguggugcugcuguacacccuggccaccgccaacgccgacacccugugcaucggcuaccacgccaacaacagcaccgacaccguggacaccgugcuggagaagaacgugaccgugacccacagcgugaaccugcuggaggacaagcacaacggcaagcugugcaagcugagaggcguggccccccugcaccugggcaagugcaacaucgccggcuggauccugggcaaccccgagugcgagagccugagcaccgccagcagcuggagcuacaucguggagaccagcagcagcgacaacggcaccugcuaccccggcgacuucaucgacuacgaggagcugagagagcagcugagcagcgugagcagcuucgagagauucgagaucuuccccaagaccagcagcuggcccaaccacgacagcaacaagggcgugaccgccgccugcccccacgccggcgccaagagcuucuacaagaaccugaucuggcuggugaagaagggcaacagcuaccccaagcugagcaagagcuacaucaacgacaagggcaaggaggugcuggugcuguggggcauccaccaccccagcaccagcgccgaccagcagagccuguaccagaacgccgacgccuacguguucgugggcaccagcagauacagcaagaaguucaagcccgagaucgccaucagacccaaggugagagaccaggagggcagaaugaacuacuacuggacccugguggagcccggcgacaagaucaccuucgaggccaccggcaaccugguggugcccagauacgccuucgccauggagagaaacgccggcagcggcaucaucaucagcgacacccccgugcacgacugcaacaccaccugccagacccccaagggcgccaucaacaccagccugcccuuccagaacauccaccccaucaccaucggcaagugccccaaguacgugaagagcaccaagcugagacuggccaccggccugagaaacgugcccagcauccagagcagaggccuguucggcgccaucgccggcuucaucgagggcggcuggaccggcaugguggacggcugguacggcuaccaccaccagaacgagcagggcagcggcuacgccgccgaccugaagagcacccagcacgccaucgacgagaucaccaacaaggugaacagcgugaucgagaagaugaacacccaguucaccgccgugggcaaggaguucaaccaccuggagaagagaaucgagaaccugaacaagaagguggacgacggcuuccuggacaucuggaccuacaacgccgagcugcuggugcugcuggagaacgagagaacccuggacuaccacgacagcaacgugaagaaccuguacgagaaggugagaagccagcugaagaacaacgccaaggagaucggcaacggcugcuucgaguucuaccacaagugcgacaacaccugcauggagagcgugaagaacggcaccuacgacuaccccaaguacagcgaggaggccaagcugaacagagaggagaucgacggcgugaagcuggagagcaccagaaucuaccagauccuggccaucuacagcaccguggccagcagccuggugcugguggugagccugggcgccaucagcuucuggaugugcagcaacggcagccugcagugcagaaucugcaucuga

SEQ ID NO: 165632 - RNA, 1701 nt, Artificial Sequence
  derived and/or modified CDS sequence (opt4) from hemagglutinin__InfluenzaA__ADM13211
augaaggccauccugguggugcugcuguacacccuggccaccgccaacgccgacacccugugcaucggcuaccacgccaacaacagcaccgacaccguggacaccgugcuggagaagaacgugaccgugacccacagcgugaaccugcuggaggacaagcacaacggcaagcugugcaagcugagaggcaucgccccccugcaccugggcaagugcaacaucgccggcuggauccugggcaaccccgagugcgagagccugagcaccgccagcagcuggagcuacaucguggagaccagcagcagcgacaacggcaccugcuaccccggcgacuucaucgacuacgaggagcugagagagcagcugagcagcgugagcagcuucgagagauucgagaucuuccccaagaccagcagcuggcccaaccacgacagcaacaagggcgugaccgccgccugcccccacgccggcgccaagagcuucuacaagaaccugaucuggcuggugaagaagggcaacagcuaccccaagcugagcaagagcuacaucaacgacaagggcaaggaggugcuggugcuguggggcauccaccaccccagcaccagcgccgaccagcagagccuguaccagaacgccgacgccuacguguucgugggcaccagcagauacagcaagaaguucaagcccgagaucgccaucagacccaaggugagagaccaggagggcagaaugaacuacuacuggacccugguggagcccggcgacaagaucaccuucgaggccaccggcaaccugguggugcccagauacgccuucgccauggagagaaacgccggcagcggcaucaucaucagcgacacccccgugcacgacugcaacaccaccugccagacccccaagggcgccaucaacaccagccugcccuuccagaacauccaccccaucaccaucggcaagugccccaaguacgugaagagcaccaagcugagacuggccaccggccugagaaacgugcccagcauccagagcagaggccuguucggcgccaucgccggcuucaucgagggcggcuggaccggcaugguggacggcugguacggcuaccaccaccagaacgagcagggcagcggcuacgccgccgaccugaagagcacccagaacgccaucgacgagaucaccaacaaggugaacagcgugaucgagaagaugaacacccaguucaccgccgugggcaaggaguucaaccaccuggagaagagaaucgagaaccugaacaagaagguggacgacggcuuccuggacaucuggaccuacaacgccgagcugcuggugcugcuggagaacgagagaacccuggacuaccacgacagcaacgugaagaaccuguacgagaaggugagaagccagcugaagaacaacgccaaggagaucggcaacggcugcuucgaguucuaccacaagugcgacaacaccugcauggagagcgugaagaacggcaccuacgacuaccccaaguacagcgaggaggccaagcugaacagagaggagaucgacggcgugaagcuggagagcaccagaaucuaccagauccuggccaucuacagcaccguggccagcagccuggugcugguggugagccugggcgccaucagcuucuggaugugcagcaacggcagccugcagugcagaaucugcaucuga

SEQ ID NO: 165633 - RNA, 1701 nt, Artificial Sequence; identical to SEQ ID NO: 165632
  derived and/or modified CDS sequence (opt4) from hemagglutinin__InfluenzaA__ADM13221

SEQ ID NO: 165634 - RNA, 1701 nt, Artificial Sequence
  derived and/or modified CDS sequence (opt4) from hemagglutinin__InfluenzaA__ADM13231
augaaggccauccugguggugcugcuguacaccuucgagaccgccaacgccgacacccugugcaucggcuaccacgccaacaacagcaccgacaccguggacaccgugcuggagaagaacgugaccgugacccacagcgugaaccugcuggaggacaagcacaacggcaagcugugcaagcugagaggcguggccccccugcaccugggcaagugcaacaucgccggcuggauccugggcaaccccgagugcgagagccugagcaccgccagcagcuggagcuacaucguggagaccagcagcagcgacaacggcaccugcuaccccggcgacuucaucaacuacgaggagcugagagagcagcugagcagcgugagcagcuucgagagauucgagaucuuccccaagaccagcagcuggcccaaccacgacagcaacaagggcgugaccgccgccugcccccacgccggcgccaagagcuucuacaagaaccugaucuggcuggugaagaagggcaacagcuaccccaagcugagcaagagcuacaucaacgacaagggcaaggaggugcuggugcuguggggcauccaccaccccagcaccagcgccgaccagcagagccuguaccagaacgccgacgccuacguguucgugggcaccagcagauacagcaagaaguucaagcccgagaucgccaucagacccaaggugagagaccaggagggcagaaugaacuacuacuggacccugguggagcccggcgacaagaucaccuucgaggccaccggcaaccugguggugcccagauacgccuucgccauggagagaaacgccggcagcggcaucaucaucagcgacacccccgugcacgacugcaacaccaccugccagacccccaacggcgccaucaacaccagccugcccuuccagaacauccaccccaucaccaucggcaagugccccaaguacgugaagagcaccaagcugagacuggccaccggccugagaaacgugcccagcauccagagcagaggccuguucggcgccaucgccggcuucaucgagggcggcuggaccggcaugguggacggcugguacggcuaccaccaccagaacgagcagggcagcggcuacgccgccgaccugaagagcacccagaacgccaucgacaagaucaccaacaaggugaacagcgugaucgagaagaugaacacccaguucaccgccgugggcaaggaguucaaccaccuggagaagagaaucgagaaccugaacaagaagguggacgacggcuuccuggacaucuggaccuacaacgccgagcugcuggugcugcuggagaacgagagaacccuggacuaccacgacagcaacgugaagaaccuguacgagaaggugagaagccagcugaagaacaacgccaaggagaucggcaacggcugcuucgaguucuaccacaagugcgacaacaccugcauggagagcgugaagaacggcaccuacgacuaccccaaguacagcgaggaggccaagcugaacagagaggagaucgacggcgugaagcuggagagcaccagaaucuaccagauccuggccaucuacagcaccguggccagcagccuggugcugguggugagccugggcgccaucagcuucuggaugugcagcaacggcagccugcagugcagaaucugcaucuga

SEQ ID NO: 165635 - RNA, 1701 nt, Artificial Sequence; identical to SEQ ID NO: 163893
  derived and/or modified CDS sequence (opt4) from hemagglutinin__InfluenzaA__ADM13241

SEQ ID NO: 165636 - RNA, 1701 nt, Artificial Sequence
  derived and/or modified CDS sequence (opt4) from hemagglutinin__InfluenzaA__ADM13251
augaaggccauccugguggugcugcuguacaccuucgccaccaccaacgccgacacccugugcaucggcuaccacgccaacaacagcaccgacaccguggacaccgugcuggagaagaacgugaccgugacccacagcgugaaccugcuggaggacaagcacaacggcaagcugugcaagcugagaggcguggccccccugcaccugggcaagugcaacaucgccggcuggauccugggcaaccccgagugcgagagccugagcaccgccagcagcuggagcuacaucguggagaccagcagcagcgacaacggcaccugcuaccccggcgacuucaucgacuacgaggagcugagagagcagcugagcagcgugagcagcuucgagagauucgagaucuuccccaagaccagcagcuggcccaaccacgacagcaacaagggcgugaccgccgccugcccccacgccggcgccaagagcuucuacaagaaccugaucuggcuggugaagaagggcaacagcuaccccaagcugagcaagagcuacaucaacgacaagggcaaggaggugcuggugcuguggggcauccaccaccccagcaccagcgccgaccagcagagccuguaccagaacgccgacgccuacguguucgugggcaccagcagauacagcaagaaguucaagcccgagaucgccaucagacccaaggugagagaccaggagggcagaaugaacuacuacuggacccugguggagcccggcgacaagaucaccuucgaggccaccggcaaccugguggugcccagauacgccuucgccauggagagagacgccggcagcggcaucaucaucagcgacacccccgugcacgacugcaacaccaccugccagacccccaagggcgccaucaacaccagccugcccuuccagaacauccaccccaucaccaucggcaagugccccaaguacgugaagagcaccaagcugagacuggccaccggccugagaaacgugcccagcauccagagcagaggccuguucggcgccaucgccggcuucaucgagggcggcuggaccggcaugguggacggcugguacggcuaccaccaccagaacgagcagggcagcggcuacgccgccgaccugaagagcacccagaacgccaucgacaagaucaccaacaaggugaacagcgugaucgagaagaugaacacccaguucaccgccgugggcaaggaguucaaccaccuggagaagagaaucgagaaccugaacaagaagguggacgacggcuuccuggacaucuggaccuacaacgccgagcugcuggugcugcuggagaacgagagaacccuggacuaccacgacagcaacgugaagaaccuguacgagaaggugagaagccagcugaagaacaacgccaaggagaucggcaacggcugcuucgaguucuaccacaagugcgacaacaccugcauggagagcgugaagaacggcaccuacgacuaccccaaguacagcgaggaggccaagcugaacagagaggagaucgacggcgugaagcuggagagcaccagaaucuaccagauccuggccaucuacagcaccguggccagcagccuggugcugguggugagccugggcgccaucagcuucuggaugugcagcaacggcagccugcagugcagaaucugcaucuga

SEQ ID NO: 165637 - RNA, 1701 nt, Artificial Sequence
  derived and/or modified CDS sequence (opt4) from hemagglutinin__InfluenzaA__ADM13261
augaaggccauccugguggugcugcuguacaccuucgccaccgccaacgccgacacccugugcaucggcuaccacgccaacaacagcaccgacaccguggacaccgugcuggagaagaacgugaccgugacccacagcgugaaccugcuggaggacaagcacaacggcaagcugugcaagcugagaggcaucgccccccugcaccugggcaagugcaacaucgccggcuggauccugggcaaccccgagugcgagagccugagcaccgccagcagcuggagcuacaucguggagaccagcggcagcgacaacggcaccugcuaccccggcgacuucaucgacuacgaggagcugagagagcagcugagcagcgugagcagcuucgagagauucgagaucuuccccaagaccagcagcuggcccaaccacgacagcaacaagggcgugaccgccgccugcccccacgccggcgccaagagcuucuacaagaaccugaucuggcuggugaagaagggcaacagcuaccccaagcugagcaagagcuacaucaacgacaagggcaaggaggugcuggugcuguggggcauccaccaccccagcaccagcgccgaccagcagagccuguaccagaacgccgacgccuacguguucgugggcaccagcagauacagcaagaaguucaagcccgagaucgccaucagacccaaggugagagaccaggagggcagaaugaacuacuacuggacccugguggagcccggcgacaagaucaccuucgaggccaccggcaaccugguggugcccagauacgccuucgccauggagagaaacgccggcagcggcaucaucaucagcgacacccccgugcacgacugcaacaccaccugccagacccccaagggcgccaucaacaccagccugcccuuccagaacauccaccccaucaccaucggcaagugccccaaguacgugaagagcaccaagcugagacuggccaccggccugagaaacgugcccagcauccagagcagaggccuguucggcgccaucgccggcuucaucgagggcggcuggaccggcaugguggacggcugguacggcuaccaccaccagaacgagcagggcagcggcuacgccgccgaccugaagagcacccagaacgccaucgacgagaucaccaacaaggugaacagcgugaucgagaagaugaacacccaguucaccgccgugggcaaggaguucaaccaccuggagaagagaaucgagaaccugaacaagaagguggacgacggcuuccuggacaucuggaccuacaacgccgagcugcuggugcugcuggagaacgagagaacccuggacuaccacgacagcaacgugaagaaccuguacgagaaggugagaagccagcugaagaacaacgccaaggagaucggcaacggcugcuucgaguucuaccacaagugcgacaacaccugcauggagagcgugaagaacggcaccuacgacuaccccaaguacagcgaggaggccaagcugaacagagaggagaucgacggcgugaagcuggagagcaccagaaucuaccagauccuggccaucuacagcaccguggccagcagccuggugcugguggugagccugggcgccaucagcuucuggaugugcagcaacggcagccugcagugcagaaucugcaucuga

SEQ ID NO: 165638 - RNA, 1701 nt, Artificial Sequence
  derived and/or modified CDS sequence (opt4) from hemagglutinin__InfluenzaA__ADM13271
augaaggccauccugguggugcugcuguacaccuucgccaccgccaacgccgacacccugugcaucggcuaccacgccaacaacagcaccgacaccguggacaccgugcuggagaagaacgugaccgugacccacagcgugaaccugcuggaggacaagcacaacggcaagcugugcaagcugagaggcguggccccccugcaccugggcaagugcaacaucgccggcuggauccugggcaaccccgagugcgagagccugagcaccgccagcagcuggagcuacaucguggagaccagcagcagcgacaacggcaccugcuaccccggcgacuucaucgacuacgaggagcugagagagcagcugagcagcgugagcagcuucgagagauucgagaucuuccccaagaccagcagcuggcccaaccacgacagcaacaagggcgugaccgccgccugcccccacgccggcgccaagagcuucuacaagaaccugaucuggcuggugaagaagggcaacagcuaccccaagcugagcaagagcuacaucaacgacaagggcaaggaggugcuggugcuguggggcauccaccaccccagcaccagcgccgaccagcagagccuguaccagaacgccgacgccuacguguucgugggcaccagcagauacagcaagaaguucaagcccgagaucgccaucagacccaaggugagagaccaggagggcagaaugaacuacuacuggacccugguggagcccggcgacaagaucaccuucgaggccaccggcaaccugguggugcccagauacgccuucgccauggagagaaacgccggcagcggcaucaucaucagcgacacccccgugcacgacugcaacaccaccugccagacccccaagggcgccaucaacaccagccugcccuuccagaacauccaccccaucaccaucggcaagugccccaaguacgugaagagcaccaagcugagacuggccaccggccugagaaacgugcccagcauccagagcagaggccuguucggcgccaucgccggcuucaucgagggcggcuggaccggcaugguggacggcugguacggcuaccaccaccagaacgagcagggcagcggcuacgccgccgaccugaagagcacccagaacgccaucgacaagaucaccaacaaggugaacagcgugaucgagaagaugaacacccaguucaccgccgugggcaaggaguucaaccaccuggagaagagaaucgagaaccugaacaagaagguggacgacggcuuccuggacaucuggaccuacaacgccgagcugcuggugcugcuggagaacgagagaacccuggacuaccacgacagcaacgugaagaaccuguacgagaaggugagaagccagcugaagaacaacgccaaggagaucggcaacggcugcuucgaguucuaccacaagugcgacaacaccugcauggagagcgugaagaacggcaccuacgacuaccccaaguacagcgaggaggccaagcugaacagagaggagaucgacggcgugaagcuggagagcaccagaauccaccagauccuggccaucuacagcaccguggccagcagccuggugcugguggugagccugggcgccaucagcuucuggaugugcagcaacggcagccugcagugcagaaucugcaucuga

SEQ ID NO: 165639 - RNA, 1701 nt, Artificial Sequence; identical to SEQ ID NO: 165634
  derived and/or modified CDS sequence (opt4) from hemagglutinin__InfluenzaA__ADM13281

SEQ ID NO: 165640 - RNA, 1701 nt, Artificial Sequence; identical to SEQ ID NO: 163830
  derived and/or modified CDS sequence (opt4) from hemagglutinin__InfluenzaA__ADM13291

SEQ ID NO: 165641 - RNA, 1701 nt, Artificial Sequence
  derived and/or modified CDS sequence (opt4) from hemagglutinin__InfluenzaA__ADM13301
augaaggccauccugguggugcugcuguacaccuucgccaccgccaacgccgacacccugugcaucggcuaccacgccaacaacagcaccgacaccguggacaccauccuggagaagaacgugaccgugacccacagcgugaaccugcuggaggacaagcacaacggcaagcugugcaagcugagaggcguggccccccugcaccugggcaagugcaacaucgccggcuggauccugggcaaccccgagugcgagagccugagcaccgccagcagcuggagcuacaucguggagaccagcagcagcgacaacggcaccugcuaccccggcgacuucaucgacuacgaggagcugagagagcagcugagcagcgugagcagcuucgagagauucgagaucuuccccaagaccagcagcuggcccaaccacgacagcaacaagggcgugaccgccgccugcccccacgccggcgccaagagcuucuacaagaaccugaucuggcuggugaagaaggagaacagcuaccccaagcugagcaagagcuacaucaacgacaagggcaaggaggugcuggugcuguggggcauccaccaccccagcaccagcgccgaccagcagagccuguaccagaacguggacgccuacguguucgugggcaccagcagauacagcaagaaguucaagcccgagaucgccaucagacccaaggugagagaccaggagggcagaaugaacuacuacuggacccugguggagcccggcgacaagaucaccuucgaggccaccggcaaccugguggugcccagauacgccuucgccauggagagaaacgccggcagcggcaucaucaucagcgacacccccgugcacgacugcaacaccaccugccagacccccaagggcgccaucaacaccagccugcccuuccagaacauccaccccaucaccaucggcaagugccccaaguacgugaagagcaccaagcugagacuggccaccggccugagaaacgugcccagcauccagagcagaggccuguucggcgccaucgccggcuucaucgagggcggcuggaccggcaugguggacggcugguacggcuaccaccaccagaacgagcagggcagcggcuacgccgccgaccugaagagcacccagaacgccaucgacgagaucaccaacaaggugaacagcgugaucgagaagaugaacacccaguucaccgccgugggcaaggaguucaaccaccuggagaagagaaucgagaaccugaacaagaagguggacgacggcuuccuggacaucuggaccuacaacgccgagcugcuggugcugcuggagaacgagagaacccuggacuaccacgacagcaacgugaagaaccuguacgagaaggugagaagccagcugaagaacaacgccaaggagaucggcaacggcugcuucgaguucuaccacaagugcgacaacaccugcauggagagcgugaagaacggcaccuacgacuaccccaaguacagcgaggaggccaagcugaacagagaggagaucgacggcgugaagcuggagagcaccagaaucuaccagauccuggccaucuacagcaccguggccagcagccuggugcugguggugagccugggcgccaucagcuucuggaugugcagcaacggcagccugcagugcagaaucugcaucuga

SEQ ID NO: 165642 - RNA, 1701 nt, Artificial Sequence
  derived and/or modified CDS sequence (opt4) from hemagglutinin__InfluenzaA__ADM13311
augaaggccauccugguggugcugcuguacaccuucgccaccgccaacgccgacacccugugcaucggcuaccacgccaacaacagcaccgacaccguggacaccauccuggagaagaacgugaccgugacccacagcgugaaccugcuggagaacaagcacaacggcaagcugugcaagcugagaggcgugagcccccugcaccugggcaagugcaacaucgccggcuggauccugggcaaccccgagugcgagagccugagcaccgccagcagcuggagcuacaucguggagaccagcagcagcgacaacggcaccugcuaccccggcgacuucaucgacuacgaggagcugagagagcagcugagcagcgugagcagcuucgagagauucgagaucuuccccaagaccagcagcuggcccaaccacgacagcaacaagggcgugaccgccgccugcccccacgccggcgccaagagcuucuacaagaaccugaucuggcuggugaagaagggcaacagcuaccccaagcugagcaagagcuacaucaacgacaagggcaaggaggugcuggugcuguggggcauccaccaccccagcaccagcgccgaccagcagagccuguaccagaacgccgacgccuacguguucgugggcaccagcagauacagcaagaaguucaagcccgagaucgccaucagacccaaggugagagaccaggagggcagaaugaacuacuacuggacccugguggagcccggcgacaagaucaccuucgaggccaccggcaaccugguggugcccagauacgccuucgccauggagagaaacgccggcagcggcaucaucaucagcgacacccccgugcacgacugcaacaccaccugccagacccccaagggcgccaucaacaccagccugcccuuccagaacauccaccccaucaccaucggcaagugccccaaguacgugaagagcaccaagcugagacuggccaccggccugagaaacgugcccagcauccagagcagaggccuguucggcgccaucgccggcuucaucgagggcggcuggaccggcaugguggacggcugguacggcuaccaccaccagaacgagcagggcagcggcuacgccgccgaccugaagagcacccagaacgccaucgacgagaucaccaacaaggugaacagcgugaucgagaagaugaacacccaguucaccgccgugggcaaggaguucaaccaccuggagaagagaaucgagaaccugaacaagaagguggacgacggcuuccuggacaucuggaccuacaacgccgagcugcuggugcugcuggagaacgagagaacccuggacuaccacgacagcaacgugaagaaccuguacgagaaggugagaagccagcugaagaacaacgccaaggagaucggcaacggcugcuucgaguucuaccacaagugcgacaacaccugcauggagagcgugaagaacggcaccuacgacuaccccaaguacagcgaggaggccaagcugaacagagaggagaucgacggcgugaagcuggagagcaccagaaucuaccagauccuggccaucuacagcaccgccgccagcagccuggugcugguggugagccugggcgccaucagcuucuggaugugcagcaacggcagccugcagugcagaaucugcaucuga

SEQ ID NO: 165643 - RNA, 1701 nt, Artificial Sequence; identical to SEQ ID NO: 163893
  derived and/or modified CDS sequence (opt4) from hemagglutinin__InfluenzaA__ADM13321

SEQ ID NO: 165644 - RNA, 1701 nt, Artificial Sequence
  derived and/or modified CDS sequence (opt4) from hemagglutinin__InfluenzaA__ADM13331
augaaggccauccugguggugcugcuguacaccuucgccaccgccaacgccgacacccugugcaucggcuaccacgccaacaacagcaccgacaccguggacaccgugcuggagaagaacgugaccgugacccacagcgugaaccugcuggaggacaagcacaacggcaagcugugcaagcugagaggcguggccccccugcaccugggcaagugcaacaucgccggcuggauccugggcaaccccgagugcgagagccugagcaccgccagcagcuggagcuacaucguggagaccagcagcagcgacaacggcaccugcuaccccggcgacuucaucgacuacgaggagcugagagagcagcugagcagcgugagcagcuucgagagauucgagaucuuccccaagaccagcagcuggcccgaccacgacagcaacaagggcgugaccgccgccugcccccacgccggcgccaagagcuucuacaagaaccugaucuggcuggugaagaagggcaacagcuaccccaagcugagcaagagcuacaucaacgacaagggcaaggaggugcuggugcuguggggcauccaccaccccagcaccagcgccgaccagcagagccuguaccagaacgccgacgccuacguguucgugggcaccagcagauacagcaagaaguucaagcccgagaucgccaucagacccaaggugagagaccaggagggcagaaugaacuacuacuggacccugguggagcccggcgacaagaucaccuucgaggccaccggcaaccugguggugcccagauacgccuucgccauggagagaaacgccggcagcggcaucaucaucagcgacacccccgugcacgacugcaacaccaccugccagacccccaagggcgccaucaacaccagccugcccuuccagaacauccaccccaucaccaucggcaagugccccaaguacgugaagagcaccaagcugagacuggccaccggccugagaaacgugcccagcauccagagcagaggccuguucggcgccaucgccggcuucaucgagggcggcuggaccggcaugguggacggcugguacggcuaccaccaccagaacgagcagggcagcggcuacgccgccgaccugaagagcacccagaacgccaucgacaagaucaccaacaaggugaacagcgugaucgagaagaugaacacccaguucaccgccgugggcaaggaguucaaccaccuggagaagagaaucgagaaccugaacaagaagguggacgacggcuuccuggacaucuggaccuacaacgccgagcugcuggugcugcuggagaacgagagaacccuggacuaccacgacagcaacgugaagaaccuguacgagaaggugagaagccagcugaagaacaacgccaaggagaucggcaacggcugcuucgaguucuaccacaagugcgacaacaccugcauggagagcgugaagaacggcaccuacgacuaccccaaguacagcgaggaggccaagcugaacagagaggagaucgacggcgugaagcuggagagcaccagaaucuaccagauccuggccaucuacagcaccguggccagcagccuggugcugguggugagccugggcgccaucagcuucuggaugugcagcaacggcagccugcagugcagaaucugcaucuga

SEQ ID NO: 165645 - RNA, 1701 nt, Artificial Sequence; identical to SEQ ID NO: 164342
  derived and/or modified CDS sequence (opt4) from hemagglutinin__InfluenzaA__ADM13341

SEQ ID NO: 165646 - RNA, 1701 nt, Artificial Sequence; identical to SEQ ID NO: 165308
  derived and/or modified CDS sequence (opt4) from hemagglutinin__InfluenzaA__ADM13351

SEQ ID NO: 165647 - RNA, 1701 nt, Artificial Sequence; identical to SEQ ID NO: 162389
  derived and/or modified CDS sequence (opt4) from hemagglutinin__InfluenzaA__ADM13442

SEQ ID NO: 165648 - RNA, 1701 nt, Artificial Sequence; identical to SEQ ID NO: 162389
  derived and/or modified CDS sequence (opt4) from hemagglutinin__InfluenzaA__ADM13443

SEQ ID NO: 165649 - RNA, 1701 nt, Artificial Sequence; identical to SEQ ID NO: 162389
  derived and/or modified CDS sequence (opt4) from hemagglutinin__InfluenzaA__ADM13444

SEQ ID NO: 165650 - RNA, 1701 nt, Artificial Sequence; identical to SEQ ID NO: 163336
  derived and/or modified CDS sequence (opt4) from hemagglutinin__InfluenzaA__ADM13445

SEQ ID NO: 165651 - RNA, 1701 nt, Artificial Sequence; identical to SEQ ID NO: 162389
  derived and/or modified CDS sequence (opt4) from hemagglutinin__InfluenzaA__ADM13446

SEQ ID NO: 165652 - RNA, 1701 nt, Artificial Sequence
  derived and/or modified CDS sequence (opt4) from hemagglutinin__InfluenzaA__ADM13447
augaagaccaucaucgcccugagcuacaucuucugccuggcccugggccaggaccugcccggcaacgacaacagcaccgccacccugugccugggccaccacgccgugcccaacggcacccuggugaagaccaucaccgacgaccagaucgaggugaccaacgccaccgagcuggugcagagcagcagcaccggcaagaucugcaacaacccccacagaauccuggacggcaucgacugcacccugaucgacgcccugcugggcgacccccacugcgacguguuccagaacgagaccugggaccuguucguggagagaagcaaggccuucagcaacugcuaccccuacgacgugcccgacuacgccagccugagaagccugguggccagcagcggcacccuggaguucaucaccgagggcuucaccuggaccggcgugacccagaacggcggcagcaacgccugcaagagaggccccggcagcggcuucuucagcagacugaacuggcugaccaagagcggcagcaccuacagcgugcugaacgugaccaugcccaacaacgacaacuucgacaagcuguacaucuggggcgugcaccaccccagcaccaaccaggagcagaccagccuguacgugcaggccagcggcagagugaccgugagcaccagaagaagccagcagaccaucauccccaacaucggcagcagacccugggugagaggccugagcagcagaaucagcaucuacuggaccaucgugaagcccggcgacgugcuggugaucaacagcaacggcaaccugaucgcccccagaggcuacuucaagaugagaaccggcaagagcagcaucaugagaagcgacgcccccaucgacaccugcaucagcgagugcaucacccccaacggcagcauccccaacgacaagcccuuccagaacgugaacaagaucaccuacggcgccugccccaaguacgugaagcagaacacccugaagcuggccaccggcaugagaaacgugcccgagaagcagaccagaggccuguucggcgccaucgccggcuucaucgagaacggcugggagggcaugaucgacggcugguacggcuucagacaccagaacagcgagggcaccggccaggccgccgaccugaagagcacccaggccgccaucgaccagaucaacggcaagcugaacagagugaucgagaagaccaacgagaaguuccaccagaucgagaaggaguucagcgagguggagggcagaauccaggaccuggagaaguacguggaggacaccaagaucgaccuguggagcuacaacgccgagcugcugguggcccuggagaaccagcacaccaucgaccugaccgacagcgagaugaacaagcuguucgagaagaccagaagacagcugagagagaacgccgaggacaugggcaacggcugcuucaagaucuaccacaagugcgacaacgccugcaucgagagcaucagaaacggcaccuacgaccacgacguguacagagacgaggcccugaacaacagauuccagaucaagggcguggagcugaagagcggcuacaaggacuggauccuguggaucagcuucgccaucagcugcuuccugcugugcguggugcugcugggcuucaucaugugggccugccagagaggcaacaucagaugcaacaucugcaucuga

SEQ ID NO: 165653 - RNA, 1701 nt, Artificial Sequence; identical to SEQ ID NO: 162459
  derived and/or modified CDS sequence (opt4) from hemagglutinin__InfluenzaA__ADM13448

SEQ ID NO: 165654 - RNA, 1701 nt, Artificial Sequence
  derived and/or modified CDS sequence (opt4) from hemagglutinin__InfluenzaA__ADM13449
augaagaccaucaucgcccugagcuacaucuucugccuggccuucggccaggaccugcccggcaacgacaacagcaccgccacccugugccugggccaccacgccgugcccaacggcacccuggugaagaccaucaccgacgaccagaucgaggugaccaacgccaccgagcuggugcagagcagcagcaccggcaagaucugcaacaacccccacagaauccuggacggcaucgacugcacccugaucgacgcccugcugggcgacccccacugcgacguguuccagaacgagaccugggaccuguucguggagagaagcaaggccuucagcaacugcuaccccuacgacgugcccgacuacgccagccugagaagccugguggccagcagcggcacccuggaguucaucaccgagggcuucaccuggaccggcgugacccagaacggcggcagcaacgccugcaagagaggccccggcagcggcuucuucagcagacugaacuggcugaccaagagcggcagcaccuaccccgugcugaacgugaccaugcccaacaacgacaacuucgacaagcuguacaucuggggcgugcaccaccccagcaccaaccaggagcagaccagccuguacgugcaggccagcggcagagugaccgugagcaccagaagaagccagcagaccaucauccccaacaucgagagcagacccugggugagaggccugagcagcagaaucagcaucuacuggaccaucgugaaccccggcgacgugcuggugaucaacagcaacggcaaccugaucgcccccagaggcuacuucaagaugagaaccggcaagagcagcaucaugagaagcgacgcccccaucgacaccugcaucagcgagugcaucacccccaacggcagcauccccaacgacaagcccuuccagaacgugaacaagaucaccuacggcgccugccccaaguacgugaagcagaacacccugaagcuggccaccggcaugagaaacgugcccgagaagcagaccagaggccuguucggcgccaucgccggcuucaucgagaacggcugggagggcaugaucgacggcugguacggcuucagacaccagaacagcgagggcaccggccaggccgccgaccugaagagcacccaggccgccaucgaccagaucaacggcaagcugaacagagugaucgagaagaccaacgagaaguuccaccagaucgagaaggaguucagcgagguggagggcagaauccaggaccuggagaaguacguggaggacaccaagaucgaccuguggagcuacaacgccgagcugcugguggcccuggagaaccagcacaccaucgaccugaccgacagcgagaugaacaagcuguucgagaagaccagaagacagcugagagagaacgccgaggacaugggcaacggcugcuucaagaucuaccacaagugcgacaacgccugcaucgagagcaucagaaacggcaccuacgaccacgacguguacagagacgaggcccugaacaacagauuccagaucaagggcguggagcugaagagcggcuacaaggacuggauccuguggaucagcuucgccaucagcugcuuccugcugugcguggugcugcugggcuucaucaugugggccugccagagaggcaacaucagaugcaacaucugcaucuga

SEQ ID NO: 165655 - RNA, 1701 nt, Artificial Sequence; identical to SEQ ID NO: 162491
  derived and/or modified CDS sequence (opt4) from hemagglutinin__InfluenzaA__ADM13450

SEQ ID NO: 165656 - RNA, 1701 nt, Artificial Sequence
  derived and/or modified CDS sequence (opt4) from hemagglutinin__InfluenzaA__ADM13451
augaagaccaucaucgcccugagcuacaucuucugccuggcccugggccaggaccugcccggcaacgacaacagaaccgccacccugugccugggccaccacgccgugcccaacggcacccuggugaagaccaucaccgacgaccagaucgaggugaccaacgccaccgagcuggugcagagcagcagcaccggcaagaucugcaacaacccccacagaauccuggacggcaucgacugcacccugaucgacgcccugcugggcgacccccacugcgacguguuccagaacgagaccugggaccuguucguggagagaagcaaggccuucagcaacugcuaccccuacgacgugcccgacuacgccagccugagaagccugguggccagcagcggcacccuggaguucaucaccgagggcuucaccuggaccggcgugacccagaacggcggcagcaacgccugcaagagaggccccggcagcggcuucuucagcagacugaacuggcugaccaagagcggcagcaccuaccccgugcugaacgugaccaugcccaacaacgacaacuucgacaagcuguacaucuggggcgugcaccaccccagcaccaaccaggagcagaccagccuguacgugcaggccagcggcagagugaccgugagcaccagaagaagccagcagaccaucauccccaacaucggcagcagacccugggugagaggccugagcagcagaaucagcaucuacuggaccaucgugaagcccggcgacgugcuggugaucaacagcaacggcaaccugaucgcccccagaggcuacuucaagaugagaaccggcaagagcagcaucaugagaagcgacgcccccaucgacaccugcaucagcgagugcaucacccccaacggcagcauccccaacgacaagcccuuccagaacgugaacaagaucaccuacggcgccugccccaaguacgugaagcagaacacccugaagcuggccaccggcaugagaaacgugcccgagaagcagaccagaggccuguucggcgccaucgccggcuucaucgagaacggcugggagggcaugaucgacggcugguacggcuucagacaccagaacagcgagggcaccggccaggccgccgaccugaagagcacccaggccaccaucgaccagaucaacggcaagcugaacagagugaucgagaagaccaacgagaaguuccaccagaucgagaaggaguucagcgagguggagggcagaauccaggaccuggagaaguacguggaggacaccaagaucgaccuguggagcuacaacgccgagcugcugguggcccuggagaaccagcacaccaucgaccugaccgacagcgagaugaacaagcuguucgagaagaccagaagacagcugagagagaacgccgaggacaugggcaacggcugcuucaagaucuaccacaagugcgacaacgccugcaucgagagcaucagaaacggcaccuacgaccacgacguguacagagacgaggcccugaacaacagauuccagaucaagggcguggagcugaagagcggcuacaaggacuggauccuguggaucagcuucgccaucagcugcuuccugcugugcguggugcugcugggcuucaucaugugggccugccagagaggcaacaucagaugcaacaucugcaucuga

SEQ ID NO: 165657 - RNA, 1701 nt, Artificial Sequence; identical to SEQ ID NO: 162376
  derived and/or modified CDS sequence (opt4) from hemagglutinin__InfluenzaA__ADM13452

SEQ ID NO: 165658 - RNA, 1701 nt, Artificial Sequence
  derived and/or modified CDS sequence (opt4) from hemagglutinin__InfluenzaA__ADM14467
augaaggccauccugguggugcugcuguacaccuucgccaccgccaacgccgacacccugugcaucggcuaccacgccaacaacagcaccgacaccguggacaccgugcuggagaagaacgugaccgugacccacagcgugaaccugcuggaggacaagcacaacggcaagcugugcaagcugagaggcguggccccccugcaccugggcaagugcaacaucgccggcuggauccugggcaaccccgagugcgagagccugagcaccgccagcagcuggagcuacaucguggagaccagcagcagcgacaacggcaccugcuaccccggcgacuucaucgacuacgaggagcugagagagcagcugagcagcgugagcagcuucgagagauucgagaucuuccccaagaccagcagcuggcccaaccacgacagcaacaagggcgugaccgccgccugcagccacgccggcgccaagagcuucuacaagaaccugaucuggcuggugaagaagggcaacagcuaccccaagcugagcaagagcuacaucaacgacaagggcaaggaggugcuggugcuguggggcauccaccaccccagcaccagcgccgaccagcagagccuguaccagaacgccgacgccuacguguucgugggcaccagcagauacagcaagaaguucaagcccgagaucgccaucagacccaaggugagagaccaggagggcagaaugaacuacuacuggacccugguggagcccggcgacaagaucaccuucgaggccaccggcaaccugguggugcccagauacgccuucgccauggagagaaacgccggcagcggcaucaucaucagcgacacccccgugcacgacugcaacaccaccugccagacccccaagggcgccaucaacaccagccugcccuuccagagcauccaccccaucaccaucggcaagugccccaaguacgugaagagcaccaagcugagacuggccaccggccugagaaacgugcccagcauccagagcagaggccuguucggcgccaucgccggcuucaucgagggcggcuggaccggcaugguggacggcugguacggcuaccaccaccagaacgagcagggcagcggcuacgccgccgaccugaagagcacccagaacgccaucgacaagaucaccaacaaggugaacagcgugaucgagaagaugaacacccaguucaccgccgugggcaaggaguucaaccaccuggagaagagaaucgagaaccugaacaagaagguggacgacggcuuccuggacaucuggaccuacaacgccgagcugcuggugcugcuggagaacgagagaacccuggacuaccacgacagcaacgugaagaaccuguacgagaaggugagaagccagcugaagaacaacgccaaggagaucggcaacggcugcuucgaguucuaccacaagugcgacaacaccugcauggagagcgugaagaacggcaccuacgacuaccccaaguacagcgaggaggccaagcugaacagagaggagaucgacggcgugaagcuggagagcaccagaaucuaccagauccuggccaucuacagcaccguggccagcagccuggugcugguggugagccugggcgccaucagcuucuggaugugcagcaacggcagccugcagugcagaaucugcaucuga

SEQ ID NO: 165659 - RNA, 1695 nt, Artificial Sequence
  derived and/or modified CDS sequence (opt4) from hemagglutinin__InfluenzaA__ADM14516
augaaggccauccugguggugcugcuguacaccuucgccaccgccaacgccgacacccugugcaucggcuaccacgccaacaacagcaccgacaccgugaacaccgugcuggagaagaacgugaccgugacccacagcgugaaccugcuggaggacaagcacaacggcaagcugugcaagcugagaggcguggccccccugcaccugggcaagugcaacaucgccggcuggauccugggcaaccccgagugcgagagccugagcaccgccagcagcuggagcuacaucguggagaccagcagcagcgacaacggcaccugcuaccccggcgacuucaucgacuacgaggagcugagagagcagcugagcagcgugagcagcuucgagagauucgagaucuuccccaagaccagcagcuggcccaaccacgacagcaacaagggcgugaccgccgccugcccccacgccggcgccaagagcuucuacaagaaccugaucuggcuggugaagaagggcaacagcuaccccaagcugagcaagagcuacaucaacgacaagggcaaggaggugcuggugcuguggggcauccaccaccccagcaccagcaccgaccagcagagccuguaccagaacgccgacgccuacguguucgugggcaccagcagauacagcaagaaguucaagcccgagaucgccaucagacccaaggugagagaccaggagggcagaaugaacuacuacuggacccugguggagcccggcgacaagaucaccuucgaggccaccggcaaccugguggugcccagauacgccuucgccauggagagaaacgccggcagcggcaucaucaucagcgacacccccgugcacgacugcaacaccaccugccagacccccaagggcgccaucaacaccagccugcccuuccagaacauccaccccaucaccaucggcaagugccccaaguacgugaagagcaccaagcugagacuggccaccggccugagaaacgugcccagcauccagagcagaggccuguucggcgccaucgccggcuucaucgagggcggcuggaccggcaugguggacggcugguacggcuaccaccaccagaacgagcagggcagcggcuacgccgccgaccugaagagcacccagaacgccaucgacgagaucaccaacaaggugaacagcgugaucgagaagaugaacacccaguucaccgccgugggcaaggaguucaaccaccuggagaagagaaucgagaaccugaacaagaagguggacgacggcuuccuggacaucuggaccuacaacgccgagcugcuggugcugcuggagaacgagagaacccuggacuaccacgacagcaacgugaagaaccuguacgagaaggugagaagccagcugaagaacaacgccaaggagaucggcaacggcugcuucgaguucuaccacaagugcgacaacaccugcauggagagcgugaagaacggcaccuacgacuaccccaaguacagcgaggaggccaagcugaacagagaggagaucgacggcgugaagcuggagagcaccagaaucuaccagauccuggccaucuacagcaccguggccagcagccuggugcugguggugagccugggcgccaucagcuucuggaugugcagcggccacagcugcagaaucugcaucuga

SEQ ID NO: 165660 - RNA, 1701 nt, Artificial Sequence
  derived and/or modified CDS sequence (opt4) from hemagglutinin__InfluenzaA__ADM14525
augaaggccacccugguggugcugcuguacaccuucgccaccgccaacgccgacacccugugcaucggcuaccacgccaacaacagcaccgacaccguggacaccgugcuggagaagaacgugaccgugacccacagcgugaaccugcuggaggacaagcacaacggcaagcugugcaagcugagaggcguggccccccugcaccugggcaagugcaacaucgccggcuggauccugggcaaccccgagugcgagagccugagcaccgccagcagcuggagcuacaucguggagaccagcagcagcgacaacggcaccugcuaccccggcgacuucaucgacuacgaggagcugagagagcagcugagcagccugagcagcuucgagagauucgagaucuuccccaagaccagcagcuggcccaaccacgacagcaacaagggcgugaccgccgccugcccccacgccggcgccaagagcuucuacaagaaccugaucuggcuggugaagaagggcaacagcuaccccaagcugagcaagagcuacaucaacgacaagggcaaggacgugcuggugcuguggggcauccaccaccccagcaccagcgccgaccagcagagccuguaccagaacgccgacgccuacguguucgugggcaccagcagauacagcaagaaguucaagcccgagaucgccaucagacccaaggugagagaccaggagggcagaaugaacuacuacuggacccugguggagcccggcgacaagaucaccuucgaggccaccggcaaccugguggugcccagauacgccuucgccauggagagaaacgccggcagcggcaucaucaucagcgacacccccgugcacgacugcaacaccaccugccagacccccaagggcgccaucaacaccagccugcccuuccagaacauccaccccaucaccaucggcaagugccccaaguacgugaagagcaccaagcugagacuggccaccggccugagaaacgugcccagcauccagagcagaggccuguucggcgccaucgccggcuucaucgagggcggcuggaccggcaugguggacggcugguacggcuaccaccaccagaacgagcagggcagcggcuacgccgccgaccugaagagcacccagaacgccaucgacgagaucaccaacaaggugaacagcgugaucgagaagaugaacacccaguucaccgccgugggcaaggaguucaaccaccuggagaagagaaucgagaaccugaacaagaagguggacgacggcuuccuggacaucuggaccuacaacgccgagcugcuggugcugcuggagaacgagagaacccuggacuaccacgacagcaacgugaagaaccuguacgagaaggugagaagccagcugaagaacaacgccaaggagaucggcaacggcugcuucgaguucuaccacaagugcgacaacaccugcauggagagcgugaagaacggcaccuacgacuaccccaaguacagcgaggaggccaagcugaacagagaggagaucgacggcgugaagcuggagagcaccagaaucuaccagauccuggccaucuacagcaccguggccagcagccuggugcugguggugagccugggcgccaucagcuucuggaugugcagcaacggcagccugcagugcagaaucugcaucuga

SEQ ID NO: 165661 - RNA, 1695 nt, Artificial Sequence
  derived and/or modified CDS sequence (opt4) from hemagglutinin__InfluenzaA__ADM14553
augaaggccauccugguggugcugcuguacaccuucgccaccgccaacgccgacacccugugcaucggcuaccacgccaacaacagcaccgacaccguggacaccauccuggagaagaacgugaccgugacccacagcgugaaccugcuggaggacaagcacaacggcaagcugugcaagcugagaggcguggccccccugcaccugggcaagugcaacaucgccggcuggauccugggcaaccccgagugcgagagccugagcaccgccagcagcuggagcuacaucguggagaccagcagcagcgacaacggcaccugcuaccccggcgacuucaucgacuacgaggagcugagagagcagcugagcagcgugagcagcuucgagagauucgagaucuuccccaagaccagcagcuggcccaaccacgacagcaacaagggcgugaccgccgccugcccccacgccggcgccaagagcuucuacaagaaccugaucuggcuggugaagaagggcaacagcuaccccaagcugagcaagagcuacaucaacgacaagggcaaggaggugcuggugcuguggggcauccaccaccccagcaccagcgccgaccagcagagccuguaccagaacgccgacgccuacguguucguggagaccagcagauacagcaagaaguucaagcccgagaucgccaucagacccaaggugagagaccaggagggcagaaugaacuacuacuggacccugguggagcccggcgacaagaucaccuucgaggccaccggcaaccugguggugcccagauacgccuucgccauggagagaaacgccggcagcggcaucaucaucagcgacaccagcgugcacgacugcaacaccaccugccagacccccaagggcgccaucaacaccagccugcccuuccagaacauccaccccaucaccaucggcaagugccccaaguacgugaagagcaccaagcugagacuggccaccggccugagaaacgugcccagcauccagagcagaggccuguucggcgccaucgccggcuucaucgagggcggcuggaccggcaugguggacggcugguacggcuaccaccaccagaacgagcagggcagcggcuacgccgccgaccugaagagcacccagaacgccaucgacgagaucaccaacaaggugaacagcgugaucgagaagaugaacacccaguucaccgccgugggcaaggaguucaaccaccuggagaagagaaucgagaaccugaacaagaagguggacgacggcuuccuggacaucuggaccuacaacgccgagcugcuggugcugcuggagaacgagagaacccuggacuaccacgacagcaacgugaagaaccuguacgagaaggugagaagccagcugaagaacaacgccaaggagaucggcaacggcugcuucgaguucuaccacaagugcgacaacaccugcauggagagcgugaagaacggcaccuacgacuaccccaaguacagcgaggaggccaagcugaacagagaggagaucgacggcgugaagcuggagagcaccagaaucuaccagauccuggccaucuacagcaccguggccagcagccuggugcugguggugagccugggcgccaucagcuucuggaugugcagcggccacagcugcagaaucugcaucuga

SEQ ID NO: 165662 - RNA, 1701 nt, Artificial Sequence; identical to SEQ ID NO: 163176
  derived and/or modified CDS sequence (opt4) from hemagglutinin__InfluenzaA__ADM14562

SEQ ID NO: 165663 - RNA, 1701 nt, Artificial Sequence; identical to SEQ ID NO: 162729
  derived and/or modified CDS sequence (opt4) from hemagglutinin__InfluenzaA__ADM14571

SEQ ID NO: 165664 - RNA, 1701 nt, Artificial Sequence
  derived and/or modified CDS sequence (opt4) from hemagglutinin__InfluenzaA__ADM14580
augaaggccauccugguggugcugcuguacaccuucgccaccgccaacgccgacacccugugcaucggcuaccacgccaacaacagcaccgacaccguggacaccgugcuggagaagaacgugaccgugacccacagcgugaaccugcuggaggacaagcacaacggcaagcugugcaagcugagaggcguggccccccugcaccugggcaagugcaacaucgccggcuggauccugggcaaccccgagugcgagagccugagcaccgccagcagcuggagcuacaucguggagaccagcagcagcgacaacggcaccugcuaccccggcgacuucaucgacuacgaggagcugagagagcagcugagcagcgugagcagcuucgagagauucgagaucuuccccaagaccagcagcuggcccaaccacgacagcaacaagggcgugaccgccgccugcccccacgccggcgccaagagcuucuacaagaaccugaucuggcuggugaagaagggcaacagcuaccccaagcugagcaagagcuacaucaacgacaagggcaaggaggugcuggugcuguggggcauccaccaccccagcaccagcgccgaccagcagagccuguaccagaacgccgacgccuacguguucgugggcaccagcagauacagcaagaaguucaagcccgagaucgccaucagacccaaggugagagaccaggagggcagaaugaacuacuacuggacccugguggagcccggcgacaagaucaccuucgaggccaccggcaaccugguggugcccagauacgccuucgccauggagaagaacgccggcagcggcaucaucaucagcgacacccccgugcacgacugcaacaccaccugccagacccccaagggcgccaucaacaccagccugcccuuccagaacauccaccccaucaccaucggcaagugccccaaguacgugaagagcaccaagcugagacuggccaccggccugagaaacgugcccagcauccagagcagaggccuguucggcgccaucgccggcuucaucgagggcggcuggaccggcaugguggacggcugguacggcuaccaccaccagaacgagcagggcagcggcuacgccgccgaccugaagagcacccagaacgccaucgacgagaucaccaacaaggugaacagcgugaucgagaagaugaacacccaguucaccgccgugggcaaggaguucaaccaccuggagaagagaaucgagaaccugaacaagaagguggacgacggcuuccuggacaucuggaccuacaacgccgagcugcuggugcugcuggagaacgagagaacccuggacuaccacgacagcaacgugaagaaccuguacgagaaggugagaagccagcugaagaacaacgccaaggagaucggcaacggcugcuucgaguucuaccacaagugcgacaacaccugcauggagagcgugaagaacggcaccuacgacuaccccaaguacagcgaggaggccaagcugaacagagaggagaucaacggcgugaagcuggagagcaccagaaucuaccagauccuggccaucuacagcaccguggccagcagccuggugcugguggugagccugggcgccaucagcuucuggaugugcagcaacggcagccugcagugcagaaucugcaucuga

SEQ ID NO: 165665 - RNA, 1701 nt, Artificial Sequence
  derived and/or modified CDS sequence (opt4) from hemagglutinin__InfluenzaA__ADM14589
augaaggccauccugguggugcugcuguacaccuucgccaccgccaacgccgacacccugugcaucggcuaccacgccaacaacagcaccgacaccguggacaccgugcuggagaagaacgugaccgugacccacagcgugaaccugcuggaggacaagcacaacggcaagcugugcaagcugagaggcguggccccccugcaccugggcaagugcaacaucgccggcuggauccugggcaaccccgagugcgagagccugagcaccgccagcagcuggagcuacaucguggagaccagcagcagcgacaacggcaccugcuaccccggcgacuucaucgacuacgaggagcugagagagcagcugagcagcgugagcagcuucgagagauucgagaucuuccccaagaccagcagcuggcccaaccacgacagcaacaagggcgugaccgccgccugcccccacgccggcgccaagagcuucuacaagaaccugaucuggcuggugaagaagggcaacagcuaccccaagcugagcaagagcuacaucaacgacaagggcaaggaggugcuggugcuguggggcauccaccaccccagcaccagcgccgaccagcagagccuguaccagaacgccgacgccuacguguucgugggcaccagcagauacagcaagaaguucaagcccgagaucgccaucagacccaaggugagagaccaggagggcagaaugaacuacuacuggacccugguggagcccggcgacaagaucaccuucgaggccaccggcaaccugguggugcccagauacgccuucgccauggagaagaacgccggcagcggcaucaucaucagcgacacccccgugcacgacugcaacaccaccugccagacccccaagggcgccaucaacaccagccugcccuuccagaacauccaccccaucaccaucggcaagugccccaaguacgugaagagcaccaagcugagacuggccaccggccugagaaacgugcccagcauccagagcagaggccuguucggcgccaucgccggcuucaucgagggcggcuggaccggcaugguggacggcugguacggcuaccaccaccagaacggccagggcagcggcuacgccgccgaccugaagagcacccagaacgccaucgacgagaucaccaacaaggugaacagcgugaucgagaagaugaacacccaguucaccgccgugggcaaggaguucaaccaccuggagaagagaaucgagaaccugaacaagaagguggacgacggcuuccuggacaucuggaccuacaacgccgagcugcuggugcugcuggagaacgagagaacccuggacuaccacgacagcaacgugaagaaccuguacgagaaggugagaagccagcugaagaacaacgccaaggagaucggcaacggcugcuucgaguucuaccacaagugcgacaacaccugcauggagagcgugaagaacggcaccuacgacuaccccaaguacagcgaggaggccaagcugaacagagaggagaucaacggcgugaagcuggagagcaccagaaucuaccagauccuggccaucuacagcaccguggccagcagccuggugcugguggugagccugggcgccaucagcuucuggaugugcagcaacggcagccugcagugcagaaucugcaucuga

SEQ ID NO: 165666 - RNA, 1701 nt, Artificial Sequence
  derived and/or modified CDS sequence (opt4) from hemagglutinin__InfluenzaA__ADM14599
augaaggccauccugguggugcugcuguacaccuucgccaccgccaacgccgacacccugugcaucggcuaccacgccaacaacagcaccgacaccguggacaccgugcuggagaagaacgugaccgugacccacagcgugaaccugcuggaggacaagcacaacggcaagcugugcaagcugagaggcguggccccccugcaccugggcaagugcaacaucgccggcuggauccugggcaaccccgagugcgagagccugagcaccgccagcagcuggagcuacaucguggagaccagcagcagcgacaacggcaccugcuaccccggcgacuucaucgacuacgaggagcugagagagcagcugagcagcgugagcagcuucgagagauucgagaucuuccccaagaccagcagcuggcccaaccacgacagcaacaagggcgugaccgccgccugcccccacgccggcgccaagagcuucuacaagaaccugaucuggcuggugaagaagggcaacagcuaccccaagcugagcaagagcuacaucaacgacaagggcaaggaggugcuggugcuguggggcauccaccaccccagcaccagcgccgaccagcagagccuguaccagaacgccgacgccuacguguucgugggcaccagcagauacagcaagaaguucaagcccgagaucgugaucagacccaaggugagagaccaggagggcagaaugaacuacuacuggacccugguggagcccggcgacaagaucaccuucgaggccaccggcaaccugguggugcccagauacgccuucgccauggagagaaacgccggcagcggcaucaucaucagcgacacccccgugcacgacugcaacaccaccugccagacccccaagggcgccaucaacaccagccugcccuuccagaacauccaccccaucaccaucggcaagugccccaaguacgugaagagcaccaagcugagacuggccaccggccugagaaacgugcccagcauccagagcagaggccuguucggcgccaucgccggcuucaucgagggcggcuggaccggcaugguggacggcugguacggcuaccaccaccagaacgagcagggcagcggcuacgccgccgaccugaagagcacccagaacgccaucgacgagaucaccaacaaggugaacagcgugaucgagaagaugaacacccaguucaccgccgugggcaaggaguucaaccaccuggagaagagaaucgagaaccugaacaagaagguggacgacggcuuccuggacaucuggaccuacaacgccgagcugcuggugcugcuggagaacgagagaacccuggacuaccacgacagcaacgugaagaaccuguacgagaaggugagaagccagcugaagaacaacgccaaggagaucggcaacggcugcuucgaguucuaccacaagugcgacaacaccugcauggagagcgugaagaacggcaccuacgacuaccccaaguacagcgaggaggccaagcugaacagagaggagaucgacggcgugaagcuggagagcaccagaaucuaccagauccuggccaucuacagcaccguggccagcagccuggugcugguggugagccugggcgccaucagcuucuggaugugcagcaacggcagccugcagugcagaaucugcaucuga

SEQ ID NO: 165667 - RNA, 1701 nt, Artificial Sequence; identical to SEQ ID NO: 163889
  derived and/or modified CDS sequence (opt4) from hemagglutinin__InfluenzaA__ADM14609

SEQ ID NO: 165668 - RNA, 1701 nt, Artificial Sequence
  derived and/or modified CDS sequence (opt4) from hemagglutinin__InfluenzaA__ADM14618
augaaggccauccugguggugcugcuguacaccuucgccaccgccaacgccgacacccugugcaucggcuaccacgccaacaacagcaccgacaccguggacaccgugcuggagaagaacgugaccgugacccacagcgugaaccugcuggaggacaagcacaacggcaagcugugcaagcugagaggcguggccccccugcaccugggcaagugcaacaucgccggcuggauccugggcaaccccgagugcgagagccugagcaccgccagcagcuggagcuacaucguggagaccagcagcagcgacaacggcaccugcuaccccggcgacuucaucgacuacgaggagcugagagagcagcugagcagcgugagcagcuucgagagauucgagaucuuccccaagaccagcagcuggcccaaccacgacagcaacaagggcgugaccgccgccugcccccacgccggcgccaagagcuucuacaagaaccugaucuggcuggugaagaagggcaacagcuaccccaagcugagcaagagcuacaucaacgacaagggcaaggaggugcuggugcuguggggcauccaccaccccagcaccagcgccgaccagcagagccuguaccagaacgccgacgccuacguguucgugggcaccagcagauacagcaagaaguucaagcccgagaucgccaucagacccaaggugagagaccaggagggcagaaugaacuacuacuggacccugguggagcccggcgacaagaucaccuucgaggccaccggcaaccugguggugcccagauacgccuucgccauggagagaaacgccggcagcggcaucaucaucagcgacacccccgugcacgacugcaacaccaccugccagacccccaagggcgccaucaacaccagccugcccuuccagaacaaccaccccaucaccaucggcaagugccccaaguacgugaagagcaccaagcugagacuggccaccggccugagaaacgugcccagcauccagagcagaggccuguucggcgccaucgccggcuucaucgagggcggcuggaccggcaugguggacggcugguacggcuaccaccaccagaacgagcagggcagcggcuacgccgccgaccugaagagcacccagaacgccaucgacgagaucaccaacaaggugaacagcgugaucgagaagaugaacacccaguucaccgccgugggcaaggaguucaaccaccuggagaagagaaucgagaaccugaacaagaagguggacgacggcuuccuggacaucuggaccuacaacgccgagcugcuggugcugcuggagaacgagagaacccuggacuaccacgacagcaacgugaagaaccuguacgagaaggugagaagccagcugaagaacaacgccaaggagaucggcaacggcugcuucgaguucuaccacaagugcgacaacaccugcauggagagcgugaagaacggcaccuacgacuaccccaaguacagcgaggaggccaagcugaacagagaggagaucgacggcgugaagcuggagagcaccagaaucuaccagauccuggccaucuacagcaccguggccagcagccuggugcugguggugagccugggcgccaucagcuucuggaugugcagcaacggcagccugcagugcagaaucugcaucuga

SEQ ID NO: 165669 - RNA, 1701 nt, Artificial Sequence; identical to SEQ ID NO: 162729
  derived and/or modified CDS sequence (opt4) from hemagglutinin__InfluenzaA__ADM14627

SEQ ID NO: 165670 - RNA, 1701 nt, Artificial Sequence
  derived and/or modified CDS sequence (opt4) from hemagglutinin__InfluenzaA__ADM14655
augaaggccauccugguggugcugcuguacaccuucgccaccgccaacgccgacacccugugcaucggcuaccacgccaacaacagcaccgacaccguggacaccgugcuggagaagaacgugaccgugacccacagcgugaaccugcuggaggacaagcacaacggcaagcugugcaagcugagaggcguggccccccugcaccugggcaagugcaacaucgccggcuggauccugggcaaccccgagugcgagagccugagcaccgccagcagcuggagcuacaucguggagaccagcagcagcgacaacggcaccugcuaccccggcgacuucaucgacuacgaggagcugagagagcagcugagcagcgugagcagcuucgagagauucgagaucuuccccaagaccagcagcuggcccaaccacgacagcaacaagggcgugaccgccgccugcccccacgccggcgccaagagcuucuacaagaaccugaucuggcuggugaagaagggcaacagcuaccccaagcugagcaagagcuacaucaacgacaagggcaaggaggugcuggugcuguggggcauccaccaccccagcaccagcgccgaccagcagagccuguaccagaacgccgacgccuacguguucgugggcaccagcagauacagcaagaaguucaagcccgagaucgccaucagacccaaggugagagaccaggagggcagaaugaacuacuacuggacccugguggagcccggcgacaagaucaccuucgaggccaccggcaaccugguggugcccagauacgccuucgccauggagagaaacgccggcagcggcaucaucaucagcgacacccccgugcacgacugcaacaccaccugccagacccccaagggcgccaucaacaccagccugcccuuccagaacauccaccccaucaccaucggcaagugccccaaguacgugagaagcaccaagcugagacuggccaccggccugagaaacgugcccagcauccagagcagaggccuguucggcgccaucgccggcuucaucgagggcggcuggaccggcaugguggacggcugguacggcuaccaccaccagaacgagcagggcagcggcuacgccgccgaccugaagagcacccagaacgccaucgacgagaucaccaacaaggugaacagcgugaucgagaagaugaacacccaguucaccgccgugggcaaggaguucaaccaccuggagaagagaaucgagaaccugaacaagaagguggacgacggcuuccuggacaucuggaccuacaacgccgagcugcuggugcugcuggagaacgagagaacccuggacuaccacgacagcaacgugaagaaccuguacgagaaggugagaagccagcugaagaacaacgccaaggagaucggcaacggcugcuucgaguucuaccacaagugcgacaacaccugcauggagagcgugaagaacggcaccuacgacuaccccaaguacagcgaggaggccaagcugaacagagaggagaucgacggcgugaagcuggagagcaccagaaucuaccagauccuggccaucuacagcaccguggccagcagccuggugcugguggugagccugggcgccaucagcuucuggaugugcagcaacggcagccugcagugcagaaucugcaucuga

SEQ ID NO: 165671 - RNA, 1701 nt, Artificial Sequence
  derived and/or modified CDS sequence (opt4) from hemagglutinin__InfluenzaA__ADM14664
augaaggccauccugguggugcugcuguacaccuucgccaccgccaacgccgacacccugugcaucggcuaccacgccaacaacagcaccgacaccguggacaccgugcuggagaagaacgugaccgugacccacagcgugaaccugcuggaggacaagcacaacggcaagcugugcaagcugagaggcguggccccccugcaccugggcaagugcaacaucgccggcuggauccugggcaaccccgagugcgagagccugagcaccgccagcagcuggagcuacaucguggagaccagcagcagcgacaacggcaccugcuaccccggcgacuucaucgacuacgaggagcugagagagcagcugagcagcgugagcagcuucgagagauucgagaucuuccccaagaccagcagcuggcccaaccacgacagcaacaagggcgugaccgccgccugcccccacgccggcgccaagagcuucuacaagaaccugaucuggcuggugaagaagggcaacagcuaccccaagcugagcaagagcuacaucaacgacaagggcaaggaggugcuggugcuguggggcauccaccaccccagcaccagcgccgaccagcagagccuguaccagaacgccgacgccuacguguucgugggcaccagcagauacagcaagaaguucaagcccgagaucgccaucagacccaaggugagagaccaggagggcagaaugaacuacuacuggacccugguggagcccggcgacaagaucaccuucgaggccaccggcaaccugguggugcccagauacgccuucgccauggagagaaacgccggcagcggcaucaucaucagcgacacccccgugcacgacugcaacaccaccugccagacccccaacggcgccaucaacaccagccugcccuuccagaacauccaccccaucaccaucggcaagugccccaaguacgugaagagcaccaagcugagacuggccaccggccugagaaacauccccagcauccagagcagaggccuguucggcgccaucgccggcuucaucgagggcggcuggaccggcaugguggacggcugguacggcuaccaccaccagaacgagcagggcagcggcuacgccgccgaccugaagagcacccagaacgccaucgacgagaucaccaacaaggugaacagcgugaucgagaagaugaacacccaguucaccgccgugggcaaggaguucaaccaccuggagaagagaaucgagaaccugaacaagaagguggacgacggcuuccuggacaucuggaccuacaacgccgagcugcuggugcugcuggagaacgagagaacccuggacuaccacgacagcaacgugaagaaccuguacgagaaggugagaagccagcugaagaacaacgccaaggagaucggcaacggcugcuucgaguucuaccacaagugcgacaacaccugcauggagagcgugaagaacggcaccuacgacuaccccaaguacagcgaggaggccaagcugaacagagaggagaucgacggcgugaagcuggagagcaccagaaucuaccagauccuggccaucuacagcaccguggccagcagccuggugcugguggugagccugggcgccaucagcuucuggaugugcagcaacggcagccugcagugcagaaucugcaucuga

SEQ ID NO: 165672 - RNA, 1701 nt, Artificial Sequence; identical to SEQ ID NO: 162729
  derived and/or modified CDS sequence (opt4) from hemagglutinin__InfluenzaA__ADM14673

SEQ ID NO: 165673 - RNA, 1701 nt, Artificial Sequence; identical to SEQ ID NO: 162729
  derived and/or modified CDS sequence (opt4) from hemagglutinin__InfluenzaA__ADM14682

SEQ ID NO: 165674 - RNA, 1701 nt, Artificial Sequence; identical to SEQ ID NO: 162729
  derived and/or modified CDS sequence (opt4) from hemagglutinin__InfluenzaA__ADM14691

SEQ ID NO: 165675 - RNA, 1701 nt, Artificial Sequence; identical to SEQ ID NO: 163893
  derived and/or modified CDS sequence (opt4) from hemagglutinin__InfluenzaA__ADM14700

SEQ ID NO: 165676 - RNA, 1695 nt, Artificial Sequence
  derived and/or modified CDS sequence (opt4) from hemagglutinin__InfluenzaA__ADM14709
augaaggccauccugguggugcugcuguacaccuucgccaccgccaacgccgacacccugugcaucggcuaccacgccaacaacagcaccgacaccguggacaccgugcuggagaagaacgugaccgugacccacagcgugaaccugcuggaggacaagcacaacggcaagcugugcaagcugagaggcguggccccccugcaccugggcaagugcaacaucgccggcuggauccugggcaaccccgagugcgagagccugagcaccgccagcagcuggagcuacaucguggagaccagcagcagcgacaacggcaccugcuaccccggcgacuucaucgacuacgaggagcugagagagcagcugagcagcgugagcagcuucgagagauucgagaucuuccccaagaccaacagcuggcccaaccacgacagcaacaagggcgugaccgccgccugcccccacgccggcgccaagagcuucuacaagaaccugaucuggcuggugaagaagggcaacagcuaccccaagcugagcaagagcuacaucaacgacaagggcaaggaggugcuggugcuguggggcauccaccaccccagcaccagcgccgaccagcagagccuguaccagaacgccgacgccuacguguucgugggcaccagcaaguacagcaagaaguucaagcccgagaucgccaucagacccaaggugagagaccaggagggcagaaugaacuacuacuggacccugguggagcccggcgacaagaucaccuucgaggccaccggcaaccugguggugcccagauacgccuucgccauggagagaaacgccggcagcggcaucaucaucagcgacacccccgugcacgacugcaacaccaccugccagacccccaagggcgccaucaacaccagccugcccuuccagaacauccaccccaucaccaucggcaagugccccaaguacgugaagagcaccaagcugagacuggccaccggccugagaaacgugcccagcauccagagcagaggccuguucggcgccaucgccggcuucaucgagggcggcuggaccggcaugguggacggcugguacggcuaccaccaccagaacgagcagggcagcggcuacgccgccgaccugaagagcacccagaacgccaucgacggcaucaccaacaagaucaacagcgugaucgagaagaugaacacccaguucaccgccgugggcaaggaguucaaccaccuggagaagagaaucgagaaccugaacaagaagguggacgacggcuuccuggacaucuggaccuacaacgccgagcugcuggugcugcuggagaacgagagaacccugaacuaccacgacagcaacgugaagaaccuguacgagaaggugagaagccagcugaagaacaacgccaaggagaucggcaacggcugcuucgaguucuaccacaagugcgacaacaccugcauggagagcgugaagaacggcaccuacgacuaccccaaguacagcgaggaggccaagcugaacagagaggagaucgacggcgugaagcuggagagcaccagaaucuaccagauccuggccaucuacagcaccguggccagcagccuggugcugguggugagccugggcgccaucagcuucuggaugugcagcggccacagcugcagaaucugcaucuga

SEQ ID NO: 165677 - RNA, 1701 nt, Artificial Sequence
  derived and/or modified CDS sequence (opt4) from hemagglutinin__InfluenzaA__ADM14718
augaaggccauccugguggugcugcuguacaccuucgccaccgccaacgccgacacccugugcaucggcuaccacgccaacaacagcaccgacaccguggacaccgugcuggagaagaacgugaccgugacccacagcgugaaccugcuggaggacaagcacaacggcaagcugugcaagcugagaggcguggccccccugcaccugggcaagugcaacaucgccggcuggauccugggcaaccccgagugcgagagccugagcaccgccagcagcuggagcuacaucguggagaccagcagcagcgacaacggcaccugcuaccccggcgacuucaucgacuacgaggagcugagagagcagcugagcagcaugagcagcuucgagagauucgagaucuuccccaagaccagcagcuggcccaaccacgacagcaacaagggcgugaccgccgccugcccccacgccggcgccaagagcuucuacaagaaccugaucuggcuggugaagaagggcaacagcuaccccaagcugagcaagagcuacaucaacgacaagggcaaggaggugcuggugcuguggggcauccaccaccccagcaccagcgccgaccagcagagccuguaccagaacgccgacgccuacguguucgugggcaccagcagauacagcaagaaguucaagcccgagaucgccaucagacccaaggugagagaccaggagggcagaaugaacuacuacuggacccugguggagcccggcgacaagaucaccuucgaggccaccggcaaccugguggugcccagauacgccuucgccauggagagaaacgccggcagcggcaucaucaucagcgacacccccgugcacgacugcaacaccaccugccagacccccaagggcgccaucaacaccagccugcccuuccagaacauccaccccaucaccaucggcaagugccccaaguacgugaagagcaccaagcugagacuggccaccggccugagaaacgugcccagcauccagagcagaggccuguucggcgccaucgccggcuucaucgagggcggcuggaccggcaugguggacggcugguacggcuaccaccaccagaacgagcagggcagcggcuacgccgccgaccugaagagcacccagaacgccaucgacaagaucaccaacaaggugaacagcgugaucgagaagaugaacacccaguucaccgccgugggcaaggaguucaaccaccuggagaagagaaucgagaaccugaacaagaagguggacgacggcuuccuggacaucuggaccuacaacgccgagcugcuggugcugcuggagaacgagagaacccuggacuaccacgacagcaacgugaagaaccuguacgagaaggugagaagccagcugaagaacaacgccaaggagaucggcaacggcugcuucgaguucuaccacaagugcgacaacaccugcauggagagcgugaagaacggcaccuacgacuaccccaaguacagcgaggaggccaagcugaacagagaggagaucgacggcgugaagcuggagagcaccagaaucuaccagauccuggccaucuacagcaccguggccagcagccuggugcugguggugagccugggcgccaucagcuucuggaugugcagcaacggcagccugcagugcagaaucugcaucuga

SEQ ID NO: 165678 - RNA, 1695 nt, Artificial Sequence
  derived and/or modified CDS sequence (opt4) from hemagglutinin__InfluenzaA__ADM14728
augaaggccauccugguggugcugcuguacaccuucgccaccgccaacgccgacacccugugcaucggcuaccacgccaacaacagcaccgacaccguggacaccgugcuggagaagaacgugaccgugacccacagcgugaaccugcuggaggacaagcacaacggcaagcugugcaagcugagaggcguggccccccugcaccugggcaagugcaacaucgccggcuggauccugggcaaccccgagugcgagagccugagcaccgccagcagcuggagcuacaucguggagaccagcagcagcgacaacggcaccugcuaccccggcgacuucaucgacuacgaggagcugagagagcagcugagcagcgugagcagcuucgagagauucgagaucuuccccaagaccagcagcuggcccaaccacgacagcaacaagggcgugaccgccgccugcccccacgccggcgccaagagcuucuacaagaaccugaucuggcuggugaagaagggcaacagcuaccccaagcugagcaacagcuacaucaacgacaagggcaaggaggugcuggugcuguggggcauccaccaccccagcaccagcgccgaccagcagagccuguaccagaacgccgacgccuacguguucgugggcaccagcagauacagcaagaaguucaagcccgagaucgccaucagacccaaggugagagaccaggagggcagaaugaacuacuacuggacccugguggagcccggcgacaagaucaccuucgaggccaccggcaaccugguggugcccagauacgccuucgccauggagagaaacgccggcagcggcaucaucaucagcgacacccccgcccacgacugcaacaccaccugccagacccccaagggcgccaucaacaccagccugcccuuccagaacauccaccccaucaccaucggcaagugccccaaguacgugaagagcaccaagcugagacuggccaccggccugagaaacgugcccagcauccagagcagaggccuguucggcgccaucgccggcuucaucgagggcggcuggaccggcaugguggacggcugguacggcuaccaccaccagaacgagcagggcagcggcuacgccgccgaccugaagagcacccagaacgccaucgacgagaucaccaacaaggugaacagcgugaucgagaagaugaacacccaguucaccgccgugggcaaggaguucaaccaccuggagaagagaaucgagaaccugaacaagaagguggacgacggcuuccuggacaucuggaccuacaacgccgagcugcuggugcugcuggagaacgagagaacccuggacuaccacgacagcaacgugaagaaccuguacgagaaggugagaagccagcugaagaacaacgccaaggagaucggcaacggcugcuucgaguucuaccacaagugcgacaacaccugcauggagagcgugaagaacggcaccuacgacuaccccaaguacagcgaggaggccaagcugaacagagaggagaucgacggcgugaagcuggagagcaccagaaucuaccagauccuggccaucuacagcaccguggccagcagccuggugcugguggugagccugggcgccaucagcuucuggaugugcagcggccacagcugcagaaucugcaucuga

SEQ ID NO: 165679 - RNA, 1701 nt, Artificial Sequence
  derived and/or modified CDS sequence (opt4) from hemagglutinin__InfluenzaA__ADM14737
augaaggccauccugguggugcugcuguacaccuucgccaccgccaacgccgacacccugugcaucggcuaccacgccaacaacagcaccgacaccgugaacaccgugcuggagaagaacgugaccgugacccacagcgugaaccugcuggaggacaagcacaacggcaagcugugcaagcugagaggcguggccccccugcaccugggcaagugcaacaucgccggcuggauccugggcaaccccgagugcgagagccugagcaccgccagcagcuggagcuacaucguggagaccagcagcagcgacaacggcaccugcuaccccggcgacuucaucgacuacgaggagcugagagagcagcugagcagcgugagcagcuucgagagauucgagaucuuccccaagaccagcagcuggcccaaccacgacagcaacaagggcgugaccgccgccugcccccacgccggcgccaagagcuucuacaagaaccugaucuggcuggugaagaagggcaacagcuaccccaagcugagcaagagcuacaucaacgacaagggcaaggaggugcuggugcuguggggcauccaccaccccagcaccagcgccgaccagcagagccuguaccagaacgccgacgccuacguguucgugggcaccagcagauacagcaagaaguucaagcccgagaucgccaucagacccaaggugagagaccaggagggcagaaugaacuacuacuggacccugguggagcccggcgacaagaucaccuucgaggccaccggcaaccugguggugcccagauacgccuucgccauggagaagaacgccggcagcggcaucaucaucagcgacacccccgugcacgacugcaacaccaccugccagacccccaagggcgccaucaacaccagccugcccuuccagaacauccaccccaucaccaucggcaagugccccaaguacgugaagagcaccaagcugagacuggccaccggccugagaaacgugcccagcauccagagcagaggccuguucggcgccaucgccggcuucaucgagggcggcuggaccggcaugguggacggcugguacggcuaccaccaccagaacgagcagggcagcggcuacgccgccgaccugaagagcacccagaacgccaucgacgagaucaccaacaaggugaacagcgugaucgagaagaugaacacccaguucaccgccgugggcaaggaguucaaccaccuggagaagagaaucgagaaccugaacaagaagguggacgacggcuuccuggacaucuggaccuacaacgccgagcugcuggugcugcuggagaacgagagaacccuggacuaccacgacagcaacgugaagaaccuguacgagaaggugagaagccagcugaagaacaacgccaaggagaucggcaacggcugcuucgaguucuaccacaagugcgacaacaccugcauggagagcgugaagaacggcaccuacgacuaccccaaguacagcgaggaggccaagcugaacagagaggagaucgacggcgugaagcuggagagcaccagaaucuaccagauccuggccaucuacagcaccguggccagcagccuggugcugguggugagccugggcgccaucagcuucuggaugugcagcaacggcagccugcagugcagaaucugcaucuga

SEQ ID NO: 165680 - RNA, 1701 nt, Artificial Sequence
  derived and/or modified CDS sequence (opt4) from hemagglutinin__InfluenzaA__ADM14746
augaaggccauccugguggugcugcuguacaccuucgccaccgccaacgccgacacccugugcaucggcuaccacgccaacaacagcaccgacaccguggacaccgugcuggagaagaacgugaccgugacccacagcgugaaccugcuggaggacaagcacaacggcaagcugugcaagcugagaggcguggccccccugcaccugggcaagugcaacaucgccggcugggugcugggcaaccccgagugcgagagccugagcaccgccagcagcuggagcuacaucguggagacccccagcagcgacaacggcaccugcuaccccggcgacuucaucgacuacgaggagcugagagagcagcugagcagcgugagcagcuucgagagauucgagaucuuccccaagaccagcagcuggcccaaccacgacagcaacaagggcgugaccgccgccugcccccacgccggcgccaagagcuucuacaagaaccugaucuggcuggugaagaagggcaacagcuaccccaagcugagcaagagcuacaucaacgacaagggcaaggaggugcuggugcuguggggcauccaccaccccagcaccagcgccgaccagcagagccuguaccagaacgccgacgccuacguguucgugggcaccagcagauacagcaagaaguucaagcccgagaucgccaucagacccaaggugagagaccaggagggcagaaugaacuacuacuggacccugguggagcccggcgacaagaucaccuucgaggccaccggcaaccugguggugcccagauacgccuucgccauggagagaaacgccggcagcggcaucaucaucagcgacacccccgugcacgacugcaacaccaccugccagacccccaagggcgccaucaacaccagccugcccuuccagaacauccaccccaucaccaucggcaagugccccaaguacgugaagagcaagaagcugagacuggccaccggccugagaaacgugcccagcauccagagcagaggccuguucggcgccaucgccggcuucaucgagggcggcuggaccggcaugguggacggcugguacggcuaccaccaccagaacgagcagggcagcggcuacgccgccgaccugaagagcacccagaacgccaucgacgagaucaccaacaaggugaacagcgugaucgagaagaugaacacccaguucaccgccgugggcaaggaguucaaccaccuggagaagagaaucgagaaccugaacaagaagguggacgacggcuuccuggacaucuggaccuacaacgccgagcugcuggugcugcuggagaacgagagaacccuggacuaccacgacagcaacgugaagaaccuguacgagaaggugagaagccagcugaagaacaacgccaaggagaucggcaacggcugcuucgaguucuaccacaagugcgacaacaccugcauggagagcgugaagaacggcaccuacgacuaccccaaguacagcgaggaggccaagcugaacagagaggagaucgacggcgugaagcuggagagcaccagaaucuaccagauccuggccaucuacagcaccguggccagcagccuggugcugguggugagccugggcgccaucagcuucuggaugugcagcaacggcagccugcagugcagaaucugcaucuga

SEQ ID NO: 165681 - RNA, 1695 nt, Artificial Sequence
  derived and/or modified CDS sequence (opt4) from hemagglutinin__InfluenzaA__ADM14756
augaaggccauccugguggugcugcuguacaccuucgccaccgccaacgccgacacccugugcgugggcuaccacgccaacaacagcaccgacaccguggacaccgugcuggagaagaacgugaccgugacccacagcgugaaccugcuggaggacaagcacaacggcaagcugugcaagcugagaggcguggccccccugcaccugggcaagugcaacaucgccggcuggauccugggcaaccccgagugcgagagccugagcaccgccagcagcuggagcuacaucguggagaccagcagcagcgacaacggcaccugcuaccccggcgacuucaucgacuacgaggagcugagagagcagcugagcagcgugagcagcuucgagagauucgagaucuuccccaagaccagcagcuggcccaaccacgacagcaacaagggcgugaccgccgccugcccccacgccggcgccaagagcuucuacaagaaccugaucuggcuggugaagaagggcaacagcuaccccaagcugagcaagagcuacaucaacgacaagggcaaggaggugcuggugcuguggggcauccaccaccccagcaccagcgccgaccagcagagccuguaccagaacgccgacgccuacguguucgugggcaccagcagauacagcaagaaguucaagcccgagaucgccaucagacccaaggugagagaccaggagggcagaaugaacuacuacuggacccugguggagcccggcgacaagaucaccuucgaggccaccggcaaccugguggugcccagauacgccuucgccauggagagaaacgccggcagcggcaucaucaucagcgacacccccgugcacgacugcaacaccaccugccagacccccaagggcgccaucaacaccagccugcccuuccagaacauccaccccaucaccaucggcaagugccccaaguacgugaagagcaccaagcugagacuggccaccggccugagaaacgugcccagcauccagagcagaggccuguucggcgccaucgccggcuucaucgagggcggcuggaccggcaugguggacggcugguacggcuaccaccaccagaacgagcagggcagcggcuacgccgccgaccugaagagcacccagaacgccaucgacaagaucaccaacaaggugaacagcgugaucgagaagaugaacacccaguucaccgccgugggcaaggaguucaaccaccuggagaagagaaucgagaaccugaacaagaagguggacgacggcuuccuggacaucuggaccuacaacgccgagcugcuggugcugcuggagaacgagagaacccuggacuaccacgacagcaacgugaagaaccuguacgagaaggugagaagccagcugaagaacaacgccaaggagaucggcaacggcugcuucgaguucuaccacaagugcgacaacaccugcauggagagcgugaagaacggcaccuacgacuaccccaaguacagcgaggaggccaagcugaacagagaggagaucgacggcgugaagcuggagagcaccagaaucuaccagauccuggccaucuacagcaccguggccagcagccuggugcugguggugagccugggcgccaucagcuucuggaugugcagcggccacagcugcagaaucugcaucuga

SEQ ID NO: 165682 - RNA, 1701 nt, Artificial Sequence; identical to SEQ ID NO: 163893
  derived and/or modified CDS sequence (opt4) from hemagglutinin__InfluenzaA__ADM14765

SEQ ID NO: 165683 - RNA, 1695 nt, Artificial Sequence
  derived and/or modified CDS sequence (opt4) from hemagglutinin__InfluenzaA__ADM14775
augaaggccauccugguggugcugcuguacaccuucgccaccgccaacgccgacacccugugcaucggcuaccacgccaacaacagcaccgacaccguggacaccgugcuggagaagaacgugaccgugacccacagcgugaaccugcuggaggacaagcacaacggcaagcugugcaagcugagaggcguggccccccugcaccugggcaagugcaacaucgccggcuggauccugggcaaccccgagugcgagagccugagcaccgccagcagcuggagcuacaucguggagaccagcagcagcgacaacggcaccugcuaccccggcgacuucaucgacuacgaggagcugagagagcagcugagcagcgugagcagcuucgagagauucgagaucuuccccaagaccagcagcuggcccaaccacgacagcaacaagggcgugaccgccgccugcccccacgccggcgccaagagcuucuacaagaaccugaucuggcuggugaagaagggcaacagcuaccccaagcugaacaagagcuacaucaacgacaagggcaaggaggugcuggugcuguggggcauccaccaccccagcaccagcgccgaccagcagagccuguaccagaacgccgacgccuacguguucgugggcaccagcagauacagcaagaaguucaagcccgagaucgccaucagacccaaggugagagaccaggagggcagaaugaacuacuacuggacccugguggagcccggcgacaagaucaccuucgaggccaccggcaaccugguggugcccagauacgccuucgccauggagagaaacgccggcagcggcaucaucaucagcgacacccccgugcacgacugcaacaccaccugccagacccccaagggcgccaucaacaccagccugcccuuccagaacauccaccccaucaccaucggcgagugccccaaguacgugaagagcaccaagcugagacuggccaccggccugagaaacgugcccagcauccagagcagaggccuguucggcgccaucgccggcuucaucgagggcggcuggaccggcaugguggacggcugguacggcuaccaccaccagaacgagcagggcagcggcuacgccgccgaccugaagagcacccagaacgccaucgacaagaucaccaacaaggugaacagcgugaucgagaagaugaacacccaguucaccgccgugggcaaggaguucaaccaccuggagaagagaaucgagaaccugaacaagaagguggacgacggcuuccuggacaucuggaccuacaacgccgagcugcuggugcugcuggagaacgagagaacccuggacuaccacgacagcaacgugaagaaccuguacgagaaggugagaagccagcugaagaacaacgccaaggagaucggcaacggcugcuucgaguucuaccacaagugcgacaacaccugcauggagagcgugaagaacggcaccuacgacuaccccaaguacagcgaggaggccaagcugaacagagaggagaucgacggcgugaagcuggagagcaccagaaucuaccagauccuggccaucuacagcaccguggccagcagccuggugcugguggugagccugggcgccaucagcuucuggaugugcagcggccacagcugcagaaucugcaucuga

SEQ ID NO: 165684 - RNA, 1695 nt, Artificial Sequence
  derived and/or modified CDS sequence (opt4) from hemagglutinin__InfluenzaA__ADM14802
augaaggccauccugguggugcugcuguacaccuucgccaccgccaacgccgacacccugugcaucggcuaccacgccaacaacagcaccgacaccguggacaccgugcuggagaagaacgugaccgugacccacagcgugaaccugcuggaggacaagcacaacggcaagcugugcaagaucagaggcguggccccccugcaccugggcaagugcaacaucgccggcuggauccugggcaaccccgagugcgagagccugagcaccgccagcagcuggagcuacaucguggagaccagcagcagcgacaacggcaccugcuaccccggcgacuucaucgacuacgaggagcugagagagcagcugagcagcgugagcagcuucgagagauucgagaucuuccccaagaccagcagcuggcccaaccacgacagcaacaagggcgugaccgccgccugcccccacgccggcgccaagagcuucuacaagaaccugaucuggcuggugaagaagggcaacagcuaccccaagcugagcaagagcuacaucaacgacaagggcaaggaggugcuggugcuguggggcauccaccaccccagcaccagcgccgaccagcagagccuguaccagaacgccgacgccuacguguucgugggcaccagcagauacagcaagaaguucaagcccgagaucgccaucagacccaaggugagagaccaggagggcagaaugaacuacuacuggacccugguggagcccggcgacaagaucaccuucgaggccaccggcaaccugguggugcccagauacgccuucgccauggagagaaacgccggcagcggcaucaucaucagcgacacccccgugcacgacugcaacaccaccugccagacccccaagggcgccaucaacaccagccugcccuuccagaacauccaccccaucaccaucggcaagugccccaaguacgugaagagcaccaagcugagacuggccaccggccugagaaacgugcccagcauccagagcagaggccuguucggcgccaucgccggcuucaucgagggcggcuggaccggcaugguggacggcugguacggcuaccaccaccagaacgagcagggcagcggcuacgccgccgaccugaagagcacccagaacgccaucgacgagaucaccaacaaggugaacagcgugaucgagaagaugaacacccaguucaccgccgugggcaaggaguucaaccaccuggagaagagaaucgagaaccugaacaagaagguggacgacggcuuccuggacaucuggaccuacaacgccgagcugcuggugcugcuggagaacgagagaacccuggacuaccacgacagcaacgugaagaaccuguacgagaaggugagaagccagcugaagaacaacgccaaggagaucggcaacggcugcuucgaguucuaccacaagugcgacaacaccugcauggagagcgugaagaacggcaccuacgacuaccccaaguacagcgaggaggccaagcugaacagagaggagaucgacggcgugaagcuggagagcaccagaaucuaccagauccuggccaucuacagcaccguggccagcagccuggugcugguggugagccugggcgccaucagcuucuggaugugcagcggccacagcugcagaaucugcaucuga

SEQ ID NO: 165685 - RNA, 1704 nt, Artificial Sequence
  derived and/or modified CDS sequence (opt4) from hemagglutinin__InfluenzaA__ADM14830
augaaggccauccugguggugcugcuguacaccuucgccaccgccaacgccgacacccugugcaucggcuaccacgccaacaacagcaccgacaccguggacaccgugcuggagaagaacgugaccgugacccacagcgugaaccugcuggaggacaagcacaacggcaagcugugcaagcugagaggcguggccccccugcaccugggcaagugcaacaucgccggcuggauccugggcaaccccgagugcgagcugcugagcaccgccagcagcuggagcuacaucguggagaccagcagcagcgacaacggcaccugcuaccccggcgacuucaucgacuacgaggagcugagagagcagcugagcagcgugagcagcuucgagagauucgagaucuuccccaagaccagcagcuggcccaaccacgacagcaacaagggcgugaccgccgccugcccccacgccggcgccaagagcuucuacaagaaccugaucuggcuggugaagaagggcaacagcuaccccaagcugagcaagagcuacaucaacgacaagggcaaggaggugcuggugcuguggggcauccaccaccccagcaccagcgccgaccagcagagccuguaccagaacgccgacgccuacguguucgugggcaccagcagauacagcaagaaguucaagcccgagaucgccaucagacccaaggugagagaccaggagggcagaaugaacuacuacuggacccugguggagcccggcgacaagaucaccuucgaggccaccggcaaccugguggugcccagauacgccuucgccauggagagaaacgccgagagcggcaucaucaucagcgacacccccgugcacgacugcaacaccaccugccagacccccaagggcgccaucaacaccagccugcccuuccagaacauccaccccaucaccaucggcaagugccccaaguacgugaagagcaccaagcugagacuggccaccggccugagaaacgugcccagcauccagagcagaggccuguucggcgccaucgccggcuucaucgagggcggcuggaccggcaugguggacggcugguacggcuaccaccaccagaacgagcagggcagcggcuacgccgccgaccugaagagcacccagaacgccaucgacgagaucaccaacaaggugaacagcgugaucgagaagaugaacacccaguucaccgccgugggcaaggaguucaaccaccuggagaagagaaucgagaaccugaacaagaagguggacgacggcuuccuggacaucuggaccuacaacgccgagcugcuggugcugcuggagaacgagagaacccuggacuaccacgacagcaacgugaagaagcuguacgagaaggugagaagccagcugaagaacaacgccaaggagaucggcaacggcugcuucgaguucuaccacaagugcgacaacaccugcauggagagcgugaagaacggcaccuacgacuaccccaaguacagcgaggaggccaagcugaacagagaggagaucgacggcgugaagcuggagagcaccagaaucuaccagauccuggccaucuacagcaccguggccagcagccuggugcugguggugagccugggcgccaucagcuucuggaugugcagcggccacagcugccugcagugcagaaucugcaucuga

SEQ ID NO: 165686 - RNA, 1695 nt, Artificial Sequence
  derived and/or modified CDS sequence (opt4) from hemagglutinin__InfluenzaA__ADM14848
augaaggccauccugguggugcugcuguacaccuucgccaccgccaacgccgacacccugugcaucggcuaccacgccaacaacagcaccgacaccguggacaccgugcuggagaagaacgugaccgugacccacagcgugaaccugcuggaggacaagcacaacggcaagcugugcaagcugagaggcguggccccccugcaccugggcaagugcaacaucgccggcuggauccugggcaaccccgagugcgagagccugagcaccgccagcagcuggagcuacaucguggagaccagcagcagcgacaacggcaccugcuaccccggcgacuucaucgacuacgaggagcugagagagcagcugagcagcgugagcagcuucgagagauucgagaucuuccccaagaccagcagcuggcccaaccacgacagcaacaagggcgugaccgccgccugcccccacgccggcgccaagagcuucuacaagaaccugaucuggcuggugaagaagggcaacagcuaccccaagcugagcaagagcuacaucaacgacaagggcaaggaggugcuggugcuguggggcauccaccaccccagcaccagcgccgaccagcagagccuguaccagaacgccgacgccuacguguucgugggcagcagcagauacagcaagaaguucaagcccgagaucgccaucagacccaaggugagagaccaggagggcagaaugaacuacuacuggacccugguggagcccggcgacaagaucaccuucgaggccaccggcaaccugguggugcccagauacgccuucgccauggagagaaacgccggcagcggcaucaucaucagcgacacccccgugcacgacugcaacaccaccugccagacccccaagggcgccaucaacaccagccugcccuuccagaacauccaccccaucaccaucggcaagugccccaaguacgugaagagcaccaagcugagacuggccaccggccugagaaacgugcccagcauccagagcagaggccuguucggcgccaucgccggcuucaucgagggcggcuggaccggcaugguggacggcugguacggcuaccaccaccagaacgagcagggcagcggcuacgccgccgaccugaagagcacccagaacgccaucgacgagaucaccaacaaggugaacagcgugaucgagaagaugaacacccaguucaccgccgugggcaaggaguucaaccaccuggagaagagaaucgagaaccugaacaagaagguggacgacggcuuccuggacaucuggaccuacaacgccgagcugcuggugcugcuggagaacgagagaacccuggacuaccacgacagcaacgugaagaaccuguacgagaaggugagaagccagcugaagaacaacgccaaggagaucggcaacggcugcuucgaguucuaccacaagugcgacaacaccugcauggagagcgugaagaacggcaccuacgacuaccccaaguacagcgaggaggccaagcugaacagagaggagaucgacggcgugaagcuggagagcaccagaaucuaccagauccuggccaucuacagcaccguggccagcagccuggugcugguggugagccugggcgccaucagcuucuggaugugcagcggccacagcugcagaaucugcaucuga

SEQ ID NO: 165687 - RNA, 1695 nt, Artificial Sequence
  derived and/or modified CDS sequence (opt4) from hemagglutinin__InfluenzaA__ADM14866
augaaggccauccugguggugcugcuguacaccuucgccaccgccaacgccgacacccugugcaucggcuaccacgccaacaacagcaccgacaccguggacaccgugcuggagaagaacgugaccgugacccacagcgugaaccugcuggaggacaagcacaacggcaagcugugcaagcugagaggcguggccccccugcaccugggcaagugcaacaucgccggcuggauccugggcaaccccgagugcgagagccugagcaccgccagcagcuggagcuacaucguggagaccagcagcagcgacaacggcaccugcuaccccggcgacuucaucgacuacgaggagcugagagagcagcugagcagcgugagcagcuucgagagauucgagaucuuccccaagaccagcagcuggcccaaccacgacagcgacaagggcgugaccgccgccugcccccacgccggcgccaagagcuucuacaagaaccugaucuggcuggugaagaagggcaacagcuaccccaagcugagcaagagcuacaucaacgacaagggcaaggaggugcuggugcuguggggcauccaccaccccagcaccagcgccgaccagcagagccuguaccagaacgccgacgccuacguguucgugggcaccagcagauacagcaagaaguucaagcccgagaucgccaucagacccaaggugagagaccaggagggcagaaugaacuacuacuggacccugguggagcccggcgacaagaucaccuucgaggccaccggcaaccugguggugcccagauacgccuucgccauggagagaaacgccggcagcggcaucaucaucagcgacacccccgugcacgacugcaacaccaccugccagacccccaagggcgccaucaacaccagccugcccuuccagaacauccaccccaucaccaucggcaagugccccaaguacgugaagagcaucaagcugagacuggccaccggccugagaaacgugcccagcauccagagcagaggccuguucggcgccaucgccggcuucaucgagggcggcuggaccggcaugguggacggcugguacggcuaccaccaccagaacgagcagggcagcggcuacgccgccgaccugaagagcacccagaacgccaucgacgagaucaccaacaaggugaacagcgugaucgagaagaugaacacccaguucaccgccgugggcaaggaguucaaccaccuggagaagagaaucgagaaccugaacaagaagguggacgacggcuuccuggacaucuggaccuacaacgccgagcugcuggugcugcuggagaacgagagaacccuggacuaccacgacagcaacgugaagaaccuguacgagaaggugagaagccagcugaagaacaacgccaaggagaucggcaacggcugcuucgaguucuaccacaagugcgacaacaccugcauggagagcgugaagaacggcaccuacgacuaccccaaguacagcgaggaggccaagcugaacagagaggagaucgacggcgugaagcuggagagcaccagaaucuaccagauccuggccaucuacagcaccguggccagcagccuggugcugguggugagccugggcgccaucagcuucuggaugugcagcggccacagcugcagaaucugcaucuga

SEQ ID NO: 165688 - RNA, 1695 nt, Artificial Sequence
  derived and/or modified CDS sequence (opt4) from hemagglutinin__InfluenzaA__ADM14876
augaaggccauccugguggugcugcuguacaccuucgccaccgccaacgccgacacccugugcaucggcuaccacgccaacaacagcaccgacaccguggacaccgugcuggagaagaacgugaccgugacccacagcgugaaccugcuggaggacaagcacaacggcaagcugugcaagcugagaggcguggccccccugcaccugggcaagugcaacaucgccggcuggauccugggcaaccccgagugcgagagccugagcaccgccagcagcuggagcuacaucguggagaccagcagcagcgacaacggcaccugcuaccccggcgacuucaucgacuacgaggagcugagagagcagcugagcagcgugagcagcuucgagagauucgagaucuuccccaagaccagcagcuggcccaaccacgacagcaacaagggcgugaccgccgccugcccccacgccggcgccaagagcuucuacaagaaccugaucuggcuggugaagaagggcaacagcuaccccaagcugagcaagagcuacaucaacgacaaggagaaggaggugcuggugcuguggggcauccaccaccccagcaccagcgccgaccagcagagccuguaccagaacgccgacgccuacguguucgugggcaccagcagauacagcaagaaguucaagcccgagaucgccaucagacccaaggugagagaccaggagggcagaaugaacuacuacuggacccugguggagcccggcgacaagaucaccuucgaggccaccggcaaccugguggugcccagauacgccuucgccauggagagaaacgccggcagcggcaucaucaucagcgacacccccgugcacgacugcaacaccaccugccagacccccaagggcgccaucaacaccagccugcccuuccagaacauccaccccaucaccaucggcaagugccccaaguacgugaagagcaccaagcugagacuggccaccggccugagaaacgugcccagcauccagagcagaggccuguucggcgccaucgccggcuucaucgagggcggcuggaccggcaugguggacggcugguacggcuaccaccaccagaacgagcagggcagcggcuacgccgccgaccugaagagcacccagaacgccaucgacgagaucaccaacaaggugaacagcgugaucgagaagaugaacacccaguucaccgccgugggcaaggaguucaaccaccuggagaagagaaucgagaaccugaacaagaagguggacgacggcuuccuggacaucuggaccuacaacgccgagcugcuggugcugcuggagaacgagagaacccuggacuaccacgacagcaacgugaagaaccuguacgagaaggugagaagccagcugaagaacaacgccaaggagaucggcaacggcugcuucgaguucuaccacaagugcgacaacaccugcauggagagcgugaagaacggcaccuacgacuaccccaaguacagcgaggaggccaagcugaacagagaggagaucgacggcgugaagcuggagagcaccagaaucuaccagauccuggccaucuacagcaccguggccagcagccuggugcugguggugagccugggcgccaucagcuucuggaugugcagcggccacagcugcagaaucugcaucuga

SEQ ID NO: 165689 - RNA, 1704 nt, Artificial Sequence
  derived and/or modified CDS sequence (opt4) from hemagglutinin__InfluenzaA__ADM14885
augaaggccauccugguggugcugcuguacaccuucgccaccgccaacgccgacacccugugcaucggcuaccacgccaacaacagcaccgacaccguggacaccgugcuggagaagaacgugaccgugacccacagcgugaaccugcuggaggacaagcacaacggcaagcugugcaagcugagaggcguggccccccugcaccugggcaagugcaacaucgccggcuggauccugggcaaccccgagugcgagcugcugagcaccgccagcagcuggagcuacaucguggagaccagcagcagcgacaacggcaccugcuaccccggcgacuucaucgacuacgaggagcugagagagcagcugagcagcgugagcagcuucgagagauucgagaucuuccccaagaccagcagcuggcccaaccacgacagcaacaagggcgugaccgccgccugcccccacgccggcgccaagagcuucuacaagaaccugaucuggcuggugaagaagggcaacagcuaccccaagcugagcaagagcuacaucaacgacaaggagaaggaggugcuggugcuguggggcauccaccaccccagcaccagcgccgaccagcagagccuguaccagaacgccgacgccuacguguucgugggcaccagcagauacagcaagaaguucaagcccgagaucgugaucagacccaaggugagagaccaggagggcagaaugaacuacuacuggacccugguggagcccggcgacaagaucaccuucgaggccaccggcaaccugguggugcccagauacgccuucgccauggagagaaacgccgagagcggcaucaucaucagcgacacccccgugcacgacugcaacaccaccugccagacccccaagggcgccaucaacaccagccugcccuuccagaacauccaccccaucaccaucggcaagugccccaaguacgugaagagcaccaagcugagacuggccaccggccugagaaacgugcccagcauccagagcagaggccuguucggcgccaucgccggcuucaucgagggcggcuggaccggcaugguggacggcugguacggcuaccaccaccagaacgagcagggcagcggcuacgccgccgaccugaagagcacccagaacgccaucgacgagaucaccaacaaggugaacagcgugaucgagaagaugaacacccaguucaccgccgugggcaaggaguucaaccaccuggagaagagaaucgagaaccugaacaagaagguggacgacggcuuccuggacaucuggaccuacaacgccgagcugcuggugcugcuggagaacgagagaacccuggacuaccacgacagcaacgugaagaagcuguacgagaaggugagaagccagcugaagaacaacgccaaggagaucggcaacggcugcuucgaguucuaccacaagugcgacaacaccugcauggagagcgugaagaacggcaccuacgacuaccccaaguacagcgaggaggccaagcugaacagagaggagaucgacggcgugaagcuggagagcaccagaaucuaccagauccuggccaucuacagcaccguggccagcagccuggugcugguggugagccugggcgccaucagcuucuggaugugcagcggccacggcagccugcagugcagaaucugcaucuga

SEQ ID NO: 165690 - RNA, 1695 nt, Artificial Sequence
  derived and/or modified CDS sequence (opt4) from hemagglutinin__InfluenzaA__ADM14894
augaaggccauccugguggugcugcuguacaccuucgccaccgccaacgccgacacccugugcaucggcuaccacgccaacaacagcaccgacaccguggacaccgugcuggagaagaacgugaccgugacccacagcgugaaccugcuggaggacaagcacaacggcaagcugugcaagcugagaggcguggccccccugcaccugggcaagugcaacaucgccggcuggauccugggcaaccccgagugcgagagccugagcaccgccagcagcuggagcuacaucguggagaccagcagcagcgacaacggcaccugcuaccccggcgacuucaucgacuacgaggagcugagagagcagcugagcagcgugagcagcuucgagagauucgagaucuuccccaagaccagcagcuggcccaaccacgacagcaacaagggcgugaccgccgccugcccccacgccggcgccaagagcuucuacaagaaccugaucuggcuggugaagaagggcaacagcuaccccaagcugagcaagagcuacaucaacgacaaggagaaggaggugcuggugcuguggggcauccaccaccccagcaccagcgccgaccagcagagccuguaccagaacgccgacgccuacguguucgugggcaccagcagauacagcaagaaguucaagcccgagaucgugaucagacccaaggugagagaccaggagggcagaaugaacuacuacuggacccugguggagcccggcgacaagaucaccuucgaggccaccggcaaccugguggugcccagauacgccuucgccauggagagaaacgccggcagcggcaucgugaucagcgacacccccgugcacgacugcaacaccaccugccagacccccaagggcgccaucaacaccagccugcccuuccagaacauccaccccaucaccaucggcaagugccccaaguacgugaagagcaccaagcugagacuggccaccggccugagaaacgugcccagcauccagagcagaggccuguucggcgccaucgccggcuucaucgagggcggcuggaccggcaugguggacggcugguacggcuaccaccaccagaacgagcagggcagcggcuacgccgccgaccugaagagcacccagaacgccaucgacgagaucaccaacaaggugaacagcgugaucgagaagaugaacacccaguucaccgccgugggcaaggaguucaaccaccuggagaagagaaucgagaaccugaacaagaagguggacgacggcuuccuggacaucuggaccuacaacgccgagcugcuggugcugcuggagaacgagagaacccuggacuaccacgacagcaacgugaagaagcuguacgagaaggugagaagccagcugaagaacaacgccaaggagaucggcaacggcugcuucgaguucuaccacaagugcgacaacaccugcaugaagagcgugaagaacggcaccuacgacuaccccaaguacagcgaggaggccaagcugaacagagaggagaucgacggcgugaagcuggagagcaccagaaucuaccagauccuggccaucuacagcaccguggccagcagccuggugcugguggugagccugggcgccaucagcuucuggaugugcagcggccacagcugcagaaucugcaucuga

SEQ ID NO: 165691 - RNA, 1695 nt, Artificial Sequence
  derived and/or modified CDS sequence (opt4) from hemagglutinin__InfluenzaA__ADM14903
augaaggccauccugguggugcugcugugcaccuucgccaccgccaacgccgacacccugugcaucggcuaccacgccaacaacagcaccgacaccguggacaccgugcuggagaagaacgugaccgugacccacagcgugaaccugcuggaggacaagcacaacggcaagcugugcaagcugagaggcguggccccccugcaccugggcaagugcaacaucgccggcuggauccugggcaaccccgagugcgagagccugagcaccgccagcagcuggagcuacaucguggagaccagcagcagcgacaacggcaccugcuaccccggcgacuucaucgacuacgaggagcugagagagcagcugagcagcgugagcagcuucgagagauucgagaucuuccccaagaccagcagcuggcccaaccacgacagcaacaagggcgugaccgccgccugcccccacgccggcgccaagagcuucuacaagaaccugaucuggcuggugaagaagggcaacagcuaccccaagcugagcaagagcuacaucaacgacaagggcaaggaggugcuggugcuguggggcauccaccaccccagcaccagcgccgaccagcagagccuguaccagaacgccgacgccuacguguucgugggcaccagcagauacagcaagaaguucaagcccgagaucgccaucagacccaaggugagagaccaggagggcagaaugaacuacuacuggacccugguggagcccggcgacaagaucaccuucgaggccaccggcaaccugguggugcccagauacgccuucgccauggagagaaacgccggcagcggcaucaucaucagcgacacccccgugcacgacugcaacaccaccugccagacccccaagggcgccaucaacaccagccugcccuuccagaacauccaccccaucaccaucggcaagugccccaaguacgugaagagcaccaagcugagacuggccaccggccugagaaacgugcccagcauccagagcagaggccuguucggcgccaucgccggcuucaucgagggcggcuggaccggcaugguggacggcugguacggcuaccaccaccagaacgagcagggcagcggcuacgccgccgaccugaagagcacccagaacgccaucgacaagaucaccaacaaggugaacagcgugaucgagaagaugaacacccaguucaccgccgugggcaaggaguucaaccaccuggagaagagaaucgagaaccugaacaagaagguggacgacggcuuccuggacaucuggaccuacaacgccgagcugcuggugcugcuggagaacgagagaacccuggacuaccacgacagcaacgugaagaaccuguacgagaaggugagaagccagcugaagaacaacgccaaggagaucggcaacggcugcuucgaguucuaccacaagugcgacaacaccugcauggagagcgugaagaacggcaccuacgacuaccccaaguacagcgaggaggccaagcugaacagagaggagaucgacggcgugaagcuggagagcaccagaaucuaccagauccuggccaucuacagcaccguggccagcagccuggugcugguggugagccugggcgccaucagcuucuggaugugcagcggccacagcugcagaaucugcaucuga

SEQ ID NO: 165692 - RNA, 1695 nt, Artificial Sequence
  derived and/or modified CDS sequence (opt4) from hemagglutinin__InfluenzaA__ADM14912
augaaggccauccugguggugcugcuguacaccuucgccaccgccaacgccgacacccugugcaucggcuaccacgccaacaacagcaccgacaccguggacaccgugcuggagaagaacgugaccgugacccacagcgugaaccugcuggaggacaagcacaacggcaagcugugcaagcugagaggcguggccccccugcaccugggcaagugcaacaucgccggcuggauccugggcaaccccgagugcgagagccugagcaccgccagcagcuggagcuacaucguggagaccagcagcagcgacaacggcaccugcuaccccggcgacuucaucgacuacgaggagcugagagagcagcugagcagcgugagcagcuucgagagauucgagaucuuccccaagaccagcagcuggcccaaccacgacagcaacaagggcgugaccgccgccugcccccacgccggcgccaagagcuucuacaagaaccugaucuggcuggugaagaagggcaacagcuaccccaagcugagcaagagcuacaucaacgacaagggcaaggaggugcuggugcuguggggcauccaccaccccagcaccagcgccgaccagcagagccuguaccagaacgccgacgccuacguguucgugggcaccagcagauacagcaagaaguucaagcccgagaucgccaucagacccaaggugagagaccaggagggcagaaugaacuacuacuggacccugguggagcccggcgacaagaucaccuucgaggccaccggcaaccugguggugcccagauacgccuucgccauggagagaaacgccggcagcggcaucaucaucagcgacacccccgugcacgacugcaacaccaccugccagacccccgagggcgccaucaacaccagccugcccuuccagaacauccaccccaucaccaucggcaagugccccaaguacgugaagagcaccaagcugagacuggccaccggccugagaaacgugcccagcauccagagcagaggccuguucggcgccaucgccggcuucaucgagggcggcuggaccggcaugguggacggcugguacggcuaccaccaccagaacgagcagggcagcggcuacgccgccgaccugaagagcacccagaacgccaucgacgagaucaccaacaaggugaacagcgugaucgagaagaugaacacccaguucaccgccgugggcaaggaguucaaccaccuggagaagagaaucgagaaccugaacaagaagguggacgacggcuuccuggacaucuggaccuacaacgccgagcugcuggugcugcuggagaacgagagaacccuggacuaccacgacagcaacgugaagaaccuguacgagaaggugagaagccagcugaagaacaacgccaaggagaucggcaacggcugcuucgaguucuaccacaagugcgacaacaccugcauggagagcgugaagaacggcaccuacgacuaccccaaguacagcgaggaggccaagcugaacagagaggagaucgacggcgugaagcuggagagcaccagaaucuaccagauccuggccaucuacagcaccguggccagcagccuggugcugguggugagccugggcgccaucagcuucuggaugugcagcggccacagcugcagaaucugcaucuga

SEQ ID NO: 165693 - RNA, 1695 nt, Artificial Sequence
  derived and/or modified CDS sequence (opt4) from hemagglutinin__InfluenzaA__ADM14921
augaaggccauccugguggugcugcuguacaccuucgccaccgccaacgccgacacccugugcaucggcuaccacgccaacaacagcaccgacaccguggacaccgugcuggagaagaacgugaccgugacccacagcgugaaccugcuggaggacaagcacaacggcaagcugugcaagcugagaggcguggccccccugcaccugggcaagugcaacaucgccggcuggauccugggcaaccccgagugcgagagccugagcaccgccagcagcuggagcuacaucguggagaccagcagcagcgacaacggcaccugcuaccccggcgacuucaucgacuacgaggagcugagagagcagcugagcagcgugagcagcuucgagagauucgagaucuuccccaagaccagcagcuggcccaaccacgacagcaacaagggcgugaccgccgccugcccccacgccggcgccaagagcuucuacaagaaccugaucuggcuggugaagaagggcaacagcuaccccaagcugagcaagagcuacaucaacgacaagggcaaggaggugcuggugcuguggggcauccaccaccccagcaccagcgccgaccagcagagccuguaccagaacgccgacgccuacguguucgugggcaccagcagauacagcaagaaguucaagcccgagaucgccaucagacccaaggugagagaccaggagggcagaaugaacuacuacuggacccugguggagcccggcgacaagaucaccuucgaggccaccggcaaccugguggugcccagauacgccuucgccauggagagaaacgccggcagcggcaucaucaucagcgacacccccgugcacgacugcaacaccaccugccagacccccaagggcgccaucaacaccagccugcccuuccagaacauccaccccaucaccaucggcaagugccccaaguacgugaagagcaccaagcugagacuggccaccggccugagaaacgugcccagcauccagagcagaggccuguucggcgccaucgccggcuucaucgagggcggcuggaccggcaugguggacggcugguacggcuaccaccaccagaacgagcagggcagcggcuacgccgccgaccugaagagcacccagaacgccaucgacgagaucaccaacaaggugaacagcgugaucgagaagaugaacacccaguucaccgccgugggcaaggaguucaaccaccuggagaagagaaucgagaaccugaacaagaagguggacgacggcuuccuggacaucuggaccuacaacgccgagcugcuggugcugcuggagaacgagagaacccuggacuaccacgacagcaacgugaagaaccuguacgagaaggugagaagccagcugaagaacaacgccaaggagaucggcaacggcugcuucgaguucuaccacaagugcgacaacaccugcauggagagcgugaagaacggcaccuacgacuaccccaaguacagcgaggaggccaagcugaacagagaggagaucgacggcgugaagcuggagagcaccagaaucuaccagauccuggccaucuacagcaccguggccagcagccuggugcugguggugagccugggcgccaucagcuucuggaugugcagcggccacagcugcagaaucugcaucuga

SEQ ID NO: 165694 - RNA, 1701 nt, Artificial Sequence; identical to SEQ ID NO: 163893
  derived and/or modified CDS sequence (opt4) from hemagglutinin__InfluenzaA__ADM14930

SEQ ID NO: 165695 - RNA, 1701 nt, Artificial Sequence
  derived and/or modified CDS sequence (opt4) from hemagglutinin__InfluenzaA__ADM14948
augaaggccauccugguggugcugcuguacaccuucgccaccgccaacgccgacacccugugcaucggcuaccacgccaacaacagcaccgacaccguggacaccgugcuggagaagaacgugaccgugacccacagcgugaaccugcuggaggacaagcacaacggcaagcugugcaagcugagaggcguggccccccugcaccugggcaagugcaacaucgccggcuggauccugggcaaccccgagugcgagagccugagcaccgccagcagcuggagcuacaucguggagaccagcagcagcgacaacggcaccugcuaccccggcgacuucaucgacuacgaggagcugagagagcagcugagcagcgugagcagcuucgagagauucgagaucuuccccaagaccagcagcuggcccaaccacgacagcaacaagggcgugaccgccgccugcccccacgccggcgccaagggcuucuacaagaaccugaucuggcuggugaagaagggcaacagcuaccccaagcugagcaagagcuacaucaacgacaagggcaaggaggugcuggugcuguggggcauccaccaccccagcaccagcgccgaccagcagagccuguaccagaacgccgacgccuacguguucgugggcaccagcagauacagcagaaaguucaagcccgagaucgccaucagacccaaggugagagaccaggagggcagaaugaacuacuacuggacccugguggagcccggcgacaagaucaccuucgaggccaccggcaaccugguggugcccagauacgccuucgccauggagagaaacgccggcagcggcaucaucaucagcgacacccccgugcacgacugcaacaccaccugccagacccccgagggcgccaucaacaccagccugcccuuccagaacauccaccccaucaccaucggcaagugccccaaguacgugaagagcaccaagcugagacuggccaccggccugagaaacgugcccagcauccagagcagaggccuguucggcgccaucgccggcuucaucgagggcggcuggaccggcaugguggacggcugguacggcuaccaccaccagaacgagcagggcagcggcuacgccgccgaccugaagagcacccagaacgccaucgacgagaucaccaacaaggugaacagcgugaucgagaagaugaacacccaguucaccgccgugggcaaggaguucaaccaccuggagaagagaaucgagaaccugaacaagaagguggacgacggcuuccuggacaucuggaccuacaacgccgagcugcuggugcugcuggagaacgagagaacccuggacuaccacgacagcaacgugaagaaccuguacgagaaggugagaagccagcugaagaacaacgccaaggagaucggcaacggcugcuucgaguucuaccacaagugcgacaacaccugcauggagagcgugaagaacggcaccuacgacuaccccaaguacagcgaggaggccaagcugaacagagaggagaucgacggcgugaagcuggagagcaccagaaucuaccagauccuggccaucuacagcaccguggccagcagccuggugcugguggugagccugggcgccaucagcuucuggaugugcagcaacggcagccugcagugcagaaucugcaucuga

SEQ ID NO: 165696 - RNA, 1695 nt, Artificial Sequence
  derived and/or modified CDS sequence (opt4) from hemagglutinin__InfluenzaA__ADM14966
augaaggccauccugguggugcugcuguacaccuucgccaccgccaacgccgacacccugugcaucggcuaccacgccaacaacagcaccgacaccguggacaccgugcuggagaagaacgugaccgugacccacagcgugaacauccuggaggacaagcacaacggcaagcugugcaagcugagaggcguggccccccugcaccugggcaagugcaacaucgccggcuggauccugggcaaccccgagugcgagagccugagcaccgccagcagcuggagcuacaucguggagaccagcagcagcgacaacggcaccugcuaccccggcgacuucaucgacuacgaggagcugagagagcagcugagcagcgugagcagcuucgagagauucgagaucuuccccaagaccagcagcuggcccaaccacgacagcaacaagggcgugaccgccgccugcccccacgccggcgccaagagcuucuacaagaaccugaucuggcuggugaagaagggcaacagcuaccccaagcugagcaagagcuacaucaacgacaagggcaaggaggugcuggugcuguggggcauccaccaccccagcaccagcgccgaccagcagagccuguaccagaacgccgacgccuacguguucgugggcagcagcagauacagcaagaaguucaagcccgagaucgccaucagacccaaggugagagaccaggagggcagaaugaacuacuacuggacccugguggagcccggcgacaagaucaccuucgaggccaccggcaaccugguggugcccagauacgccuucgccauggagagaaacgccggcagcggcaucaucaucagcgacacccccgugcacgacugcaacaccaccugccagacccccaagggcgccaucaacaccagccugcccuuccagaacauccaccccaucaccaucggcaagugccccaaguacgugaagagcaccaagcugagacuggccaccggccugagaaacgugcccagcauccagagcagaggccuguucggcgccaucgccggcuucaucgagggcggcuggaccggcaugguggacggcugguacggcuaccaccaccagaacgagcagggcagcggcuacgccgccgaccugaagagcacccagaacgccaucgacgagaucaccaacaaggugaacagcgugaucgagaagaugaacacccaguucaccgccgugggcaaggaguucaaccaccuggagaagagaaucgagaaccugaacaagaagguggacgacggcuuccuggacaucuggaccuacaacgccgagcugcuggugcugcuggagaacgagagaacccuggacuaccacgacagcaacgugaagaaccuguacgagaaggugagaagccagcugaagaacaacgccaaggagaucggcaacggcugcuucgaguucuaccacaagugcgacaacaccugcauggagagcgugaagaacggcaccuacgacuaccccaaguacagcgaggaggccaagcugaacagagaggagaucgacggcgugaagcuggagagcaccagaaucuaccagauccuggccaucuacagcaccguggccagcagccuggugcugguggugagccugggcgccaucagcuucuggaugugcagcggccacagcugcagaaucugcaucuga

SEQ ID NO: 165697 - RNA, 1701 nt, Artificial Sequence; identical to SEQ ID NO: 162909
  derived and/or modified CDS sequence (opt4) from hemagglutinin__InfluenzaA__ADM14975

SEQ ID NO: 165698 - RNA, 1701 nt, Artificial Sequence
  derived and/or modified CDS sequence (opt4) from hemagglutinin__InfluenzaA__ADM14985
augaaggccauccugguggugcugcuguacaccuucgccaccgccaacgccgacacccugugcaucggcuaccacgccaacaacagcaccgacaccguggacaccgugcuggagaagaacgugaccgugacccacagcgugaaccugcuggaggacaagcacaacggcaagcugugcaagcugagaggcguggccccccugcaccugggcaagugcaacaucgccggcuggauccugggcaaccccgagugcgagagccugagcaccgccagcagcuggagcuacaucguggagaccagcagcagcgacaacggcaccugcuaccccggcgacuucaucgacuacgaggagcugagagagcagcugagcagcgugagcagcuucgagagauucgagaucuuccccaagaccagcagcuggcccaaccacgacagcaacaagggcgugaccgccgccugcccccacgccggcgccaagagcuucuacaagaaccugaucuggcuggugaagaagggcaacagcuaccccaagcugagcaagagcuacaucaacgacaaggagaaggaggugcuggugcuguggggcauccaccaccccagcaccagcgccgaccagcagagccuguaccagaacgccgacgccuacguguucgugggcaccagcagauacagcaagaaguucaagcccgagaucgccaucagacccaaggugagaggccaggagggcagaaugaacuacuacuggacccugguggagcccggcgacaagaucaccuucgaggccaccggcaaccugguggugcccagauacgccuucgccauggagagaaacgccggcagcggcaucgugaucagcgacacccccgugcacgacugcaacaccaccugccagacccccaagggcgccaucaacaccagccugcccuuccagaacauccacagcaucaccaucggcaagugccccaaguacgugaagagcaccaagcugagacuggccaccggccugagaaacgugcccagcauccagagcagaggccuguucggcgccaucgccggcuucaucgagggcggcuggaccggcaugguggacggcugguacggcuaccaccaccagaacgagcagggcagcggcuacgccgccgaccugaagagcacccagaacgccaucgacgagaucaccaacaaggugaacagcgugaucgagaagaugaacacccaguucaccgccgugggcaaggaguucaaccaccuggagaagagaaucgagaaccugaacaagaagguggacgacggcuuccuggacaucuggaccuacaacgccgagcugcuggugcugcuggagaacgagagaacccuggacuaccacgacagcaacgugaagaaccuguacgagaaggugagaagccagcugaagaacaacgccaaggagaucggcaacggcugcuucgaguucuaccacaagugcgacaacaccugcauggagagcgugaagaacggcaccuacgacuaccccaaguacagcgaggaggccaagcugaacagagaggagaucgacggcgugaagcuggagagcaccagaaucuaccagauccuggccaucuacagcaccguggccagcagccuggugcugguggugagccugggcgccaucagcuucuggaugugcagcaacggcagccugcagugcagaaucugcaucuga

SEQ ID NO: 165699 - RNA, 1701 nt, Artificial Sequence
  derived and/or modified CDS sequence (opt4) from hemagglutinin__InfluenzaA__ADM23841
augaaggccauccugguggugcugcuguacaccuucgccaccgccaacgccgacacccugugcaucggcuaccacgccaacaacagcaccgacaccguggacaccgugcuggagaagaacgugaccgugacccacagcgugaaccugcuggaggacaagcacaacggcaagcugugcaagcugagaggcguggccccccugcaccugggcaagugcaacaucgccggcuggauccugggcaaccccgagugcgagagccugagcaccgccagcagcuggagcuacaucguggagaccagcagcagcgacaacggcaccugcuaccccggcgacuucaucgacuacgaggagcugagagagcagcugagcagcgugagcagcuucgagagauucgagaucuuccccaagaccagcagcuggcccaaccacgacagcaacaagggcgugaccgccgccugcccccacgccggcgccaagagcuucuacaagaaccugaucuggcuggugaagaagggcaacagcuaccccaagcugagcaagagcuacaucaacgacaagggcaaggaggugcuggugcuguggggcauccaccaccagagcaccagcgccgaccagcagagccuguaccagaacgccgacgccuacguguucgugggcaccagcagauacagcaagaaguucaagcccgagaucgccaucagacccaaggugagagaccaggagggcagaaugaacuacuacuggacccugguggagcccggcgacaagaucaccuucgaggccaccggcaaccugguggugcccagauacgccuucgccauggagagaaacgccggcagcggcaucaucaucagcgacacccccgugcacgacugcaacaccaccugccagacccccaagggcgccaucaacaccagccugcccuuccagaacauccaccccaucaccaucggcaagugccccaaguacgugaagagcaccaagcugagacuggccaccggccugagaaacgugcccagcauccagagcagaggccuguucggcgccaucgccggcuucaucgagggcggcuggaccggcaugguggacggcugguacggcuaccaccaccagaacgagcagggcagcggcuacgccgccgaccugaagagcacccagaacgccaucgacgagaucaccaacaaggugaacagcgugaucgagaagaugaacacccaguucaccgccgugggcaaggaguucaaccaccuggagaagagaaucgagaaccugaacaagaagguggacgacggcuuccuggacaucuggaccuacaacgccgagcugcuggugcugcuggagaacgagagaacccuggacuaccacgacagcaacgugaagaaccuguacgagaaggugagaagccagcugaagaacaacgccaaggagaucggcaacggcugcuucgaguucuaccacaagugcgacaacaccugcauggagagcgugaagaacggcaccuacgacuaccccaaguacagcgaggaggccaagcugaacagagaggagaucgacggcgugaagcuggagagcaccagaaucuaccagauccuggccaucuacagcaccguggccagcagccuggugcugguggugagccugggcgccaucagcuucuggaugugcagcaacggcagccugcagugcagaaucugcaucuga

SEQ ID NO: 165700 - RNA, 1701 nt, Artificial Sequence; identical to SEQ ID NO: 163893
  derived and/or modified CDS sequence (opt4) from hemagglutinin__InfluenzaA__ADM23843

SEQ ID NO: 165701 - RNA, 1701 nt, Artificial Sequence
  derived and/or modified CDS sequence (opt4) from hemagglutinin__InfluenzaA__ADM23844
augaaggccauccugguggugcugcuguacaccuucgccaccgccaacgccgacacccugugcaucggcuaccacgccaacaacagcaccgacaccguggacaccgugcuggagaagaacgugaccgugacccacagcgugaaccugcuggaggacaagcacaacggcaagcugugcaagcugagaggcguggccccccugcaccugggcaagugcaacaucgccggcuggauccugggcaaccccgagugcgagagccugagcaccgccagcagcuggagcuacaucguggagaccagcaucagcgacaacggcaccugcuaccccggcgacuucaucgacuacgaggagcugagagagcagcugagcagcgugagcagcuucgagagauucgagaucuuccccaagaccagcagcuggcccaaccacgacagcaacaagggcgugaccaccgccugcccccacgccggcgccaagggcuucuacaagaaccugaucuggcuggugaagaagggcaacagcuaccccaagcugagcaagagcuacaucaacgacaagggcaaggaggugcuggugcuguggggcauccaccaccagagcaccagcgccgaccagcagagccuguaccagaacgccgacgccuacguguucgugggcaccagcagauacagcaagaaguucaagcccgagaucgccaucagacccaaggugagagaccaggagggcagaaugaacuacuacuggacccugguggagcccggcgacaagaucaccuucgaggccaccggcaaccugguggugcccagauacgccuucgccauggagagaaacgccggcagcggcaucaucaucagcgacacccccgugcacgacugcaacaccaccugccagacccccaagggcgccaucaacaccagccugcccuuccagaacauccaccccaucaccaucggcaagugccccaaguacgugaagagcaccaagcugagacuggccaccggccugagaaacgugcccagcauccagagcagaggccuguucggcgccaucgccggcuucaucgagggcggcuggaccggcaugguggacggcugguacggcuaccaccaccagaacgagcagggcagcggcuacgccgccgaccugaagagcacccagaacgccaucgacaagaucaccaacaaggugaacagcgugaucgagaagaugaacacccaguucaccgccgugggcaaggaguucaaccaccuggagaagagaaucgagaaccugaacaagaagguggacgacggcuuccuggacaucuggaccuacaacgccgagcugcuggugcugcuggagaacgagagaacccuggacuaccacgacagcaacgugaagaaccuguacgagaaggugagaagccagcugaagaacaacgccaaggagaucggcaacggcugcuucgaguucuaccacaagugcgacaacaccugcauggagagcgugaagaacggcaccuacgacuaccccaaguacagcgaggaggccaagcugaacagagaggagaucgacggcgugaagcuggagagcaccagaaucuaccagauccuggccaucuacagcaccguggccagcagccuggugcugguggugagccugggcgccaucagcuucuggaugugcagcaacggcagccugcagugcagaaucugcaucuga

SEQ ID NO: 165702 - RNA, 1701 nt, Artificial Sequence
  derived and/or modified CDS sequence (opt4) from hemagglutinin__InfluenzaA__ADM23845
augaaggccauccugguggugcugcuguacaccuucgccaccgccaacgccgacacccugugcaucggcuaccacgccaacaacagcaccgacaccguggacaccgugcuggagaagaacgugaccgugacccacagcgugaaccugcuggaggacaagcacaacggcaagcugugcaagcugagaggcguggccccccugcaccugggcaagugcaacaucgccggcuggauccugggcaaccccgagugcgagagccugagcaccgccagcagcuggagcuacaucguggagaccagcaucagcgacaacggcaccugcuaccccggcgacuucaucgacuacgaggagcugagagagcagcugagcagcgugagcagcuucgagagauucgagaucuuccccaagaccagcagcuggcccaaccacgacagcaacaagggcgugaccaccgccugcccccacgccggcgccaagagcuucuacaagaaccugaucuggcuggugaagaagggcaacagcuaccccaagcugagcaagagcuacaucaacgacaagggcaaggaggugcuggugcuguggggcauccaccaccagagcaccagcgccgaccagcagagccuguaccagaacgccgacgccuacguguucgugggcaccagcagauacagcaagaaguucaagcccgagaucgccaucagacccaaggugagagaccaggagggcagaaugaacuacuacuggacccugguggagcccggcgacaagaucaccuucgaggccaccggcaaccugguggugcccagauacgccuucgccauggagagaaacgccggcagcggcaucaucaucagcgacacccccgugcacgacugcaacaccaccugccagacccccaagggcgccaucaacaccagccugcccuuccagaacauccaccccaucaccaucggcaagugccccaaguacgugaagagcaccaagcugagacuggccaccggccugagaaacgugcccagcauccagagcagaggccuguucggcgccaucgccggcuucaucgagggcggcuggaccggcaugguggacggcugguacggcuaccaccaccagaacgagcagggcagcggcuacgccgccgaccugaagagcacccagaacgccaucgacaagaucaccaacaaggugaacagcgugaucgagaagaugaacacccaguucaccgccgugggcaaggaguucaaccaccuggagaagagaaucgagaaccugaacaagaagguggacgacggcuuccuggacaucuggaccuacaacgccgagcugcuggugcugcuggagaacgagagaacccuggacuaccacgacagcaacgugaagaaccuguacgagaaggugagaagccagcugaagaacaacgccaaggagaucggcaacggcugcuucgaguucuaccacaagugcgacaacaccugcauggagagcgugaagaacggcaccuacgacuaccccaaguacagcgaggaggccaagcugaacagagaggagaucgacggcgugaagcuggagagcaccagaaucuaccagauccuggccaucuacagcaccguggccagcagccuggugcugguggugagccugggcgccaucagcuucuggaugugcagcaacggcagccugcagugcagaaucugcaucuga

SEQ ID NO: 165703 - RNA, 1701 nt, Artificial Sequence
  derived and/or modified CDS sequence (opt4) from hemagglutinin__InfluenzaA__ADM23846
augaaggccauccugguggugcugcuguacaccuucgccaccgccaacgccgacacccugugcaucggcuaccacgccaacaacagcaccgacaccguggacaccgugcuggagaagaacgugaccgugacccacagcgugaaccugcuggaggacaagcacaacggcaagcugugcaagcugagaggcguggccccccugcaccugggcaagugcaacaucgccggcuggauccugggcaaccccgagugcgagagccugagcaccgccagcagcuggagcuacaucguggagaccagcaucagcgacaacggcaccugcuaccccggcgacuucaucgacuacgaggagcugagagagcagcugagcagcgugagcagcuucgagagauucgagaucuuccccaagaccagcagcuggcccaaccacgacagcaacaagggcgugaccaccgccugcccccacgccggcgccaagagcuucuacaagaaccugaucuggcuggugaagaagggcaacagcuaccccaagcugagcaagagcuacaucaacgacaagggcaaggaggugcuggugcuguggggcauccaccaccccagcaccagcgccgaccagcagagccuguaccagaacgccgacgccuacguguucgugggcaccagcagauacagcaagaaguucaagcccgagaucgccaucagacccaaggugagagaccaggagggcagaaugaacuacuacuggacccugguggagcccggcgacaagaucaccuucgaggccaccggcaaccugguggugcccagauacgccuucgccauggagagaaacgccggcagcggcaucaucaucagcgacacccccgugcacgacugcaacaccaccugccagacccccaagggcgccaucaacaccagccugcccuuccagaacauccaccccaucaccaucggcaagugccccaaguacgugaagagcaccaagcugagacuggccaccggccugagaaacgugcccagcauccagagcagaggccuguucggcgccaucgccggcuucaucgagggcggcuggaccggcaugguggacggcugguacggcuaccaccaccagaacgagcagggcagcggcuacgccgccgaccugaagagcacccagaacgccaucgacaagaucaccaacaaggugaacagcgugaucgagaagaugaacacccaguucaccgccgugggcaaggaguucaaccaccuggagaagagaaucgagaaccugaacaagaagguggacgacggcuuccuggacaucuggaccuacaacgccgagcugcuggugcugcuggagaacgagagaacccuggacuaccacgacagcaacgugaagaaccuguacgagaaggugagaagccagcugaagaacaacgccaaggagaucggcaacggcugcuucgaguucuaccacaagugcgacaacaccugcauggagagcgugaagaacggcaccuacgacuaccccaaguacagcgaggaggccaagcugaacagagaggagaucgacggcgugaagcuggagagcaccagaaucuaccagauccuggccaucuacagcaccguggccagcagccuggugcugguggugagccugggcgccaucagcuucuggaugugcagcaacggcagccugcagugcagaaucugcaucuga

SEQ ID NO: 165704 - RNA, 1701 nt, Artificial Sequence
  derived and/or modified CDS sequence (opt4) from hemagglutinin__InfluenzaA__ADM23847
augaaggccauccugguggugcugcuguacaccuucgccaccgccaacgccgacacccugugcaucggcuaccacgccaacaacagcaccgacaccguggacaccgugcuggagaagaacgugaccgugacccacagcgugaaccugcuggaggacaagcacaacggcaagcugugcaagcugagaggcguggccccccugcaccugggcaagugcaacaucgccggcuggauccugggcaaccccgagugcgagagccugagcaccgccagcagcuggagcuacaucguggagaccagcaucagcgacaacggcaccugcuaccccggcgacuucaucgacuacgaggagcugagagagcagcugagcagcgugagcagcuucgagagauucgagaucuuccccaagaccagcagcuggcccaaccacgacagcaacaagggcgugaccaccgccugcccccacgccggcgccaagggcuucuacaagaaccugaucuggcuggugaagaagggcaacagcuaccccaagcugagcaagagcuacaucaacgacaagggcaaggaggugcuggugcuguggggcauccaccaccagagcaccagcgccgaccagcagagccuguaccagaacgccgacgccuacguguucgugggcaccagcagauacagcaagaaguucaagcccgagaucgccaucagacccaaggugagagaccaggagggcagaaugaacuacuacuggacccugguggagcccggcgacaagaucaccuucgaggccaccggcaaccugguggugcccagauacgccuucgccauggagagaaacgugggcagcggcaucaucaucagcgacacccccgugcacgacugcaacaccaccugccagacccccaagggcgccaucaacaccagccugcccuuccagaacauccaccccaucaccaucggcaagugccccaaguacgugaagagcaccaagcugagacuggccaccggccugagaaacgugcccagcauccagagcagaggccuguucggcgccaucgccggcuucaucgagggcggcuggaccggcaugguggacggcugguacggcuaccaccaccagaacgagcagggcagcggcuacgccgccgaccugaagagcacccagaacgccaucgacaagaucaccaacaaggugaacagcgugaucgagaagaugaacacccaguucaccgccgugggcaaggaguucaaccaccuggagaagagaaucgagaaccugaacaagaagguggacgacggcuuccuggacaucuggaccuacaacgccgagcugcuggugcugcuggagaacgagagaacccuggacuaccacgacagcaacgugaagaaccuguacgagaaggugagaagccagcugaagaacaacgccaaggagaucggcaacggcugcuucgaguucuaccacaagugcgacaacaccugcauggagagcgugaagaacggcaccuacgacuaccccaaguacagcgaggaggccaagcugaacagagaggagaucgacggcgugaagcuggagagcaccagaaucuaccagauccuggccaucuacagcaccguggccagcagccuggugcugguggugagccugggcgccaucagcuucuggaugugcagcaacggcagccugcagugcagaaucugcaucuga

SEQ ID NO: 165705 - RNA, 1701 nt, Artificial Sequence
  derived and/or modified CDS sequence (opt4) from hemagglutinin__InfluenzaA__ADM23849
augaaggccauccugguggugcugcuguacaccuucgccaccgccaacgccgacacccugugcaucggcuaccacgccaacaacagcaccgacaccguggacaccgugcuggagaagaacgugaccgugacccacagcgugaaccugcuggaggacaagcacaacggcaagcugugcaagcugagaggcguggccccccugcaccugggcaagugcaacaucgccggcuggauccugggcaaccccgagugcgagagccugagcaccgccagcagcuggagcuacaucguggagaccagcagcagcgacaacggcaccugcuaccccggcgacuucaucgacuacgaggagcugagagagcagcugagcagcgugagcagcuucgagagauucgagaucuuccccaagaccagcagcuggcccaaccacgacagcaacaagggcgugaccgccgccugcccccacgccggcgccaagagcuucuacaagaaccugaucuggcuggugaagaagggcaacagcuaccccaagcugagcaagagcuacaucaacgacaagggcaaggaggugcuggugcuguggggcauccaccaccagagcaccagcgccgaccagcagagccuguaccagaacgccgacgccuacguguucgugggcaccagcagauacagcaagaaguucaagcccgagaucgccaucagacccaaggugagagaccaggagggcagaaugaacuacuacuggacccugguggagcccggcgacaagaucaccuucgaggccaccggcaaccugguggugcccagauacgccuucgccauggagagaaacgccggcagcggcaucaucaucagcgacacccccgugcacgacugcaacaccaccugccagacccccaagggcgccaucaacaccagccugcccuuccagaacauccaccccaucaccaucggcaagugccccaaguacgugaagagcaccaagcugagacuggccaccggccugagaaacgugcccagcauccagagcagaggccuguucggcgccaucgccggcuucaucgagggcggcuggaccggcaugguggacggcugguacggcuaccaccaccagaacgagcagggcagcggcuacgccgccgaccugaagagcacccagaacgccaucgacaagaucaccaacaaggugaacagcgugaucgagaagaugaacacccaguucaccgccgugggcaaggaguucaaccaccuggagaagagaaucgagaaccugaacaagaagguggacgacggcuuccuggacaucuggaccuacaacgccgagcugcuggugcugcuggagaacgagagaacccuggacuaccacgacagcaacgugaagaaccuguacgagaaggugagaagccagcugaagaacaacgccaaggagaucggcaacggcugcuucgaguucuaccacaagugcgacaacaccugcauggagagcgugaagaacggcaccuacgacuaccccaaguacagcgaggaggccaagcugaacagagaggagaucgacggcgugaagcuggagagcaccagaaucuaccagauccuggccaucuacagcaccguggccagcagccuggugcugguggugagccugggcgccaucagcuucuggaugugcagcaacggcagccugcagugcagaaucugcaucuga

SEQ ID NO: 165706 - RNA, 1701 nt, Artificial Sequence
  derived and/or modified CDS sequence (opt4) from hemagglutinin__InfluenzaA__ADM23851
auggaggccauccugguggugcugcuguacaccuucgccaccgccaacgccgacacccugugcaucggcuaccacgccaacaacagcaccgacaccguggacaccgugcuggagaagaacgugaccgugacccacagcgugaaccugcuggaggacaagcacaacggcaagcugugcaagcugagaggcguggccccccugcaccugggcaagugcaacaucgccggcuggauccugggcaaccccgagugcgagagccugagcaccgccagcagcuggagcuacaucguggagaccagcagcagcgacaacggcaccugcuaccccggcgacuucaucgacuacgaggagcugagagagcagcugagcagcgugagcagcuucgagagauucgagaucuuccccaagaccagcagcuggcccaaccacgacagcaacaagggcgugaccgccgccugcccccacgccggcgccaagagcuucuacaagaaccugaucuggcuggugaagaagggcaacagcuaccccaagcugagcaagagcuacaucaacgacaagggcaaggaggugcuggugcuguggggcauccaccaccagagcaccagcgccgaccagcagagccuguaccagaacgccgacgccuacguguucgugggcagcagcagauacagcaagaaguucaagcccgagaucgccaucagacccaaggugagagaccaggagggcagaaugaacuacuacuggacccugguggagcccggcgacaagaucaccuucgaggccaccggcaaccugguggugcccagauacgccuucgccauggagagaaacgccggcagcggcaucaucaucagcgacacccccgugcacgacugcaacaccaccugccagacccccaagggcgccaucaacaccagccugcccuuccacaacauccaccccaucaccaucggcaagugccccaaguacgugaagagcaccaagcugagacuggccaccggccugagaaacgugcccagcauccagagcagaggccuguucggcgccaucgccggcuucaucgagggcggcuggaccggcaugguggacggcugguacggcuaccaccaccagaacgagcagggcagcggcuacgccgccgaccugaagagcacccagaacgccaucgacgagaucaccaacaaggugaacagcgugaucgagaagaugaacacccaguucaccgccgugggcaaggaguucaaccaccuggagaagagaaucgagaaccugaacaagaagguggacgacggcuuccuggacaucuggaccuacaacgccgagcugcuggugcugcuggagaacgagagaacccuggacuaccacgacagcaacgugaagaaccuguacgagaaggugagaagccagcugaagaacaacgccaaggagaucggcaacggcugcuucgaguucuaccacaagugcgacaacaccugcauggagagcgugaagaacggcaccuacgacuaccccaaguacagcgaggaggccaagcugaacagagagaagaucgacggcgugaagcuggagagcaccagaaucuaccagauccuggccaucuacagcaccguggccagcagccuggugcugguggugagccugggcgccaucagcuucuggaugugcagcaacggcagccugcagugcagaaucugcaucuga

SEQ ID NO: 165707 - RNA, 1701 nt, Artificial Sequence
  derived and/or modified CDS sequence (opt4) from hemagglutinin__InfluenzaA__ADM23852
auggaggccauccugguggugcugcuguacaccuucgccaccgccaacgccgacacccugugcaucggcuaccacgccaacaacagcaccgacaccguggacaccgugcuggagaagaacgugaccgugacccacagcgugaaccugcuggaggacaagcacaacggcaagcugugcaagcugagaggcguggccccccugcaccugggcaagugcaacaucgccggcuggauccugggcaaccccgagugcgagagccugagcaccgccagcagcuggagcuacaucguggagaccagcagcagcgacaacggcaccugcuaccccggcgacuucaucgacuacgaggagcugagagagcagcugagcagcgugagcagcuucgagagauucgagaucuuccccaagaccagcagcuggcccaaccacgacagcaacaagggcgugaccgccgccugcccccacgccggcgccaagagcuucuacaagaaccugaucuggcuggugaagaagggcaacagcuaccccaagcugagcaagagcuacaucaacgacaagggcaaggaggugcuggugcuguggggcauccaccaccccagcaccagcgccgaccagcagagccuguaccagaacgccgacgccuacguguucgugggcagcagcagauacagcaagaaguucaagcccgagaucgccaucagacccaaggugagagaccaggagggcagaaugaacuacuacuggacccugguggagcccggcgacaagaucaccuucgaggccaccggcaaccugguggugcccagauacgccuucgccauggagagaaacgccggcagcggcaucaucaucagcgacacccccgugcacgacugcaacaccaccugccagacccccaagggcgccaucaacaccagccugcccuuccacaacauccaccccaucaccaucggcaagugccccaaguacgugaagagcaccaagcugagacuggccaccggccugagaaacgugcccagcauccagagcagaggccuguucggcgccaucgccggcuucaucgagggcggcuggaccggcaugguggacggcugguacggcuaccaccaccagaacgagcagggcagcggcuacgccgccgaccugaagagcacccagaacgccaucgacgagaucaccaacaaggugaacagcgugaucgagaagaugaacacccaguucaccgccgugggcaaggaguucaaccaccuggagaagagaaucgagaaccugaacaagaagguggacgacggcuuccuggacaucuggaccuacaacgccgagcugcuggugcugcuggagaacgagagaacccuggacuaccacgacagcaacgugaagaaccuguacgagaaggugagaagccagcugaagaacaacgccaaggagaucggcaacggcugcuucgaguucuaccacaagugcgacaacaccugcauggagagcgugaagaacggcaccuacgacuaccccaaguacagcgaggaggccaagcugaacagagagaagaucgacggcgugaagcuggagagcaccagaaucuaccagauccuggccaucuacagcaccguggccagcagccuggugcugguggugagccugggcgccaucagcuucuggaugugcagcaacggcagccugcagugcagaaucugcaucuga

SEQ ID NO: 165708 - RNA, 1701 nt, Artificial Sequence; identical to SEQ ID NO: 165707
  derived and/or modified CDS sequence (opt4) from hemagglutinin__InfluenzaA__ADM23853

SEQ ID NO: 165709 - RNA, 1701 nt, Artificial Sequence; identical to SEQ ID NO: 162971
  derived and/or modified CDS sequence (opt4) from hemagglutinin__InfluenzaA__ADM23855

SEQ ID NO: 165710 - RNA, 1701 nt, Artificial Sequence
  derived and/or modified CDS sequence (opt4) from hemagglutinin__InfluenzaA__ADM23856
augaaggccauccugguggugcugcuguacaccuucgccaccgugaacgccgacacccugugcaucggcuaccacgccaacaacagcaccgacaccguggacaccgugcuggagaagaacgugaccgugacccacagcgugaaccugcuggaggacaagcacaacggcaagcugugcaagcugagaggcguggccccccugcaccugggcaagugcaacaucgccggcuggauccugggcaaccccgagugcgagagccugagcaccgccagcagcuggagcuacaucguggagaccagcagcagcgacaacggcaccugcuaccccggcgacuucaucgacuacgaggagcugagagagcagcugagcagcgugagcagcuucgagagauucgagaucuuccccaagaccagcagcuggcccaaccacgacagcaacaagggcgugaccgccgccugcccccacgccggcgccaagagcuucuacaagaaccugaucuggcuggugaagaagggcaacagcuaccccaagcugagcaagagcuacaucaacgacaagagaaaggaggugcuggugcuguggggcauccaccaccagagcaccagcgccgaccagcagagccuguaccagaacgccgacgccuacguguucgugggcaccagcagauacagcaagaaguucaagcccgagaucgccaucagacccaaggugagagaccaggagggcagaaugaacuacuacuggacccugguggagcccggcgacaagaucaccuucgaggccaccggcaaccugguggugcccagauacgccuucgccauggagagaaacgccggcagcggcaucaucaucagcgacacccccgugcacgacugcaacaccaccugccagacccccaagggcgccaucaacaccagccugcccuuccagaacauccaccccaucaccaucggcaagugccccaaguacgugaagagcaccaagcugagacuggccaccggccugagaaacgugcccagcauccagagcagaggccuguucggcgccaucgccggcuucaucgagggcggcuggaccggcaugguggacggcugguacggcuaccaccaccagaacgagcagggcagcggcuacgccgccgaccugaagagcacccagaacgccaucgacaagaucaccaacaaggugaacagcgugaucgagaagaugaacacccaguucaccgccgugggcaaggaguucaaccaccuggagaagagaaucgagaaccugaacaagaagguggacgacggcuuccuggacaucuggaccuacaacgccgagcugcuggugcugcuggagaacgagagaacccuggacuaccacgacagcaacgugaagaaccuguacgagaaggugagaagccagcugaagaacaacgccaaggagaucggcaacggcugcuucgaguucuaccacaagugcgacaacaccugcauggagagcgugaagaacggcaccuacgacuaccccaaguacagcgaggaggccaagcugaacagagaggagaucgacggcgugaagcuggagagcaccagaaucuaccagauccuggccaucuacagcaccguggccagcagccuggugcugguggugagccugggcgccaucagcuucuggaugugcagcaacggcagccugcagugcagaaucugcaucuga

SEQ ID NO: 165711 - RNA, 1701 nt, Artificial Sequence; identical to SEQ ID NO: 162729
  derived and/or modified CDS sequence (opt4) from hemagglutinin__InfluenzaA__ADM25945

SEQ ID NO: 165712 - RNA, 1701 nt, Artificial Sequence; identical to SEQ ID NO: 162971
  derived and/or modified CDS sequence (opt4) from hemagglutinin__InfluenzaA__ADM25948

SEQ ID NO: 165713 - RNA, 1701 nt, Artificial Sequence; identical to SEQ ID NO: 164758
  derived and/or modified CDS sequence (opt4) from hemagglutinin__InfluenzaA__ADM26264

SEQ ID NO: 165714 - RNA, 1701 nt, Artificial Sequence; identical to SEQ ID NO: 164758
  derived and/or modified CDS sequence (opt4) from hemagglutinin__InfluenzaA__ADM26265

SEQ ID NO: 165715 - RNA, 1701 nt, Artificial Sequence; identical to SEQ ID NO: 164758
  derived and/or modified CDS sequence (opt4) from hemagglutinin__InfluenzaA__ADM26266

SEQ ID NO: 165716 - RNA, 1701 nt, Artificial Sequence; identical to SEQ ID NO: 164758
  derived and/or modified CDS sequence (opt4) from hemagglutinin__InfluenzaA__ADM26267

SEQ ID NO: 165717 - RNA, 1701 nt, Artificial Sequence
  derived and/or modified CDS sequence (opt4) from hemagglutinin__InfluenzaA__ADM26268
augaaggccauccugguggugcugcuguacaccuucaccaccgccaacgccgacacccugugcaucggcuaccacgccaacaacagcaccgacaccguggacaccgugcuggagaagaacgugaccgugacccacagcgugaaccugcuggaggacaagcacaacggcaagcugugcaagcugagaggcguggccccccugcaccugggcaagugcaacaucgccggcuggauccugggcaaccccgagugcgagagccugagcaccgccagcagcuggagcuacaucguggagaccagcagcagcgacaacggcaccugcuaccccggcgacuucaucgacuacgaggagcugagagagcagcugagcagcgugagcagcuucgagagauucgagaucuuccccaagaccagcagcuggcccaaccacgacagcaacaagggcgugaccgccgccugcccccacgccggcgccaagagcuucuacaagaaccugaucuggcuggugaagaagggcaacagcuaccccaagcugagcaagagcuacaucaacgacaagggcaaggaggugcuggugcuguggggcauccaccaccccagcaccagcgccgaccagcagagccuguaccagaacgccgacgccuacguguucgugggcaccagcagauacagcaagaaguucaagcccgagaucgccaucagacccaaggugagagagcaggagggcagaaugaacuacuacuggacccugguggagcccggcgacaagaucaccuucgaggccaccggcaaccugguggugcccagauacgccuucgccauggagagaaacgccggcagcggcaucaucaucagcgacacccccgugcacgacugcaacaccaccugccagacccccaagggcgccaucaacaccagccugcccuuccagaacauccacagcaucaccaucggcaagugccccaaguacgugaagagcaccaagcugagacuggccaccggccugagaaacgugcccagcauccagagcagaggccuguucggcgccaucgccggcuucaucgagggcggcuggaccggcaugguggacggcugguacggcuaccaccaccagaacgagcagggcagcggcuacgccgccgaccugaagagcacccagaacgccaucgacgagaucaccaacaaggugaacagcgugaucgagaagaugaacacccaguucaccgccgugggcaaggaguucaaccaccuggagaagagaaucgagaaccugaacaagaagguggacgacggcuuccuggacaucuggaccuacaacgccgagcugcuggugcugcuggagaacgagagaacccuggacuaccacgacagcaacgugaagaaccuguacgagaaggugagaagccagcugaagaacaacgccaaggagaucggcaacggcugcuucgaguucuaccacaagugcgacaacaccugcauggagagcgugaagaacggcaccuacgacuaccccaaguacagcgaggaggccaagcugaagagagaggagaucgacggcgugaagcuggagagcaccagaaucuaccagauccuggccaucuacagcaccguggccagcagccuggugcugguggugagccugggcgccaucagcuucuggaugugcagcaacggcagccugcagugcagaaucugcaucuga

SEQ ID NO: 165718 - RNA, 1701 nt, Artificial Sequence
  derived and/or modified CDS sequence (opt4) from hemagglutinin__InfluenzaA__ADM26269
augaagaccauccugguggugcugcuguacaccuucaccaccgccaacgccgacacccugugcaucggcuaccacgccaacaacagcaccgacaccguggacaccgugcuggagaagaacgugaccgugacccacagcgugaaccugcuggaggacaagcacaacggcaagcugugcaagcugagaggcguggccccccugcaccugggcaagugcaacaucgccggcuggauccugggcaaccccgagugcgagagccugagcaccgccagcagcuggagcuacaucguggagaccagcagcagcgacaacggcaccugcuaccccggcgacuucaucgacuacgaggagcugagagagcagcugagcagcgugagcagcuucgagagauucgagaucuuccccaagaccagcagcuggcccaaccacgacagcaacaagggcgugaccgccgccugcccccacgccggcgccaagagcuucuacaagaaccugaucuggcuggugaagaagggcaacagcuaccccaagcugagcaagagcuacaucaacgacaagggcaaggaggugcuggugcuguggggcauccaccaccccagcaccagcgccgaccagcagagccuguaccagaacgccgacgccuacguguucgugggcaccagcagauacagcaagaaguucaagcccgagaucgccaucagacccaaggugagagagcaggagggcagaaugaacuacuacuggacccugguggagcccggcgacaagaucaccuucgaggccaccggcaaccugguggugcccagauacgccuucgccauggagagaaacgccggcagcggcaucaucaucagcgacacccccgugcacgacugcaacaccaccugccagacccccaagggcgccaucaacaccagccugcccuuccagaacauccacagcaucaccaucggcaagugccccaaguacgugaagagcaccaagcugagacuggccaccggccugagaaacgugcccagcauccagagcagaggccuguucggcgccaucgccggcuucaucgagggcggcuggaccggcaugguggacggcugguacggcuaccaccaccagaacgagcagggcagcggcuacgccgccgaccugaagagcacccagaacgccaucgacgagaucaccaacaaggugaacagcgugaucgagaagaugaacacccaguucaccgccgugggcaaggaguucaaccaccuggagaagagaaucgagaaccugaacaagaagguggacgacggcuuccuggacaucuggaccuacaacgccgagcugcuggugcugcuggagaacgagagaacccuggacuaccacgacagcaacgugaagaaccuguacgagaaggugagaagccagcugaagaacaacgccaaggagaucggcaacggcugcuucgaguucuaccacaagugcgacaacaccugcauggagagcgugaagaacggcaccuacgacuaccccaaguacagcgaggaggccaagcugaagagagaggagaucgacggcgugaagcuggagagcaccagaaucuaccagauccuggccaucuacagcaccguggccagcagccuggugcugguggugagccugggcgccaucagcuucuggaugugcagcaacggcagccugcagugcagaaucugcaucuga

SEQ ID NO: 165719 - RNA, 1701 nt, Artificial Sequence
  derived and/or modified CDS sequence (opt4) from hemagglutinin__InfluenzaA__ADM26270
augaaggccauccugguggugcugcuguacaccuucaccaccgccaacgccgacacccugugcaucggcuaccacgccaacaacagcaccgacaccguggacaccgugcuggagaagaacgugaccgugacccacagcgugaaccugcuggaggacaagcacaacggcaagcugugcaagcugagaggcguggccccccugcaccugggcaagugcaacaucgccggcuggauccugggcaaccccgagugcgagagccugagcaccgccagcagcuggagcuacaucguggagaccagcagcagcgacaacggcaccugcuaccccggcgacuucaucgacuacgaggagcugagagagcagcugagcagcgugagcagcuucgagagauucgagaucuuccccaagaccagcagcuggcccaaccacgacagcaacaagggcgugaccgccgccugcccccacgccggcgccaagagcuucuacaagaaccugaucuggcuggugaagaagggcaacagcuaccccaagcugagcaagagcuacaucaacgacaagggcaaggaggugcuggugcuguggggcauccaccaccccagcaccagcgccgaccagcagagccuguaccagaacgccgacgccuacguguucgugggcaccagcagauacagcaagaaguucaagcccgagaucgccaucagacccaaggugagagagcaggagggcagaaugaacuacuacuggacccugguggagcccggcgacaagaucaccuucgaggccaccggcaaccugguggugcccagauacgccuucgccauggagagaaacgccggcagcggcaucaucaucagcgacacccccgugcacgacugcaacaccaccugccagacccccaagggcgccaucaacaccagccugcccuuccagaacauccacagcaucaccaucggcagaugccccaaguacgugaagagcaccaagcugagacuggccaccggccugagaaacgugcccagcauccagagcagaggccuguucggcgccaucgccggcuucaucgagggcggcuggaccggcaugguggacggcugguacggcuaccaccaccagaacgagcagggcagcggcuacgccgccgaccugaagagcacccagaacgccaucgacgagaucaccaacaaggugaacagcgugaucgagaagaugaacacccaguucaccgccgugggcaaggaguucaaccaccuggagaagagaaucgagaaccugaacaagaagguggacgacggcuuccuggacaucuggaccuacaacgccgagcugcuggugcugcuggagaacgagagaacccuggaccaccacgacagcaacgugaagaaccuguacgagaaggugagaagccagcugaagaacaacgccaaggagaucggcaacggcugcuucgaguucuaccacaagugcgacaacaccugcauggagagcgugaagaacggcaccuacgacuaccccaaguacagcgaggaggccaagcugaacagagaggagaucgacggcgugaagcuggagagcaccagaaucuaccagauccuggccaucuacagcaccguggccagcagccuggugcugguggugagccugggcgccaucagcuucuggaugugcagcaacggcagccugcagugcagaaucugcaucuga

SEQ ID NO: 165720 - RNA, 1701 nt, Artificial Sequence; identical to SEQ ID NO: 164758
  derived and/or modified CDS sequence (opt4) from hemagglutinin__InfluenzaA__ADM26271

SEQ ID NO: 165721 - RNA, 1701 nt, Artificial Sequence
  derived and/or modified CDS sequence (opt4) from hemagglutinin__InfluenzaA__ADM26272
augaaggccauccugguggugcugcuguacaccuucaccaccgccaacgccgacacccugugcaucggcuaccacgccaacaacagcaccgacaccguggacaccgugcuggagaagaacgugaccgugacccacagcgugaaccugcuggaggacaagcacaacggcaagcugugcaagcugagaggcguggccccccugcaccugggcaagugcaacaucgccggcuggauccugggcaaccccgagugcgagagccugagcaccgccagcagcuggagcuacaucguggagaccagcagcagcgacaacggcaccugcuaccccggcgacuucaucgacuacgaggagcugagagagcagcugagcagcgugagcagcuucgagagauucgagaucuuccccaagaccagcagcuggcccaaccacgacagcaacaagggcgugaccgccgccugcccccacgccggcgccaagagcuucuacaagaaccugaucuggcuggugaagaagggcaacagcuaccccaagcugagcaagagcuacaucaacgacaagggcaaggaggugcuggugcuguggggcauccaccaccccagcaccagcgccgaccagcagagccuguaccagaacgccgacgccuacguguucgugggcaccagcagauacagcaagaaguucaagcccgagaucgccaucagacccaaggugagagagcaggagggcagaaugaacuacuacuggacccugguggagcccggcgacaagaucaccuucgaggccaccggcaaccugguggugcccagauacgccuucgccauggagagaaacgccggcagcggcaucaucaucagcgacacccccgugcacgacugcaacaccaccugccagacccccaagggcgccaucaacaccagccugcccuuccagaacauccacagcaucaccaucggcagaugccccaaguacgugaagagcaccaagcugagacuggccaccggccugagaaacgugcccagcauccagagcagaggccuguucggcgccaucgccggcuucaucgagggcggcuggaccggcaugguggacggcugguacggcuaccaccaccagaacgagcagggcagcggcuacgccgccgaccugaagagcacccagaacgccaucgacgagaucaccaacaaggugaacagcgugaucgagaagaugaacacccaguucaccgccgugggcaaggaguucaaccaccuggagaagagaaucgagaaccugaacaagaagguggacgacggcuuccuggacaucuggaccuacaacgccgagcugcuggugcugcuggagaacgagagaacccuggacuaccacgacagcaacgugaagaaccuguacgagaaggugagaagccagcugaagaacaacgccaaggagaucggcaacggcugcuucgaguucuaccacaagugcgacaacaccugcauggagagcgugaagaacggcaccuacgacuaccccaaguacagcgaggaggccaagcugaacagagaggagaucgacggcgugaagcuggagagcaccagaaucuaccagauccuggccaucuacagcaccguggccagcagccuggugcugguggugagccugggcgccaucagcuucuggaugugcagcaacggcagccugcagugcagaaucugcaucuga

SEQ ID NO: 165722 - RNA, 1701 nt, Artificial Sequence
  derived and/or modified CDS sequence (opt4) from hemagglutinin__InfluenzaA__ADM26274
augaaggccauccugguggugcugcuguacaccuucaccaccgccaacgccgacacccugugcaucggcuaccacgccaacaacagcaccgacaccguggacaccgugcuggagaagaacgugaccgugacccacagcgugaaccugcuggaggacaagcacaacggcaagcugugcaagcugagaggcguggccccccugcaccugggcaagugcaacaucgccggcuggauccugggcaaccccgagugcgagagccugagcaccgccagcagcuggagcuacaucguggagaccagcagcagcgacaacggcaccugcuaccccggcgacuucaucgacuacgaggagcugagagagcagcugagcagcgugagcagcuucgagagauucgagaucuuccccaagaccagcagcuggcccaaccacgacagcaacaagggcgugaccgccgccugcccccacgccggcgccaagagcuucuacaagaaccugaucuggcuggugaagaagggcaacagcuaccccaagcugagcaagagcuacaucaacgacaagggcaaggaggugcuggugcuguggggcauccaccaccccagcaccagcgccgaccagcagagccuguaccagaacgccgacgccuacguguucgugggcaccagcagauacagcaagaaguucaagcccgagaucgccaucagacccaaggugagagagcaggagggcagaaugaacuacuacuggacccugguggagcccggcgacaagaucaccuucgaggccaccggcaaccugguggugcccagauacgccuucgccauggagagaaacgccggcagcggcaucaucaucagcgacacccccgugcacgacugcaacaccaccugccagacccccaagggcgccaucaacaccagccugcccuuccagaacauccacagcaucaccaucggcaagugccccaaguacgugaagagcaccaagcugagacuggccaccggccugagaaacgugcccagcauccagagcagaggccuguucggcgccaucgccggcuucaucgagggcggcuggaccggcaugguggacggcugguacggcuaccaccaccagaacgagcagggcagcggcuacgccgccgaccugaagagcacccagaacgccaucgacgagaucaccaacaaggugaacagcgugaucgagaagaugaacacccaguucaccgccgugggcaaggaguucaaccaccuggagaagagaaucgagaaccugaacaagaagguggacgacggcuuccuggacaucuggaccuacaacgccgagcugcuggugcugcuggagaacgagagaacccuggacuaccacgacagcaacgugaaggaccuguacgagaaggugagaagccagcugaagaacaacgccaaggagaucggcaacggcugcuucgaguucuaccacaagugcgacaacaccugcauggagagcgugaagaacggcaccuacgacuaccccaaguacagcgaggaggccaagcugaacagagaggagaucgacggcgugaagcuggagagcaccagaaucuaccagauccuggccaucuacagcaccguggccagcagccuggugcugguggugagccugggcgccaucagcuucuggaugugcagcaacggcagccugcagugcagaaucugcaucuga

SEQ ID NO: 165723 - RNA, 1701 nt, Artificial Sequence; identical to SEQ ID NO: 164758
  derived and/or modified CDS sequence (opt4) from hemagglutinin__InfluenzaA__ADM26276

SEQ ID NO: 165724 - RNA, 1701 nt, Artificial Sequence
  derived and/or modified CDS sequence (opt4) from hemagglutinin__InfluenzaA__ADM26277
augaaggccauccugguggugcugcuguacaccuucaccaccgccaacgccgacacccugugcaucggcuaccacgccaacaacagcaccgacaccguggacaccgugcuggagaagaacgugaccgugacccacagcgugaaccugcuggaggacaagcacaacggcaagcugugcaagcugagaggcguggccccccugcaccugggcaagugcaacaucgccggcuggauccugggcaaccccgagugcgagagccugagcaccgccagcagcuggagcuacaucguggagaccagcagcagcgacaacggcaccugcuaccccggcgacuucaucgacuacgaggagcugagagagcagcugagcagcgugagcagcuucgagagauucgagaucuuccccaagaccagcagcuggcccaaccacgacagcaacaagggcgugaccgccgccugcccccacgccggcgccaagagcuucuacaagaaccugaucuggcuggugaagaagggcaacagcuaccccaagcugagcaagagcuacaucaacgacaagggcaaggaggugcuggugcuguggggcauccaccaccccagcaccagcgccgaccagcagagccuguaccagaacgccgacgccuacguguucgugggcaccagcagauacagcaagaaguucaagcccgagaucgccaucagacccaaggugagagagcaggagggcagaaugaacuacuacuggacccugguggagcccggcgacaagaucaccuucgaggccaccggcaaccugguggugcccagauacgccuucgccauggagagaaacgccggcagcggcaucaucaucagcgacacccccgugcacgacugcaacaccaccugccagacccccaagggcgccaucaacaccagccugcccuuccagaacauccacagcaucaccaucggcaagugccccaaguacgugaagagcaccaagcugagacuggccaccggccugagaaacgugcccagcauccagagcagaggccuguucggcgccaucgccggcuucaucgagggcggcuggaccggcaugguggacggcugguacggcuaccaccaccagaacgagcagggcagcggcuacgccgccgaccugaagagcacccagaacgccaucgacgagaucaccaacaaggugaacagcgugaucgagaagaugaacacccaguucaccgccgugggcaaggaguucaaccaccuggagaagagaaucgagaaccugaacaagaagguggacgacggcuuccuggacaucuggaccuacaacgccgagcugcuggugcugcuggagaacgagagaacccuggacuaccacgacagcaacgugaagaaccuguacgagaaggugagaagccagcugaagaacaacgccaaggagaucggcaacggcugcuucgaguucuaccacaagugcgacaacaccugcauggagagcgugaagaacggcaccuacgacuaccccaaguacagcgaggaggccaagcugaacagagaggagaucgacggcgugaagcuggagagcaccagaaucuaccagauccuggccaucuacagcaccguggccagcagccuggugcugaucgugagccugggcgccaucagcuucuggaugugcagcaacggcagccugcagugcagaaucugcaucuga

SEQ ID NO: 165725 - RNA, 1701 nt, Artificial Sequence
  derived and/or modified CDS sequence (opt4) from hemagglutinin__InfluenzaA__ADM26278
augaaggccauccugguggugcugcuguacaccuucaccaccgccaacgccgacacccugugcaucggcuaccacgccaacaacagcaccgacaccguggacaccgugcuggagaagaacgugaccgugacccacagcgugaaccugcuggaggacaagcacaacggcaagcugugcaagcugagaggcguggccccccugcaccugggcaagugcaacaucgccggcuggauccugggcaaccccgagugcgagagccugagcaccgccagcagcuggagcuacaucguggagaccagcagcagcgacaacggcaccugcuaccccggcgacuucaucgacuacgaggagcugagagagcagcugagcagcgugagcagcuucgagagauucgagaucuuccccaagaccagcagcuggcccaaccacgacagcaacaagggcgugaccgccgccugcccccacgccggcgccaagagcuucuacaagaaccugaucuggcuggugaagaagggcaacagcuaccccaagcugagcaagagcuacaucaacgacaagggcaaggaggugcuggugcuguggggcauccaccaccccagcaccagcgccgaccagcagagccuguaccagaacgccgacgccuacgugagcgugggcaccagcagauacagcaagaaguucaagcccgagaucgccaucagacccaaggugagagagcaggagggcagaaugaacuacuacuggacccugguggagcccggcgacaagaucaccuucgaggccaccggcaaccugguggugcccagauucgccuucgccauggagagaaacgccggcagcggcaucaucaucagcgacacccccgugcacgacugcaacaccaccugccagacccccaagggcgccaucaacaccagccugcccuuccagaacauccacagcaucaccaucggcaagugccccaaguacgugaagagcaccaagcugagacuggccaccggccugagaaacgugcccagcauccagagcagaggccuguucggcgccaucgccggcuucaucgagggcggcuggaccggcaugguggacggcugguacggcuaccaccaccagaacgagcagggcagcggcuacgccgccgaccugaagagcacccagaacgccaucgacgagaucaccaacaaggugaacagcgugaucgagaagaugaacacccaguucaccgccgugggcaaggaguucaaccaccuggagaagagaaucgagaaccugaacaagaagguggacgacggcuuccuggacaucuggaccuacaacgccgagcugcuggugcugcuggagaacgagagaacccuggacuaccacgacagcaacgugaagaaccuguacgagaaggugagaagccagcugaagaacaacgccaaggagaucggcaacggcugcuucgaguucuaccacaagugcgacaacaccugcauggagagcgugaagaacggcaccuacgacuaccccaaguacagcgaggaggccaagcugaagagagaggagaucgacggcgugaagcuggagagcaccagaaucuaccagauccuggccaucuacagcaccguggccagcagccuggugcugguggugagccugggcgccaucagcuucuggaugugcagcaacggcagccugcagugcagaaucugcaucuga

SEQ ID NO: 165726 - RNA, 1701 nt, Artificial Sequence
  derived and/or modified CDS sequence (opt4) from hemagglutinin__InfluenzaA__ADM26279
augaaggccauccugguggugcugcuguacaccuucaccaccgccaacgccgacacccugugcaucggcuaccacgccaacaacagcaccgacaccguggacaccgugcuggagaagaacgugaccgugacccacagcgugaaccugcuggaggacaagcacaacggcaagcugugcaagcugagaggcguggccccccugcaccugggcaagugcaacaucgccggcuggauccugggcaaccccgagugcgagagccugagcaccgccagcagcuggagcuacaucguggagaccagcagcagcgacaacggcaccugcuaccccggcgacuucaucgacuacgaggagcugagagagcagcugagcagcgugagcagcuucgagagauucgagaucuuccccaagaccagcagcuggcccaaccacgacagcaacaagggcgugaccgccgccugcccccacgccggcgccaagagcuucuacaagaaccugaucuggcuggugaagaagggcaacagcuaccccaagcugagcaagagcuacaucaacgacaagggcaaggaggugcuggugcuguggggcauccaccaccccagcaccagcgccgaccagcagagccuguaccagaacgccgacgccuacguguucgugggcaccagcagauacagcaagaaguucaagcccgagaucgccaucagacccaaggugagaggccaggagggcagaaugaacuacuacuggacccugguggagcccggcgacaagaucaccuucgaggccaccggcaaccugguggugcccagauacgccuucgccauggagagaaacgccggcagcggcaucaucaucagcgacacccccgugcacgacugcaacaccaccugccagacccccaagggcgccaucaacaccagccugcccuuccagaacauccacagcaucaccaucggcaagugccccaaguacgugaagagcaccaagcugagacuggccaccggccugagaaacgugcccagcauccagagcagaggccuguucggcgccaucgccggcuucaucgagggcggcuggaccggcaugguggacggcugguacggcuaccaccaccagaacgagcagggcagcggcuacgccgccgaccugaagagcacccagaacgccaucgacgagaucaccaacaaggugaacagcgugaucgagaagaugaacacccaguucaccgccgugggcaaggaguucaaccaccuggagaagagaaucgagaaccugaacaagaagguggacgacggcuuccuggacaucuggaccuacaacgccgagcugcuggugcugcuggagaacgagagaacccuggacuaccacgacagcaacgugaagaaccuguacgagaaggugagaagccagcugaagaacaacgccaaggagaucggcaacggcugcuucgaguucuaccacaagugcgacaacaccugcauggagagcgugaagaacggcaccuacgacuaccccaaguacagcgaggaggccaagcugaacagagaggagaucgacggcgugaagcuggagagcaccagaaucuaccagauccuggccaucuacagcaccguggccagcagccuggugcugguggugagccugggcgccaucagcuucuggaugugcagcaacggcagccugcagugcagaaucugcaucuga

SEQ ID NO: 165727 - RNA, 1701 nt, Artificial Sequence; identical to SEQ ID NO: 164758
  derived and/or modified CDS sequence (opt4) from hemagglutinin__InfluenzaA__ADM26280

SEQ ID NO: 165728 - RNA, 1701 nt, Artificial Sequence
  derived and/or modified CDS sequence (opt4) from hemagglutinin__InfluenzaA__ADM26281
augaaggccauccugguggugcugcuguacaccuucgccaccgccaacgccgacacccugugcaucggcuaccacgccaacaacagcaccgacaccguggacaccgugcuggagaagaacgugaccgugacccacagcgugaaccugcuggaggacaagcacaacggcaagcugugcaagcugagaggcguggccccccugcaccugggcaagugcaacaucgccggcuggauccugggcaaccccgagugcgagagccugagcaccgccagcagcuggagcuacaucguggagaccagcagcagcgacaacggcaccugcuaccccggcgacuucaucgacuacgaggagcugagagagcagcugagcagcgugagcagcuucgagagauucgagaucuuccccaagaccagcagcuggcccaaccacgacagcaacaagggcgugaccgccgccugcccccacgccggcgccaagagcuucuacaagaaccugaucuggcuggugaagaagggcaacagcuaccccaagcugagcaagagcuacaucaacgacaagggcaaggaggugcuggugcuguggggcauccaccaccccagcaccagcgccgaccagcagagccuguaccagaacgccgacgccuacguguucgugggcaccagcagauacagcaagaaguucaagcccgagaucgccaucagacccaaggugagagaccaggagggcagaaugaacuacuacuggacccugguggagcccggcgacaagaucaccuucgaggccaccggcaaccugguggugcccagauacgccuucgccauggagagaaacgccggcagcggcaucaucaucagcgacacccccgugcacgacugcaacaccaccugccagacccccaagggcgccaucaacaccagccugcccuuccagagcauccaccccaucaccaucggcaagugccccaaguacgugaagagcaccaagcugagacuggccaccggccugagaaacgugcccagcauccagagcagaggccuguucggcgccaucgccggcuucaucgagggcggcuggaccggcaugguggacggcugguacggcuaccaccaccagaacgagcagggcagcggcuacgccgccgaccugaagagcacccagaacgccaucgacaagaucaccaacaaggugaacagcgugaucgagaagaugaacacccaguucaccgccgugggcaaggaguucaaccaccuggagagaagaaucgagaaccugaacaagaagguggacgacggcuuccuggacaucuggaccuacaacgccgagcugcuggugcugcuggagaacgagagaacccuggacuaccacgacagcaacgugaagaaccuguacgagaaggugagaagccagcugaagaacaacgccaaggagaucggcaacggcugcuucgaguucuaccacaagugcgacaacaccugcauggagagcgugaagaacggcaccuacgacuaccccaaguacagcgaggaggccaagcugaacagagaggagaucgacggcgugaagcuggagagcaccagaguguaccagauccuggccaucuacagcaccguggccagcagccuggugcugguggugagccugggcgccaucagcuucuggaugugcagcaacggcagccugcagugcagaaucugcaucuga

SEQ ID NO: 165729 - RNA, 1701 nt, Artificial Sequence
  derived and/or modified CDS sequence (opt4) from hemagglutinin__InfluenzaA__ADM26282
augaaggccauccugguggugcugcuguacaccuucaccaccgccaacgccgacacccugugcaucggcuaccacgccaacaacagcaccgacaccguggacaccgugcuggagaagaacgugaccgugacccacagcgugaaccugcuggaggacaagcacaacggcaagcugugcaagcugagaggcguggccccccugcaccugggcaagugcaacaucgccggcuggauccugggcaaccccgagugcgagagccugagcaccgccagcagcuggagcuacaucguggagaccagcagcagcgacaacggcaccugcuaccccggcgacuucaucgacuacgaggagcugagagagcagcugagcagcgugagcagcuucgagagauucgagaucuuccccaagaccagcagcuggcccaaccacgacagcaacaagggcgugaccgccgccugcccccacgccggcgccaagagcuucuacaagaaccugaucuggcuggugaagaagggcaacagcuaccccaagcugagcaagagcuacaucaacgacaagggcaaggaggugcuggugcuguggggcauccaccaccccagcaccagcgccgaccagcagagccuguaccagaacgccgacgccuacguguucgugggcaccagcagauacagcaagaaguucaagcccgagaucgccaucagacccaaggugagagagcaggagggcagaaugaacuacuacuggacccugguggagcccggcgacaagaucaccuucgaggccaccggcaaccugguggugcccagauacgccuucgccauggagagaaacgccggcagcggcaucaucaucagcgacacccccgugcacgacugcaacaccaccugccagacccccaagggcgccaucaacaccagccugcccuuccagaacauccacagcaucaccaucggcaagugccccaaguacgugaagagcaccaagcugagacuggccaccggccugagaaacgugcccagcauccagagcagaggccuguucggcgccaucgccggcuucaucgagggcggcuggaccggcaugguggacggcugguacggcuaccaccaccagaacgagcagggcagcggcuacgccgccgaccugaagagcacccagaacgccaucgacgagaucaccaacaaggugaacagcgugaucgagaagaugaacacccaguucaccgccgugggcaaggaguucaaccaccuggagagaagaaucgagaaccugaacaagaagguggacgacggcuuccuggacaucuggaccuacaacgccgagcugcuggugcugcuggagaacgagagaacccuggacuaccacgacagcaacgugaagaaccuguacgagaaggugagaagccagcugaagaacaacgccaaggagaucggcaacggcugcuucgaguucuaccacaagugcgacaacaccugcauggagagcgugaagaacggcaccuacgacuaccccaaguacagcgaggaggccaagcugaacagagaggagaucgacggcgugaagcuggagagcaccagaaucuaccagauccuggccaucuacagcaccguggccagcagccuggugcugguggugagccugggcgccaucagcuucuggaugugcagcaacggcagccugcagugcagaaucugcaucuga

SEQ ID NO: 165730 - RNA, 1701 nt, Artificial Sequence
  derived and/or modified CDS sequence (opt4) from hemagglutinin__InfluenzaA__ADM26283
augaaggccauccugguggugcugcuguacaccuucaccaccgccaacgccgacacccugugcaucggcuaccacgccaacaacagcaccgacaccguggacaccgugcuggagaagaacgugaccgugacccacagcgugaaccugcuggaggacaagcacaacggcaagcugugcaagcugagaggcguggccccccugcaccugggcaagugcaacaucgccggcuggauccugggcaaccccgagugcgagagccugagcaccgccagcagcuggagcuacaucguggagaccagcagcagcgacaacggcaccugcuaccccggcgacuucaucgacuacgaggagcugagagagcagcugagcagcgugagcagcuucgagagauucgagaucuuccccaagaccagcagcuggcccaaccacgacagcaacaagggcgugaccgccgccugcccccacgccggcgccaagagcuucuacaagaaccugaucuggcuggugaagaagggcaacagcuaccccaagcugagcaagagcuacaucaacgacaagggcaaggaggugcuggugcuguggggcauccaccaccccagcaccagcgccgaccagcagagccuguaccagaacgccgacgccuacguguucgugggcaccagcagauacagcaagaaguucaagcccgagaucgccaucagacccaaggugagagagcaggagggcagaaugaacuacuacuggacccugguggagcccggcgacaagaucaccuucgaggccaccggcaaccugguggugcccagauacgccuucgccauggagagaaacgccggcagcggcaucaucaucagcgacacccccgugcacgacugcaacaccaccugccagacccccaagggcgccaucaacaccagccugcccuuccagaacauccacagcaucaccaucggcaagugccccaaguacgugaagagcaccaagcugagacuggccaccggccugagaaacgugcccagcauccagagcagaggccuguucggcgccaucgccggcuucaucgagggcggcuggaccggcaugguggacggcugguacggcuaccaccaccagaacgagcagggcagcggcuacgccgccgaccugaagagcacccagaacgccaucgacgagaucaccaacaaggugaacagcgugaucgagaagaugaacacccaguucaccgccgugggcaaggaguucaaccaccuggagaagagaaucgagaaccugaacaagaagguggacgacggcuuccuggacaucuggaccuacaacgccgagcugcuggugcugcuggagaacgagagaacccuggacuaccacgacagcaacgugaagaaccuguacgagaaggugagaagccagcugaagaacaacgccaaggagaucggcaacggcugcuucgaguucuaccacaagugcgacaacaccugcauggagagcgugaagaacggcaccuacgacuaccccaaguacagcgaggaggccaagcugaacagagagaagaucgacggcgugaagcuggagagcaccagaaucuaccagauccuggccaucuacagcaccguggccagcagccuggugcugguggugagccugggcgccaucagcuucuggaugugcagcaacggcagccugcagugcagaaucugcaucuga

SEQ ID NO: 165731 - RNA, 1701 nt, Artificial Sequence; identical to SEQ ID NO: 164758
  derived and/or modified CDS sequence (opt4) from hemagglutinin__InfluenzaA__ADM26284

SEQ ID NO: 165732 - RNA, 1701 nt, Artificial Sequence; identical to SEQ ID NO: 164758
  derived and/or modified CDS sequence (opt4) from hemagglutinin__InfluenzaA__ADM26285

SEQ ID NO: 165733 - RNA, 1701 nt, Artificial Sequence
  derived and/or modified CDS sequence (opt4) from hemagglutinin__InfluenzaA__ADM26784
augaagaccaucaucgcccugagcuacauccugugccugguguucgcccagaagcugcccggcaacgacaacagcaccgccacccugugccugggccaccacgccgugcccaacggcaccaucgugaagaccaucaccaacgaccagaucgaggugaccaacgccaccgagcuggugcagagcagcagcaccggcgagaucugcgacagcccccaccagauccuggacggcgagaacugcacccugaucgacgcccugcugggcgacccccagugcgacggcuuccagaacaagaagugggaccuguucguggagagaagcaaggccuacagcaacugcuaccccuacgacgugcccgacuacgccagccugagaagccugguggccagcagcggcacccuggaguucaacaacgagagcuucaacuggaccggcgugacccagaacggcaccagcagcgccugcaugagaagaagcaacaacagcuucuucagcagacugaacuggcugacccaccugaaguucaaguaccccgcccugaacgugaccaugcccaacaacgagcaguucgacaagcuguacaucuggggcgugcaccaccccggcaccgacaacgaccagaucuuccuguacgcccaggccagcggcagaaucaccgugagcaccaagagaagccagcagaccgugauccccaacaucggcagcagacccagagugagaaacauccccagcagaaucagcaucuacuggaccaucgugaagcccggcgacauccugcugaucaacagcaccggcaaccugaucgcccccagaggcuacuucaagaucagaagcggcaagagcagcaucaugagaagcgacgcccccaucggcaagugcaacagcgagugcaucacccccaacggcagcauccccaacgacaagcccuuccagaacgugaacagaaucaccuacggcgccugccccagauacgugaagcagaacacccugaagcuggccaccggcaugagaaacgugcccgagaagcagaccagaggcaucuucggcgccaucgccggcuucaucgagaacggcugggagggcaugguggacggcugguacggcuucagacaccagaacagcgagggcagaggccaggccgccgaccugaagagcacccaggccgccaucgaccagaucaacggcaagcugaacagacugaucggcaagaccaacgagaaguuccaccagaucgagaaggaguucagcgagguggagggcagaauccaggaccuggagaaguacguggaggacaccaagaucgaccuguggagcuacaacgccgagcugcugguggcccuggagaaccagcacaccaucgaccugaccgacagcgagaugaacaagcuguucgagaagaccaagaagcagcugagagagaacgccgaggacaugggcaacggcugcuucaagaucuaccacaagugcgacaacgccugcaucggcagcaucagaaacggcaccuacgaccacgacguguacagagacgaggcccugaacaacagauuccagaucaagggcguggagcugaagagcggcuacaaggacuggauccuguggaucagcuucgccaucagcugcuuccugcugugcguggcccugcugggcuucaucaugugggccugccagaagggcaacaucagaugcaacaucugcaucuga

SEQ ID NO: 165734 - RNA, 1701 nt, Artificial Sequence; identical to SEQ ID NO: 162494
  derived and/or modified CDS sequence (opt4) from hemagglutinin__InfluenzaA__ADM26795

SEQ ID NO: 165735 - RNA, 1701 nt, Artificial Sequence
  derived and/or modified CDS sequence (opt4) from hemagglutinin__InfluenzaA__ADM26817
augaagaccaccaucgcccugagccacauccugugccugguguucgcccagaagcugcccggcaacgacaacagcaccgccacccugugccugggccaccacgccgugcccaacggcaccaucgugaagaccaucaccaacgaccagaucgaggugaccaacgccaccgagcuggugcagagcagcagcgccggcgagaucugcgacagcccccaccagauccuggacggcgagaacugcacccugaucgacgcccugcugggcgacccccagugcgacggcuuccagaacaagaagugggaccuguucguggagagaagaagagccuacagcaacugcuaccccuacgacgugcccgacuacgccagccugagaagccugguggccagcagcggcacccuggaguucaacaacgagagcuucaacuggaccggcgugacccagaacggcaccagcagcgccugcaucagaagaagcaacaacagcuucuucagcagacugaacuggcugacccaccugaacuucaaguaccccgcccugaacgugaccaugcccaacaacgagcaguucgacaagcuguacaucuggggcgugcaccaccccggcaccgacaaggaccagaucuuccuguacgcccaggccagcggcagaaucaccgugagcaccaagagaagccagcaggccgugauccccaacaucggcagcagacccagagugagaaacauccccagcagaaucagcaucuacuggaccaucgugaagcccggcgacauccugcugaucaacagcaccggcaaccugaucgcccccagaggcuacuucaagaucagaagcggcaagagcagcaucaugagaagcgacgcccccaucggcaagugcaacagcgagugcaucacccccaacggcagcauccccaacgacaagcccuuccagaacgugaacagaaucaccuacggcgccugccccagauacgugaagcagagcacccugaagcuggccaccggcaugagaaacgugcccgagaagcagaccagaggcaucuucggcgccaucgccggcuucaucgagaacggcugggagggcaugguggacggcugguacggcuucagacaccagaacagcgagggcagaggccaggccgccgaccugaagagcacccaggccgccaucgaccagaucaacggcaagcugaacagacugaucggcaagaccaacgagaaguuccaccagaucgagaaggaguucagcgagguggagggcagaauccaggaccuggagaaguacguggaggacaccaagaucgaccuguggagcuacaacgccgagcugcugguggcccuggagaaccagcacaccaucgaccugaccgacagcgagaugaacaagcuguucgagaagaccaagaagcagcugagagagaacgccgaggacaugggcaacggcugcuucaagaucuaccacaagugcgacaacgccugcaucggcagcaucagaaacggcaccuacgaccacgacguguacagagacgaggcccugaacaacagauuccagaucaagggcguggagcugaagagcggcuacaaggacuggauccuguggaucagcuucgccaucagcugcuuccugcugugcguggcccugcugggcuucaucaugugggccugccagaagggcaacaucagaugcaacaucugcaucuga

SEQ ID NO: 165736 - RNA, 1704 nt, Artificial Sequence
  derived and/or modified CDS sequence (opt4) from hemagglutinin__InfluenzaA__ADM31424
auggagaagaucgugcugcuguucaccaccaucagccuggugaagagcgaccacaucugcaucggcuaccacgccaacaacagcaccgagcagguggacaccaucauggagaagaacgugaccgugacccacgcccaggacauccuggagaagacccacaacggcaagcugugcgaccugaacggcgugaagccccugauccugaaggacugcagcguggccggcuggcugcugggcaacccccugugcgacgaguucaucaacgugcccgaguggagcuacaucguggagaaggccaaccccgccaacgaccugugcuaccccggcaacuucaacgacuacgaggagcugaagcaccugcugagcagaaucaaccacuucgagaagauccagaucauccccaaggacagcuggagcgaccacgaggccagccugggcgugagcgccgccugcagcuaccagggcaacagcagcuucuucagaaacgugguguggcugaucaagaaggacaacgccuaccccaccaucaagaaggacuacaacaacaccaaccaggaggaccugcuggugcuguggggcauccaccaccccaacgacgaggccgagcagaccagacuguaccagaaccccaccaccuacaucagcaucggcaccagcacccugaaccagagacuggugcccaagaucgccaccagaagcaagaucaacggccagagcggcagaaucgacuucuucuggaccauccugaagcccaacgacgccauccacuucgagagcaacggcaacuucaucgcccccgaguacgccuacaagaucgugaagaagggcgacagcaccaucaugaagagcgagguggaguacggcaacugcaacaccagaugccagacccccaucggcgccaucaacagcagcaugcccuuccacaacauccacccccugaccaucggcgagugccccaaguacgugaagagcaacaagcuggugcuggccaccggccugagaaacagcccccagagagagagaagaagaaagagaggccuguucggcgccaucgccggcuucaucgagggcggcuggcagggcaugguggacggcugguacggcuaccaccacagcaacgagcagggcagcggcuacgccgccgacaaggagagcacccagaaggccaucgacggcgugaccaacaaggugaacagcaucaucgacaagaugaacacccaguucgaggccgugggcagagaguucaacaaccuggagagaagaaucgagaaccugaacaagaagauggaggacggcuuccuggacguguggaccuacaacgccgagcugcuggugcugauggagaacgagagaacccuggacuuccacgacagcaacgugaagaaccuguacgacaaggugagacugcagcugaaggacaacgccaaggagcugggcaacggcugcuucgaguucuaccacaagugcaacaacgagugcauggagagcgugagaaacggcaccuacgacuacccccaguacagcgaggaggccagacugaagagagaggagaucagcggcgugaagcuggagagcaucggcaucuaccagauccugagcaucuacagcaccguggccagcagccuggugcuggccaucaugauggccggccugagccuguggaugugcagcaacggcagccugcagugcagaaucugcaucuga

SEQ ID NO: 165737 - RNA, 1701 nt, Artificial Sequence; identical to SEQ ID NO: 165330
  derived and/or modified CDS sequence (opt4) from hemagglutinin__InfluenzaA__ADM31478

SEQ ID NO: 165738 - RNA, 1701 nt, Artificial Sequence
  derived and/or modified CDS sequence (opt4) from hemagglutinin__InfluenzaA__ADM31488
augaaggccauccugguggugcugcuguacaccuucgccaccgccaacgccgacacccugugcaucggcuaccacgccaacaacagcaccgacaccguggacaccgugcuggagaagaacgugaccgugacccacagcgugaacauccuggaggacaagcacaacggcaagcugugcaagcugagaggcguggccccccugcaccugggcaagugcaacaucgccggcuggauccugggcaaccccgagugcgagagccugagcaccgccagcagcuggagcuacaucguggagaccagcagcagcgacaacggcaccugcuaccccggcgacuucaucgacuacgaggagcugagagagcagcugagcagcgugagcagcuucgagagauucgagaucuuccccaagaccagcagcuggcccaaccacgacagcaacaagggcgugaccgccgccugcccccacgccggcgccaagagcuucuacaagaaccugaucuggcuggugaagaagggcaacagcuaccccaagcugagcaagagcuacaucaacgacaagggcaaggaggugcuggugcuguggggcauccaccaccccagcaccagcgccgaccagcagagccuguaccagaacgccgacgccuacguguucgugggcagcagcaaguacagcaagaaguucaagcccgagaucgccaucagacccaaggugagagaccaggagggcagaaugaacuacuacuggacccugguggagcccggcgacaagaucaccuucgaggccaccggcaaccugguggugcccagauacgccuucgccauggagagaaacgccggcagcggcaucaucaucagcgacacccccgugcacgacugcaacaccaccugccagacccccaagggcgccaucaacaccagccugcccuuccagaacauccaccccaucaccaucggcaagugccccaaguacgugaagagcaccaagcugagacuggccaccggccugagaaacgugcccagcauccagagcagaggccuguucggcgccaucgccggcuucaucgagggcggcuggaccggcaugguggacggcugguacggcuaccaccaccagaacgagcagggcagcggcuacgccgccgaccugaagagcacccagaacgccaucgacgagaucaccaacaaggugaacagcgugaucgagaagaugaacacccaguucaccgccgugggcaaggaguucaaccaccuggagaagagaaucgagaaccugaacaagaagguggacgacggcuuccuggacaucuggaccuacaacgccgagcugcuggugcugcuggagaacgagagaacccuggacuaccacgacagcaacgugaagaaccuguacgagaaggugagaagccagcugaagaacaacgccaaggaggugggcaacggcugcuucgaguucuaccacaagugcgacaacaccugcauggagagcgugaagaacggcaccuacgacuaccccaaguacagcgaggaggccaagcugaacagagaggagaucgacggcgugaagcuggagagcaccagaaucuaccagauccuggccaucuacagcaccgccgccagcagccuggugcugguggugagccugggcgccaucagcuucuggaugugcagcaacggcagccugcagugcagaaucugcaucuga

SEQ ID NO: 165739 - RNA, 1701 nt, Artificial Sequence
  derived and/or modified CDS sequence (opt4) from hemagglutinin__InfluenzaA__ADM31498
augaaggccauccugguggugcugcuguacaccuucgccaccgccaacgccgacacccugugcaucggcuaccacgccaacaacagcaccgacaccguggacaccgugcuggagaagaacgugaccgugacccacagcgugaaccugcuggaggacaagcacaacggcaagcugugcaagcugagaggcguggccccccugcaccugggcaagugcaacaucgccggcuggauccugggcaaccccgagugcgagagccugagcaccgccagcagcuggagcuacaucguggagaccagcagcagcgacaacggcaccugcuaccccggcgacuucaucgacuacgaggagcugagagagcagcugagcagcgugagcagcuucgagagauucgagaucuuccccaagaccagcagcuggcccaaccacgacagcaacaagggcgugaccgccgccugcccccacgccggcgccaagagcuucuacaagaaccugaucuggcuggugaagaagggcaacagcuaccccaagcugagcaagagcuacaucaacgacaagggcaaggaggugcuggugcuguggggcauccaccaccccagcaccagcgccgaccagcagagccuguaccagaacgccgacgccuacguguucgugggcaccagcagauacagcaagaaguucaagcccgagaucgccaucagacccaaggugagagaccaggagggcagaaugaacuacuacuggacccuggugaagcccggcgacaagaucaccuucgaggccaccggcaaccugguggugcccagauacgccuucgccauggagagaaacgccggcagcggcaucaucaucagcgacacccccgugcacgacugcaacaccaccugccagacccccaagggcgccaucaacaccagccugcccuuccagaacauccaccccaucaccaucggcaagugccccaaguacgugaagagcaccaagcugagacuggccaccggccugagaaacgugcccagcauccagagcagaggccuguucggcgccaucgccggcuucaucgagggcggcuggaccggcaugguggacggcugguacggcuaccaccaccagaacgagcagggcagcggcuacgccgccgaccugaagagcacccagcacgccaucgacgagaucaccaacaaggugaacagcgugaucgagaagaugaacacccaguucaccgccgugggcaaggaguucaaccaccuggagaagagaaucgagaaccugaacaagaagguggacgacggcuuccuggacaucuggaccuacaacgccgagcugcuggugcugcuggagaacgagagaacccuggacuaccacgacagcaacgugaagaaccuguacgagaaggugagaagccagcugaagaacaacgccaaggagaucggcaacggcugcuucgaguucuaccacaagugcgacaacaccugcauggagagcgugaagaacggcaccuacgacuaccccaaguacagcgaggaggccaagcugaacagagaggagaucgacggcgugaagcuggagagcaccagaaucuaccagauccuggccaucuacagcaccguggccagcagccuggugcugguggugagccugggcgccaucagcuucuggaugugcagcaacggcagccugcagugcagaaucugcaucuga

SEQ ID NO: 165740 - RNA, 1701 nt, Artificial Sequence
  derived and/or modified CDS sequence (opt4) from hemagglutinin__InfluenzaA__ADM31508
augaaggccauccugguggugcugcuguacaccuucgccaccgccaacgccgacacccugugcaucggcuaccacgccaacaacagcaccgacaccguggacaccgugcuggagaagaacgugaccgugacccacagcgugaaccugcuggaggacaagcacaacggcaagcugugcaagcugagaggcguggccccccugcaccugggcaagugcaacaucgccggcuggauccugggcaaccccgagugcgagagccugagcaccgccagcagcuggagcuacaucguggagaccagcagcagcgacaacggcaccugcuaccccggcgacuucaucgacuacgaggagcugagagagcagcugagcagcgugagcagcuucgagagauucgagaucuuccccaagaccagaagcuggcccaaccacgacagcaacaagggcgugaccgccgccugcccccacgccggcgccaagagcuucuacaagagccugaucuggcuggugaagaagggcaacagcuaccccaagcugagcaagagcuacaucaacgacaagggcaaggaggugcuggugcuguggggcauccaccaccccagcaccagcgccgaccagcagagccuguaccagaacgccgacgccuacguguucgugggcaccagcagauacagcaagaaguucaagcccgagaucgccaucagacccaaggugagagaccaggagggcagaaugaacuacuacuggacccugguggagcccggcgacaagaucaccuucgaggccaccggcaaccugguggugcccagauacgccuucgccauggagagaaacgccggcagcggcaucaucaucagcgacacccccgugcacgacugcaacaccaccugccagacccccaagggcgccaucaacaccagccugcccuuccagaacauccaccccaucaccaucggcaagugccccaaguacgugaagagcaccaagcugagacuggccaccggccugagaaacgugcccagcauccagagcagaggccuguucggcgccaucgccggcuucaucgagggcggcuggaccggcaugguggacggcugguacggcuaccaccaccagaacgagcagggcagcggcuacgccgccgaccugaagagcacccagcacgccaucgacgagaucaccaacaaggugaacagcgugaucgagaagaugaacacccaguucaccgccgugggcaaggaguucaaccaccuggagaagagaaucgagaaccugaacaagaagguggacgacggcuuccuggacaucuggaccuacaacgccgagcugcuggugcugcuggagaacgagagaacccuggacuaccacgacagcaacgugaagaaccuguacgagaaggugagaagccagcugaagaacaacgccaaggagaucggcaacggcugcuucgaguucuaccacaagugcgacaacaccugcauggagagcgugaagaacggcaccuacgacuaccccaaguacagcgaggaggccaagcugaacagagaggagaucgacggcgugaagcuggagagcaccagaaucuaccagauccuggccaucuacagcaccguggccagcagccuggugcugguggugagccugggcgccaucagcuucuggaugugcagcaacggcagccugcagugcagaaucugcaucuga

SEQ ID NO: 165741 - RNA, 1701 nt, Artificial Sequence
  derived and/or modified CDS sequence (opt4) from hemagglutinin__InfluenzaA__ADM31518
augaaggccauccugguggugcugcuguacaccuucgccaccgccaacgccgacacccugugcaucggcuaccacgccaacaacagcaccgacaccguggacaccgugcuggagaagaacgugaccgugacccacagcgugaaccugcuggaggacaagcacaacggcaagcugugcaagcugagaggcguggccccccugcaccugggcaagugcaacaucgccggcuggauccugggcaaccccgagugcgagagccugagcaccgccagcagcuggagcuacaucguggagaccagcagcagcgacaacggcaccugcuaccccggcgacuucaucgacuacgaggagcugagagagcagcugagcagcgugagcagcuucgagagauucgagaucuuccccaagaccagcagcuggcccaaccacgacagcaacaagggcgugaccgccgccugcccccacgccggcgccaagagcuucuacaagaaccugaucuggcuggugaagaagggcaacagcuaccccaagcugagcaagagcuacgugaacgacaagggcaaggaggugcuggugcuguggggcauccaccaccccagcaccagcgccgaccagcagagccuguaccagaacgccgacgccuacguguucgugggcaccagcagauacagcaagaaguucaagcccgagaucgccaucagacccaaggugagagaccaggagggcagaaugaacuacuacuggacccugguggagcccggcgacaagaucaccuucgaggccaccggcaaccugguggugcccagauacgccuucgccauggagagaaacgccggcagcggcaucaucaucagcgacacccccgugcacgacugcaacaccaccugccagacccccaagggcgccaucaacaccagccugcccuuccagaacauccaccccaucaccaucggcaagugccccaaguacgugaagagcaccaagcugagacuggccaccggccugagaaacauccccagcauccagagcagaggccuguucggcgccaucgccggcuucaucgagggcggcuggaccggcaugguggacggcugguacggcuaccaccaccagaacgagcagggcagcggcuacgccgccgaccugaagagcacccagaacgccaucgacgagaucaccaacaaggugaacagcgugaucgagaagaugaacacccaguucaccgccgugggcaaggaguucaaccaccuggagaagagaaucgagaaccugaacaagaagguggacgacggcuuccuggacaucuggaccuacaacgccgagcugcuggugcugcuggagaacgagagaacccuggacuaccacgacagcaacgugaagaaccuguacgagaaggugagaagccagcugaagaacaacgccaaggagaucggcaacggcugcuucgaguucuaccacaagugcgacaacaccugcauggagagcgugaagaacggcaccuacgacuaccccaaguacagcgaggaggccaagcugaacagagaggagaucgacggcgugaagcuggagagcaccagaaucuaccagauccuggccaucuacagcaccguggccagcagccuggugcugguggugagccugggcgccaucagcuucuggaugugcagcaacggcagccugcagugcagaaucugcaucuga

SEQ ID NO: 165742 - RNA, 1701 nt, Artificial Sequence
  derived and/or modified CDS sequence (opt4) from hemagglutinin__InfluenzaA__ADM31528
augaaggccauccugguggugcugcuguacaccuucgccaccgccaacgccgacacccugugcaucggcuaccacgccaacaacagcaccgacaccguggacaccgugcuggagaagaacgugaccgugacccacagcgugaaccugcuggaggacaagcacaacggcaagcugugcaagcugagaggcguggccccccugcaccugggcaagugcaacaucgccggcuggauccugggcaaccccgagugcgagagccugagcaccgccagcagcuggagcuacaucguggagaccagcagcagcgacaacggcaccugcuaccccggcgacuucaucgacuacgaggagcugagagagcagcugagcagcgugagcagcuucgagagauucgagauguuccccaagaccagcagcuggcccaaccacgacagcaacaagggcgugaccgccgccugcccccacgccggcgccaagagcuucuacaagaaccugaucuggcuggugaagaagggcaacagcuaccccaagcugagcaagagcuacaucaacgacaagggcaaggaggugcuggugcuguggggcauccaccaccccagcaccagcgccgaccagcagagccuguaccagaacgccgacgccuacguguucgugggcaccagcagauacagcaagaaguucaagcccgagaucgccaucagacccaaggugagagaccaggagggcagaaugaacuacuacuggacccugguggagcccggcgacaagaucaccuucgaggccaccggcaaccugguggugcccagauacgccuucgccauggagagaaacgccggcagcggcaucaucaucagcgacacccccgugcacgacugcaacaccaccugccagacccccaagggcgccaucaacaccagccugcccuuccagaacauccaccccaucaccaucggcaagugccccaaguacgugaagagcaccaagcugagacuggccaccggccugagaaacgugcccagcauccagagcagaggccuguucggcgccaucgccggcuucaucgagggcggcuggaccggcaugguggacggcugguacggcuaccaccaccagaacgagcagggcagcggcuacgccgccgaccugaagagcacccagaacgccaucgacaagaucaccaacaaggugaacagcgugaucgagaagaugaacacccaguucaccgccgugggcaaggaguucaaccaccuggagaagagaaucgagaaccugaacaagaagguggacgacggcuuccuggacaucuggaccuacaacgccgagcugcuggugcugcuggagaacgagagaacccuggacuaccacgacagcaacgugaagaaccuguacgagaaggugagaagccagcugaagaacaacgccaaggaggugggcaacggcugcuucgaguucuaccacaagugcgacaacaccugcauggagagcgugaagaacggcaccuacgacuaccccaaguacagcgaggaggccaagcugaacagagaggagaucgacggcgugaagcuggagagcaccagaaucuaccagauccuggccaucuacagcaccguggccagcagccuggugcugguggugagccugggcgccaucagcuucuggaugugcagcaacggcagccugcagugcagaaucugcaucuga

SEQ ID NO: 165743 - RNA, 1701 nt, Artificial Sequence
  derived and/or modified CDS sequence (opt4) from hemagglutinin__InfluenzaA__ADM31538
augaaggccauccugguggugcugcuguacaccuucgccaccgccaacgccgacacccugugcaucggcuaccacgccaacaacagcaccgacaccguggacaccgugcuggagaagaacgugaccgugacccacagcgugaaccugcuggaggacaagcacgacggcaagcugugcaagcugagaggcguggccccccugcaccugggcaagugcaacaucgccggcuggauccugggcaaccccgagugcgagagccugagcaccgccagcagcuggagcuacaucguggagaccagcagcagcgacaacggcaccugcuaccccggcgacuucaucgacuacgaggagcugagagagcagcugagcagcgugagcagcuucgagagauucgagaucuuccccaagaccagcagcuggcccaaccacgacagcaacaagggcgugaccgccgccugcccccacgccggcgccaagagcuucuacaagaaccugaucuggcuggugaagaagggcaacagcuaccccaagcugagcaagagcuacaucaacgacaagggcaaggaggugcuggugcuguggggcauccaccaccccagcaccagcgccgaccagcagagccuguaccagaacgccgacgccuacguguucgugggcaccagcagauacagcaagaaguucaagcccgagaucgccaucagacccaaggugagagaccaggagggcagaaugaacuacuacuggacccugguggagcccggcgacaagaucaccuucgaggccaccggcaaccugguggugcccagauacgccuucgccauggagagaaacgccggcagcggcaucaucaucagcgacacccccgugcacgacugcaacaccaccugccagacccccaagggcgccaucaacaccagccugcccuuccagaacauccaccccaucaccaucggcaagugccccaaguacgugaagagcaccaagcugagacuggccaccggccugagaaacauccccagcauccagagcagaggccuguucggcgccaucgccggcuucaucgagggcggcuggaccggcaugguggacggcugguacggcuaccaccaccagaacgagcagggcagcggcuacgccgccgaccugaagagcacccagaacgccaucgacaagaucaccaacaaggugaacagcgugaucgagaagaugaacacccaguucaccgccgugggcaaggaguucaaccaccuggagaagagaaucgagaaccugaacaagaagguggacgacggcuuccuggacaucuggaccuacaacgccgagcugcuggugcugcuggagaacgagagaacccuggacuaccacgacagcaacgugaagaaccuguacgagaaggugagaagccagcugaagaacaacgccaaggagaucggcaacggcugcuucgaguucuaccacaagugcgacaacaccugcauggagagcgugaagaacggcaccuacgacuaccccaaguacagcgaggaggccaagcugaacagagaggagaucgacggcgugaagcuggagagcaccagaaucuaccagauccuggccaucuacagcaccguggccagcagccuggugcugguggugagccugggcgccaucagcuucuggaugugcagcaacggcagccugcagugcagaaucugcaucuga

SEQ ID NO: 165744 - RNA, 1701 nt, Artificial Sequence
  derived and/or modified CDS sequence (opt4) from hemagglutinin__InfluenzaA__ADM31548
augaaggccauccugguggugcugcuguacaccuucgccaccgccaacgccgacacccugugcaucggcuaccacgccaacaacagcaccgacaccguggacaccgugcuggagaagaacgugaccgugacccacagcgugaaccugcuggaggacaagcacaacggcaagcugugcaagcugagaggcguggccccccugcaccugggcaagugcaacaucgccggcuggauccugggcaaccccgagugcgagagccugagcaccgccagcagcuggagcuacaucguggagaccagcagcagcgacaacggcaccugcuaccccggcgacuucaucgacuacgaggagcugagagagcagcugagcagcgugagcagcuucgagagauucgagaucuuccccaagaccagcagcuggcccaaccacgacagcaacaagggcgugaccgccgccugcccccacgccggcgccaagagcuucuacaagaaccugaucuggcuggugaagaagggcaacagcuaccccaagcugagcaagagcuacaucaacgacaagggcaaggaggugcuggugcuguggggcauccaccaccccagcaccagcgccgaccagcagagccuguaccagaacgccgacgccuacguguucgugggcaccagcagauacagcaagaaguucaagcccgagguggccaucagacccaaggugagagaccaggagggcagaaugaacuacuacuggacccugguggagcccggcgacaagaucaccuucgaggccaccggcaaccugguggugcccagauacgccuucgccauggagagaaacgccggcagcggcaucaucaucagcgacacccccgugcacgacugcaacaccaccugccagacccccaagggcgccaucaacaccagccugcccuuccagaacauccaccccaucaccaucggcaagugccccaaguacgugaagagcaccaagcugagacuggccaccggccugagaaacauccccagcauccagagcagaggccuguucggcgccaucgccggcuucaucgagggcggcuggaccggcaugguggacggcugguacggcuaccaccaccagaacgagcagggcagcggcuacgccgccgaccugaagagcacccagaacgccaucgacgagaucaccaacaaggugaacagcgugaucgagaagaugaacacccaguucaccgccgugggcaaggaguucaaccaccuggagaagagaaucgagaaccugaacaagaagguggacgacggcuuccuggacaucuggaccuacaacgccgagcugcuggugcugcuggagaacgagagaacccuggacuaccacgacagcaacgugaagaaccuguacgagaaggugagaagccagcugaagaacaacgccaaggagaucggcaacggcugcuucgaguucuaccacaagugcgacaacaccugcauggagagcgugaagaacggcaccuacgacuaccccaaguacagcgaggaggccaagcugaacagagaggagaucgacggcgugaagcuggagagcaccagaaucuaccagauccuggccaucuacagcaccguggccagcagccuggugcugguggugagccugggcgccaucagcuucuggaugugcagcaacggcagccugcagugcagaaucugcaucuga

SEQ ID NO: 165745 - RNA, 1701 nt, Artificial Sequence
  derived and/or modified CDS sequence (opt4) from hemagglutinin__InfluenzaA__ADM31558
augaaggccauccugguggugcugcuguacaccuucgccaccgccaacgccgacacccugugcaucggcuaccacgccaacaacagcaccgacaccguggacaccgugcuggagaagaacgugaccgugacccacagcgugaaccugcuggaggacaagcacaacggcaagcugugcaagcugagaggcguggccccccugcaccugggcaagugcaacaucgccggcuggauccugggcaaccccgagugcgagagccugagcaccgccagcagcuggagcuacaucguggagaccagcagcagcgacaacggcaccugcuaccccggcgacuucaucgacuacgaggagcugagagagcagcugagcagcgugagcagcuucgagagauucgagaucuuccccaagaccagcagcuggcccaaccacgacagcaacaagggcgugaccgccgccugcccccacgccggcgccaagagcuucuacaagaaccugaucuggcuggugaagaagggcaacagcuaccccaagcugagcaagagcuacaucaacgacaagggcaaggaggugcuggugcuguggggcauccaccaccccagcaccagcgccgaccagcagagccuguaccagaacgccgacgccuacguguucgugggcaccagcagauacagcaagaaguucaagcccgagaucgccaucagacccaaggugagagaccaggagggcagaaugaacuacuacuggacccugguggagcccggcgacaagaucaccuucgaggccaccggcaaccugguggugcccagauacgccuucgccauggagagaaacgccggcagcggcaucaucaucagcgacacccccgugcacgacugcaacaccaccugccagacccccaagggcgccaucaacaccagccugcccuuccagaacauccaccccaucaccaucggcaagugccccaaguacgugaagagcaccaagcugagacuggccaccggccugagaaacauccccagcauccagagcagaggccuguucggcgccaucgccggcuucaucgagggcggcuggaccggcaugguggacggcugguacggcuaccaccaccagaacgagcagggcagcggcuacgccgccgaccugaagagcacccagaacgccaucgacaagaucaccaacaaggugaacagcgugaucgagaagaugaacacccaguucaccgccgugggcaaggaguucaaccaccuggagaagagaaucgagaaccugaacaagaagguggacgacggcuuccuggacaucuggaccuacaacgccgagcugcuggugcugcuggagaacgagagaacccuggacuaccacgacagcaacgugaagaaccuguacgagaaggugagaagccagcugaagaacaacgccaaggagaucagaaacggcugcuucgaguucuaccacaagugcgacaacaccugcauggagagcgugaagaacggcaccuacgacuaccccaaguacagcgaggaggccaagcugaacagagaggagaucgacggcgugaagcuggagagcaccagaaucuaccagauccuggccaucuacagcaccguggccagcagccuggugcugguggugagccugggcgccaucagcuucuggaugugcagcaacggcagccugcagugcagaaucugcaucuga

SEQ ID NO: 165746 - RNA, 1701 nt, Artificial Sequence; identical to SEQ ID NO: 164326
  derived and/or modified CDS sequence (opt4) from hemagglutinin__InfluenzaA__ADM31568

SEQ ID NO: 165747 - RNA, 1701 nt, Artificial Sequence; identical to SEQ ID NO: 162729
  derived and/or modified CDS sequence (opt4) from hemagglutinin__InfluenzaA__ADM31578

SEQ ID NO: 165748 - RNA, 1701 nt, Artificial Sequence
  derived and/or modified CDS sequence (opt4) from hemagglutinin__InfluenzaA__ADM31588
augaaggccauccugguggugcugcuguacaccuucgccaccgccaacgccgacacccugugcaucggcuaccacgccaacaacagcaccgacaccguggacaccauccuggagaagaacgugaccgugacccacagcgugaaccugcuggaggacaagcacaacggcaagcugugcaagcugagaggcguggccccccugcaccugggcaagugcaacaucgccggcuggauccugggcaaccccgagugcgagagccugagcaccgccagcagcuggagcuacaucguggagaccagcagcagcgacaacggcaccugcuaccccggcgacuucaucgacuacgaggagcugagagagcagcugagcagcgugagcagcuucgagagauucgagauguuccccaagaccagcagcuggcccaaccacgacagcaacaagggcgugaccgccgccugcccccacgccggcgccaagagcuucuacaagaaccugaucuggcuggugaagaagggcaacagcuaccccaagcugaacaagagcuacaucaacgacaagggcaaggaggugcuggugcuguggggcauccaccaccccagcaccagcgccgaccagcagagccuguaccagaacgccgacgccuacguguucgugggcaccagcagauacagcaagaaguucaagaccgagaucgccaucagacccaaggugagagaccaggagggcagaaugaacuacuacuggacccugguggagcccggcgacaagaucaccuucgaggccaccggcaaccugguggugcccagauacgccuucgccauggagagaaacgccggcagcggcaucaucaucagcgacacccccgugcacgacugcaacaccaccugccagacccccaagggcgccaucaacaccagccugcccuuccagaacauccaccccaucaccaucggcaagugccccaaguacgugaagagcaccaagcugagacuggccaccggccugagaaacgugcccagcauccagagcagaggccuguucggcgccaucgccggcuucaucgagggcggcuggaccggcaugguggacggcugguacggcuaccaccaccagaacgagcagggcagcggcuacgccgccgaccugaagagcacccagaacgccaucgacgagaucaccaacaaggugaacagcgugaucgagaagaugaacacccaguucaccgccgugggcaaggaguucaaccaccuggagaagagaaucgagaaccugaacaagaagguggacgacggcuuccuggacaucuggaccuacaacgccgagcugcuggugcugcuggagaacgagagaacccuggacuaccacgacagcaacgugaagaaccuguacgagaaggugagaagccagcugaagaacaacgccaaggaggugggcaacggcugcuucgaguucuaccacaagugcgacaacaccugcauggagagcgugaagaacggcaccuacgacuaccccaaguacagcgaggaggccaagcugaacagagaggagaucgacggcgugaagcuggagagcaccagaaucuaccagauccuggccaucuacagcaccguggccagcagccuggugcugguggugagccugggcgccaucagcuucuggaugugcagcaacggcagccugcagugcagaaucugcaucuga

SEQ ID NO: 165749 - RNA, 1701 nt, Artificial Sequence
  derived and/or modified CDS sequence (opt4) from hemagglutinin__InfluenzaA__ADM31598
augaacgccauccugguggugcugcuguacaccuucgccaccgccaacgccgacacccugugcaucggcuaccacgccaacaacagcaccgacaccguggacacccugcuggagaagaacgugaccgugacccacagcgugaaccugcuggaggacaagcacaacggcaagcugugcaagcugagaggcguggccccccugcaccugggcaagugcgacaucgccggcuggauccugggcaaccccgagugcgagagccugagcaccgccagcagcuggagcuacaucguggagaccagcagcagcgacaacggcaccugcuaccccggcgacuucaucgacuacgaggagcugagagagcagcugagcagcgugagcagcuucgagagauucgagaucuuccccaagaccagcagcuggcccgaccacgacagcaacaagggcgugaccgccgccugcccccacgccggcgccaagagcuucuacaagaaccugaucuggcuggugaagaagggcaacagcuaccccaagcugagcaagagcuacaucaacgacaagggcaaggaggugcuggugcuguggggcauccaccaccccagcaccagcgccgaccagcagagccuguaccagaacgccgacgccuacguguucgugggcaccagcagauacagcaagaaguucaagcccgagaucgccaucagacccaaggugagagaccaggagggcagaaugaacuaccacuggacccugguggagcccggcgacaagaucaccuucgaggccaccggcaaccugguggugcccagauacgccuucgccauggagagaaacgccggcagcggcaucaucaucagcgacgcccccgugcacgacugcaacaccaccugccagacccccaagggcgccaucaacaccagccugcccuuccagaacauccaccccaucaccaucggcaagugccccaaguacgugaagagcaccaagcugagacuggccaccggccugagaaacgugcccagcauccagagcagaggccuguucggcgccaucgccggcuucaucgagggcggcuggaccggcaugguggacggcugguacggcuaccaccaccagaacgagcagggcagcggcuacgccgccgaccugaagagcacccagaacgccaucgacgagaucaccaacaagaucaacagcgugaucgagaagaugaacacccaguucaccgccgugggcaaggaguucaaccaccuggagaagagaaucgagaaccugaacaagaagguggacgacggcuuccuggacaucuggaccuacaacgccgagcugcuggugcugcuggagaacgagagaacccuggacuaccacgacagcaacgugaagaaccuguacgagaaggugagaagccagcugaagaacaacgccaaggagaucggcaacggcugcuucgaguucuaccacaagugcgacaacaccugcauggagagcgugaagaacggcaccuacgacuaccccaaguacagcgaggaggccaagcugaacagagaggagaucgacggcgugaagcuggagagcaccagaaucuaccagauccuggccaucuacagcaccguggccagcagccuggugcugguggugagccugggcgccaucagcuucuggaugugcagcaacggcagccugcagugcagaaucugcaucuga

SEQ ID NO: 165750 - RNA, 1701 nt, Artificial Sequence
  derived and/or modified CDS sequence (opt4) from hemagglutinin__InfluenzaA__ADM31608
augaaggccauccugguggugcugcuguacaccuucgccaccgugaacgccgacacccugugcaucggcuaccacgccaacaacagcaccgacaccguggacaccgugcuggagaagaacgugaccgugacccacagcgugaaccugcuggaggacaagcacaacggcaagcugugcaagcugagaggcguggccccccugcaccugggcaagugcaacaucgccggcuggauccugggcaaccccgagugcgagagccugagcaccgccagcagcuggagcuacaucguggagaccagcagcagcgacaacggcaccugcuaccccggcgacuucaucgacuacgaggagcugagagagcagcugagcagcgugagcagcuucgagagauucgagaucuuccccaagaccagcagcuggcccaaccacgacagcaacaagggcgugaccgccgccugcccccacgccggcgccaagagcuucuacaagaaccugaucuggcuggugaagaagggcaacagcuaccccaagcugagcaagagcuacaucaacgacaagggcaaggaggugcuggugcuguggggcauccaccaccccagcaccagcgccgaccagcagagccuguaccagaacgccgacgccuacguguucgugggcaccagcagauacagcaagaaguucaagcccgagaucgccaucagacccaaggugagagaccaggagggcagaaugaacuacuacuggacccugguggagcccggcgacaagaucaccuucgaggccaccggcaaccugguggugcccagauacgccuucgccauggagagaaacgccggcagcggcaucaucaucagcgacacccccgugcacgacugcaacaccaccugccagacccccaagggcgccaucaacaccagccugcccuuccagaacauccaccccaucaccaucggcaagugccccaaguacgugaagagcaccaagcugagacuggccaccggccugagaaacgugcccagcauccagagcagaggccuguucggcgccaucgccggcuucaucgagggcggcuggaccggcaugguggacggcugguacggcuaccaccaccagaacgagcagggcagcggcuacgccgccgaccugaagagcacccagaacgccaucgacaagaucaccaacaaggugaacagcgugaucgagaagaugaacacccaguucaccgccgugggcaaggaguucaaccaccuggagaagagaaucgagaaccugaacaagaagguggacgacggcuuccuggacaucuggaccuacaacgccgagcugcuggugcugcuggagaacgagagaacccuggacuaccacgacagcaacgugaagaaccuguacgagaaggugagaagccagcugaagaacaacgccaaggagaucggcaacggcugcuucgaguucuaccacaagugcgacaacaccugcauggagagcgugaagaacggcaccuacgacuaccccaaguacagcgaggaggccaagcugaacagagaggagaucgacggcgugaagcuggagagcaccagaaucuaccagauccuggccaucuacagcaccguggccagcagccuggugcugguggugagccugggcgccaucagcuucuggaugugcagcaacggcagccugcagugcagaaucugcaucuga

SEQ ID NO: 165751 - RNA, 1701 nt, Artificial Sequence; identical to SEQ ID NO: 164281
  derived and/or modified CDS sequence (opt4) from hemagglutinin__InfluenzaA__ADM31618

SEQ ID NO: 165752 - RNA, 1701 nt, Artificial Sequence; identical to SEQ ID NO: 163893
  derived and/or modified CDS sequence (opt4) from hemagglutinin__InfluenzaA__ADM31628

SEQ ID NO: 165753 - RNA, 1701 nt, Artificial Sequence; identical to SEQ ID NO: 165632
  derived and/or modified CDS sequence (opt4) from hemagglutinin__InfluenzaA__ADM31638

SEQ ID NO: 165754 - RNA, 1701 nt, Artificial Sequence; identical to SEQ ID NO: 164149
  derived and/or modified CDS sequence (opt4) from hemagglutinin__InfluenzaA__ADM31648

SEQ ID NO: 165755 - RNA, 1701 nt, Artificial Sequence; identical to SEQ ID NO: 164896
  derived and/or modified CDS sequence (opt4) from hemagglutinin__InfluenzaA__ADM31658

SEQ ID NO: 165756 - RNA, 1701 nt, Artificial Sequence; identical to SEQ ID NO: 164149
  derived and/or modified CDS sequence (opt4) from hemagglutinin__InfluenzaA__ADM31668

SEQ ID NO: 165757 - RNA, 1701 nt, Artificial Sequence; identical to SEQ ID NO: 162729
  derived and/or modified CDS sequence (opt4) from hemagglutinin__InfluenzaA__ADM31688

SEQ ID NO: 165758 - RNA, 1701 nt, Artificial Sequence
  derived and/or modified CDS sequence (opt4) from hemagglutinin__InfluenzaA__ADM31698
augaaggccauccugguggugcugcuguacaccuucgccaccgccaacgccgacacccugugcaucggcuaccacgccaacaacagcaccgacaccguggacaccgugcuggagaagaacgugaccgugacccacagcgugaaccugcuggaggacaagcacaacggcaagcugugcaagcugagaggcguggccccccugcaccugggcaagugcaacaucgccggcuggauccugggcaaccccgagugcgagagccugagcaccgccagcagcuggagcuacaucguggagaccagcagcagcgacaacggcaccugcuaccccggcgacuucaucgacuacgaggagcugagagagcagcugagcagcgugagcagcuucgagagauucgagaucuuccccaagaccagcagcuggcccaaccacgacagcaacaagggcgugaccgccgccugcccccacgccggcgccaagagcuucuacaagaaccugaucuggcuggugaagaagggcaacagcuaccccaagcugagcaagagcuacaucaacgacaagggcaaggaggugcuggugcuguggggcauccaccaccccagcaccagcgccgaccagcagagccuguaccagaacgccgacgccuacguguucgugggcaccagcagauacagcaagaaguucaagcccgagaucgccaucagacccaaggugagagaccaggagggcagaaugaacuacuacuggacccugguggagcccggcgacaagaucaccuucgaggccaccggcaaccugguggugcccagauacgccuucgccauggagagaaacgccggcagcggcaucaucaucagcgacacccccgugcacgacugcaacaccaccugccagacccccaagggcgccaucaacaccagccugcccuuccagaacauccaccccaucaccaucggcaagugccccaaguacgugaagagcaccaagcugagacuggccaccggccugagaaacauccccagcauccagagcagaggccuguucggcgccaucgccggcuucaucgagggcggcuggaccggcaugguggacggcugguacggcuaccaccaccagaacgagcagggcagcggcuacgccgccgaccugaagagcacccagaacgccaucgacaagaucaccaacaaggugaacagcgugaucgagaagaugaacacccaguucaccgccgugggcaaggaguucaaccaccuggagaagagaaucgagaaccugaacaagaagguggacgacggcuuccuggacaucuggaccuacaacgccgagcugcuggugcugcuggagaacgagagaacccuggacuaccacgacagcaacgugaagaaccuguacgagaaggugagaagccagcugaagaacaacgccaaggagaucggcaacggcugcuucgaguucuaccacaagugcgacaacaccugcauggagagcgugaagaacggcaccuacgacuaccccaaguacagcgaggaggccaagcugaacagagaggagaucgacggcgugaagcuggagagcaccagaaucuaccagauccuggccaucuacagcaccguggccagcagccugauccugguggugagccugggcgccaucagcuucuggaugugcagcaacggcagccugcagugcagaaucugcaucuga

SEQ ID NO: 165759 - RNA, 1701 nt, Artificial Sequence; identical to SEQ ID NO: 165634
  derived and/or modified CDS sequence (opt4) from hemagglutinin__InfluenzaA__ADM31708

SEQ ID NO: 165760 - RNA, 1701 nt, Artificial Sequence
  derived and/or modified CDS sequence (opt4) from hemagglutinin__InfluenzaA__ADM31718
augaaggccauccugguggugcugcuguacaccuucgccaccgccaacgccgacacccugugcaucggcuaccacgccaacaacagcaccgacaccguggacaccgugcuggagaagaacgugaccgugacccacagcgugaaccugcuggaggacaagcacaacggcaagcugugcaagcugagaggcguggccccccugcaccugggcaagugcaacaucgccggcuggauccugggcaaccccgagugcgagagccugagcaccgccagcagcuggagcuacaucguggagaccagcagcagcgacaacggcaccugcuaccccggcgacuucaucgacuacgaggagcugagagagcagcugagcagcgugagcagcuucgagagauucgagaucuuccccaagaccagcagcuggcccaaccacgacagcaacaagggcgugaccgccgccugcccccacgccggcgccaagagcuucuacaagaaccugaucuggcuggugaagaagggcaacagcuaccccaagcugagcaagagcuacaucaacgacaagggcaaggaggugcuggugcuguggggcauccaccaccccagcaccagcgccgaccagcagagccuguaccagaacgccgacaccuacguguucgugggcaccagcagauacagcaagaaguucaagcccgagaucgccaucagacccaaggugagagaccaggagggcagaaugaacuacuacuggacccugguggagcccggcgacaagaucaccuucgaggccaccggcaaccugguggugcccagauacgccuucgccauggagagaaacgccggcagcggcaucaucaucagcgacacccccgugcacgacugcaacaccaccugccagacccccaagggcgccaucaacaccagccugcccuuccagaacauccaccccaucaccaucggcaagugccccaaguacgugaagagcaccaagcugagacuggccaccggccugagaaacgugcccagcauccagagcagaggccuguucggcgccaucgccggcuucaucgagggcggcuggaccggcaugguggacggcugguacggcuaccaccaccagaacgagcagggcagcggcuacgccgccgaccugaagagcacccagaacgccaucgacaagaucaccaacaaggugaacagcgugaucgagaagaugaacacccaguucaccgccgugggcaaggaguucaaccaccuggagaagagaaucgagaaccugaacaagaagguggacgacggcuuccuggacaucuggaccuacaacgccgagcugcuggugcugcuggagaacgagagaacccuggacuaccacgacagcaacgugaagaaccuguacgagaaggugagaagccagcugaagaacaacgccaaggagaucggcaacggcugcuucgaguucuaccacaagugcgacaacaccugcauggagagcgugaagaacggcaccuacgacuaccccaaguacagcgaggaggccaagcugaacagagaggagaucgacggcgugaagcuggagagcaccagaaucuaccagauccuggccaucuacagcaccguggccagcagccuggugcugguggugagccugggcgccaucagcuucuggaugugcagcaacggcagccugcagugcagaaucugcaucuga

SEQ ID NO: 165761 - RNA, 1701 nt, Artificial Sequence
  derived and/or modified CDS sequence (opt4) from hemagglutinin__InfluenzaA__ADM31728
augaaggccauccugaucgugcugcuguacaccuucgccaccgccaacgccgacacccugugcaucggcuaccacgccaacaacagcaccgacaccguggacaccgugcuggagaagaacgugaccgugacccacagcgugaaccugcuggaggacaagcacaacggcaagcugugcaagcugagaggcguggccccccugcaccugggcaagugcaacaucgccggcuggauccugggcaaccccgagugcgagagccugagcaccgccagcagcuggagcuacaucguggagaccagcagcagcggcaacggcaccugcuaccccggcgacuucaucgacuacgaggagcugagagagcagcugagcagcgugagcagcuucgagagauucgagaucuuccccaagaccagcagcuggcccaaccacgacagcaacaagggcgugaccgccgccugcccccacgccggcgccaagagcuucuacaagaaccugaucuggcuggugaagaagggcaacagcuaccccaagcugagcaagagcuacaucaacgacaagggcaaggaggugcuggugcuguggggcauccaccaccccagcaccagcgccgaccagcagagccuguaccagaacgccgacgccuacguguucgugggcaccagcagauacagcaagaaguucaagcccgagaucgccaucagacccaaggugagagaccaggagggcagaaugaacuacuacuggacccugguggagcccggcgacaagaucaccuucgaggccaccggcaaccugguggugcccagauacgccuucgccauggagagaaacgccggcagcggcaucaucaccagcgacacccccgugcacgacugcaacaccaccugccagacccccaagggcgccaucaacaccagccugcccuuccagaacauccaccccaucaccaucggcaagugccccaaguacgugaagagcaccaagcugagacuggccaccggccugagaaacgugcccagcauccagagcagaggccuguucggcgccaucgccggcuucaucgagggcggcuggaccggcaugguggacggcugguacggcuaccaccaccagaacgagcagggcagcggcuacgccgccgaccugaagagcacccagaacgccaucgacgagaucaccaacaaggugaacagcgugaucgagaagaugaacacccaguucaccgccgugggcaaggaguucaaccaccuggagaagagaaucgagaaccugaacaagaagguggacgacggcuuccuggacaucuggaccuacaacgccgagcugcuggugcugcuggagaacgagagaacccuggacuaccacgacagcaacgugaagaaccuguacgagaaggugagaagccagcugaagaacaacgccaaggagaucggcaacggcugcuucgaguucuaccacaagugcgacaacaccugcauggagagcgugaagaacggcaccuacgacuaccccaaguacagcgaggaggccaagcugaacagagaggagaucgacggcgugaagcuggagagcaccagaaucuaccagauccuggccaucuacagcaccguggccagcagccuggugcugguggugagccugggcgccaucagcuucuggaugugcagcaacggcagccugcagugcagaaucugcaucuga

SEQ ID NO: 165762 - RNA, 1701 nt, Artificial Sequence
  derived and/or modified CDS sequence (opt4) from hemagglutinin__InfluenzaA__ADM31738
augaaggccauccugguggugcugcuguacaccuucgccaccgccaacgccgacacccugugcaucggcuaccacgccaacaacagcaccgacaccguggacaccgugcuggagaagaacgugaccgugacccacagcgugaacauccuggaggacaagcacaacggcaagcugugcaagcugagaggcguggccccccugcaccugggcaagugcaacaucgccggcuggauccugggcaaccccgagugcgagagccugagcaccgccagcagcuggagcuacaucguggagaccagcagcagcgacaacggcaccugcuaccccggcgacuucaucgacuacgaggagcugagagagcagcugagcagcgugagcagcuucgagagauucgagaucuuccccaagaccagcagcuggcccaaccacgacagcaacaagggcgugaccgccgccugcccccacgccggcgccagaagcuucuacaagaaccugaucuggcuggugaagaagggcaacagcuaccccaagcugagcaagagcuacaucaacgacaagggcaaggaggugcuggugcuguggggcauccaccaccccagcaccagcgccgaccagcagagccuguaccagaacgccgacgccuacguguucgugggcaccagcagauacagcaagaaguucaagcccgagaucgccaucagacccaaggugagagaccaggagggcagaaugaacuacuacuggacccugguggagcccggcgacaagaucaccuucgaggccaccggcaaccugguggugcccagauacgccuucgccauggagagaaacgccggcagcggcaucaucaucagcgacacccccgugcacgacugcaacaccaccugccagacccccaagggcgccaucaacaccagccugcccuuccagaacauccaccccaucaccaucggcaagugccccaaguacgugaagagcaccaagcugagacuggccaccggccugagaaacgugcccagcauccagagcagaggccuguucggcgccaucgccggcuucaucgagggcggcuggaccggcaugguggacggcugguacggcuaccaccaccagaacgagcagggcagcggcuacgccgccgaccugaagagcacccagaacgccaucgacgagaucaccaacaaggugaacagcgugaucgagaagaugaacacccaguucaccgccgugggcaaggaguucaaccaccuggagaagagaaucgagaaccugaacaagaagguggacgacggcuuccuggacaucuggaccuacaacgccgagcugcuggugcugcuggagaacgagagaacccuggacuaccacgacagcaacgugaagaaccuguacgagaaggugagaagccagcugaagaacaacgccaaggagaucggcaacggcugcuucgaguucuaccacaagugcgacaacaccugcauggagagcgugaagaacggcaccuacgacuaccccaaguacagcgaggaggccaagcugaacagagaggagaucgacggcgugaagcuggagagcaccagaaucuaccagauccuggccaucuacagcaccguggccagcagccuggugcugguggugagccugggcgccaucagcuucuggaugugcagcaacggcagccugcagugcagaaucugcaucuga

SEQ ID NO: 165763 - RNA, 1701 nt, Artificial Sequence; identical to SEQ ID NO: 164378
  derived and/or modified CDS sequence (opt4) from hemagglutinin__InfluenzaA__ADM31748

SEQ ID NO: 165764 - RNA, 1701 nt, Artificial Sequence
  derived and/or modified CDS sequence (opt4) from hemagglutinin__InfluenzaA__ADM31758
augaaggccauccugguggugcugcuguacaccuucgccaccgccaacgccgacacccugugcaucggcuaccacgccaacaacagcaccgacaccguggacaccgugcuggagaagaacgugaccgugacccacagcgugaaccugcuggaggacaagcacaacggcaagcugugcaagcugagaggcaucgccccccugcaccugggcaagugcaacaucgccggcuggauccugggcaaccccgagugcgagagccugagcaccgccagcagcuggagcuacaucguggagaccagcagcagcgacaacggcaccugcuaccccggcgacuucaucgacuacgaggagcugagagagcagcugagcagcgugagcagcuucgagagauucgagaucuuccccaagaccagcagcuggcccaaccacgacagcaacaagggcgugaccgccgccugcccccacgccggcgccaagagcuucuacaagaaccugaucuggcuggugaagaagggcaacagcuaccccaagcugagcaagagcuacaucaacgacaagggcaaggaggugcuggugcuguggggcauccaccaccccagcaccagcgccgaccagcagagccuguaccagaacgccgacgccuacguguucgugggcaccagcagauacagcaagaaguucaagcccgagaucgccaucagacccaaggugagagaccaggagggcagaaugaacuacuacuggacccugaucgaccccggcgacaagaucaccuucgaggccaccggcaaccugguggugcccagauacgccuucgccauggagagaaacgccggcagcggcaucaucaucagcgacacccccgugcacgacugcaacaccaccugccagacccccaagggcgccaucaacaccagccugcccuuccagaacauccaccccaucaccaucggcaagugccccaaguacgugaagagcaccaagcugagaauggccaccggccugagaaacgugcccagcauccagagcagaggccuguucggcgccaucgccggcuucaucgagggcggcuggaccggcaugguggacggcugguacggcuaccaccaccagaacgagcagggcagcggcuacgccgccgaccugaagagcacccagaacgccaucgacgagaucaccaacaaggugaacagcgugaucgagaagaugaacacccaguucaccgccgugggcaaggaguucaaccaccuggagaagagaaucgagaaccugaacaagaagguggacgacggcuuccuggacaucuggaccuacaacgccgagcugcuggugcugcuggagaacgagagaacccuggacuaccacgacagcaacgugaagaaccuguacgagaaggugagaagccagcugaagaacaacgccaaggagaucggcaacggcugcuucgaguucuaccacaagugcgacaacaccugcauggagagcgugaagaacggcaccuacgacuaccccaaguacagcgaggaggccaagcugaacagagaggagaucgacggcgugaagcuggagagcaccagaaucuaccagauccuggccaucuacagcaccguggccagcagccuggugcugguggugagccugggcgccaucagcuucuggaugugcagcaacggcagccugcagugcagaaucugcaucuga

SEQ ID NO: 165765 - RNA, 1701 nt, Artificial Sequence; identical to SEQ ID NO: 163089
  derived and/or modified CDS sequence (opt4) from hemagglutinin__InfluenzaA__ADM31768

SEQ ID NO: 165766 - RNA, 1701 nt, Artificial Sequence; identical to SEQ ID NO: 162729
  derived and/or modified CDS sequence (opt4) from hemagglutinin__InfluenzaA__ADM31778

SEQ ID NO: 165767 - RNA, 1701 nt, Artificial Sequence; identical to SEQ ID NO: 164896
  derived and/or modified CDS sequence (opt4) from hemagglutinin__InfluenzaA__ADM31798

SEQ ID NO: 165768 - RNA, 1701 nt, Artificial Sequence
  derived and/or modified CDS sequence (opt4) from hemagglutinin__InfluenzaA__ADM31808
augaaggccauccugguggugcugcuguacaccuucgccaccgccaacgccgacacccugugcaucggcuaccacgccaacaacagcaccgacaccguggacaccgugcuggagaagaacgugaccgugacccacagcgugaaccugcuggaggacaagcacaacggcaagcugugcaagcugagaggcguggccccccugcaccugggcaagugcaacaucgccggcuggauccugggcaaccccgagugcgagagccugagcaccgccagcagcuggagcuacaucguggagaccagcagcagcggcaacggcaccugcuaccccggcgacuucaucgacuacgaggagcugagagagcagcugagcagcgugagcagcuucgagagauucgagaucuuccccaagaccagcagcuggcccaaccacgacagcaacaagggcgugaccgccgccugcccccacgccggcgccaagagcuucuacaagaaccugcuguggcuggugaagaagggcaacagcuaccccaagcugagcaagagcuacaucaacgacaagggcaaggaggugcuggugcuguggggcauccaccaccccagcaccagcgccgaccagcagagccuguaccagaacgccgacgccuacguguucgugggcaccagcagauacagcaagaaguucaagcccgagaucgccaucagacccaaggugagagaccaggagggcagaaugaacuacuacuggacccuggugggccccggcgacaagaucaccuucgaggccaccggcaaccugguggugcccagauacgccuucgccauggagagaaacgccggcagcggcaucaucaucagcgacacccccgugcacgacugcaacaccaccugccagacccccaagggcgccaucaacaccagccugcccuuccagaacauccaccccaucaccaucggcaagugccccaaguacgugaagagcaccaagcugagacuggccaccggccugagaaacgugcccagcauccagagcagaggccuguucggcgccaucgccggcuucaucgagggcggcuggaccggcaugguggacggcugguacggcuaccaccaccagaacgagcagggcagcggcuacgccgccgaccugaagagcacccagaacgccaucgacgagaucaccaacaaggugaacagcgugaucgagaagaugaacacccaguucaccgccgugggcaaggaguucaaccaccuggagaagagaaucgagaaccugaacaagaagguggacgacggcuuccuggacaucuggaccuacaacgccgagcugcuggugcugcuggagaacgagagaacccuggacuaccacgacagcaacgugaagaaccuguacgagaaggugagaagccagcugaagaacaacgccaaggagaucggcaacggcugcuucgaguucuaccacaagugcgacaacaccugcauggagagcgugaagaacggcaccuacgacuaccccaaguacagcgaggaggccaagcugaacagagaggagaucgacggcgugaagcuggagagcaccagaaucuaccagauccuggccaucuacagcaccguggccagcagccuggugcugguggugagccugggcgccaucagcuucuggaugugcagcaacggcagccugcagugcagaaucugcaucuga

SEQ ID NO: 165769 - RNA, 1701 nt, Artificial Sequence; identical to SEQ ID NO: 164896
  derived and/or modified CDS sequence (opt4) from hemagglutinin__InfluenzaA__ADM31818

SEQ ID NO: 165770 - RNA, 1701 nt, Artificial Sequence
  derived and/or modified CDS sequence (opt4) from hemagglutinin__InfluenzaA__ADM31828
augaaggccauccugguggugcugcuguacaccuucgccaccgccaacgccgacacccugugcaucggcuaccacgccaacaacagcaccgacaccguggacaccgugcuggagagaaacgugaccgugacccacagcgugaaccugcuggaggacaagcacaacggcaagcugugcaagcugagaggcguggccccccugcaccugggcaagugcaacaucgccggcuggauccugggcaaccccgagugcgagagccugagcaccgccagcagcuggagcuacaucguggagaccagcagcagcgacaacggcaccugcuaccccggcgacuucaucgacuacgaggagcugagagagcagcugagcagcgugagcagcuucgagagauucgagaucuuccccaagaccagcagcuggcccaaccacgacagcaacaagggcgugaccgccgccugcccccacgccggcgccaagagcuucuacaagaaccugaucuggcuggugaagaagggcaagagcuaccccaagcugagcaagagcuacaucaacgacaagggcaaggaggugcuggugcuguggggcauccaccaccccagcaccagcgccgaccagcagagccuguaccagaacgccgacgccuacguguucgugggcaccagcagauacagcaagaaguucaagcccgagaucgccaucagacccaaggugagagagcaggagggcagaaugaacuacuacuggacccugguggagcccggcgacaagaucaccuucgaggccaccggcaaccugguggugcccagauacgccuucgccauggagagaaacgccggcagcggcaucaucaucagcgacacccccgugcacgacugcaacaccaccugccagacccccaagggcgccaucaacaccagccugcccuuccagaacauccaccccaucaccaucggcaagugccccaaguacgugaagagcaccaagcugagacuggccaccggccugagaaacgugcccagcauccagagcagaggccuguucggcgccaucgccggcuucaucgagggcggcuggaccggcaugguggacggcugguacggcuaccaccaccagaacgagcagggcagcggcuacgccgccgaccugaagagcacccagaacgccaucgacgagaucaccaacaaggugaacagcgugaucgagaagaugaacacccaguucaccgccgugggcaaggaguucaaccaccuggagaagagaaucgagaaccugaacaagaagguggacgacggcuuccuggacaucuggaccuacaacgccgagcugcuggugcugcuggagaacgagagaacccuggacuaccacgacagcaacgugaagaaccuguacgagaaggugagaagccagcugaagaacaacgccaaggagaucggcaacggcugcuucgaguucuaccacaagugcgacaacaccugcauggagagcgugaagaacggcaccuacgacuaccccaaguacagcgaggaggccaagcugaacagagaggagaucgacggcgugaagcuggagagcaccagaaucuaccagauccuggccaucuacagcaccguggccagcagccuggugcugcuggugagccugggcgccaucagcuucuggaugugcagcaacggcagccugcagugcagaaucugcaucuga

SEQ ID NO: 165771 - RNA, 1701 nt, Artificial Sequence; identical to SEQ ID NO: 165770
  derived and/or modified CDS sequence (opt4) from hemagglutinin__InfluenzaA__ADM31838

SEQ ID NO: 165772 - RNA, 1701 nt, Artificial Sequence; identical to SEQ ID NO: 162729
  derived and/or modified CDS sequence (opt4) from hemagglutinin__InfluenzaA__ADM31848

SEQ ID NO: 165773 - RNA, 1701 nt, Artificial Sequence
  derived and/or modified CDS sequence (opt4) from hemagglutinin__InfluenzaA__ADM31858
augaaggccauccugguggugcugcuguacaccuucgccaccgccaacgccgacacccugugcaucggcuaccacgccaacaacagcaccgacaccguggacaccgugcuggagaagaacgugaccgugacccacagcgugaaccugcuggaggacaagcacaacggcaagcugugcaagcugagaggcguggccccccugcaccugggcaagugcaacaucgccggcuggauccugggcaaccccgagugcgagagccugagcaccgccagcagcuggagcuacaucguggagaccagcagcagcgacaacggcaccugcuaccccggcgacuucaucgacuacgaggagcugagagagcagcugagcagcgugagcagcuucgagagauucgagaucuuccccaagaccagcagcuggcccaaccacgacagcaacaagggcgugaccgccgccugcagccacgccggcgccaagagcuucuacaagaaccugaucuggcuggugaagaagggcaacagcuaccccaagcugaacaagagcuacaucaacgacaagggcaaggaggugcuggugcuguggggcauccaccaccccagcaccagcgccgaccagcagagccuguaccagaacgccgacgccuacguguucgugggcaccagcagauacagcaagaaguucaagcccgagaucgccaucagacccaaggugagagagcaggagggcagaaugaacuacuacuggacccugguggagcccggcgacaagaucaccuucgaggccaccggcaaccugguggugcccagauacgccuucgccauggagagaaacgccggcagcggcaucaucaucagcgacacccccgugcacgacugcaacaccaccugccagacccccaagggcgccaucaacaccagccugcccuuccagaacauccaccccaucaccaucggcaagugccccaaguacgugaagagcaccaagcugagacuggccaccggccugagaaacgugcccagcauccagagcagaggccuguucggcgccaucgccggcuucaucgagggcggcuggaccggcaugguggacggcugguacggcuaccaccaccagaacgagcagggcagcggcuacgccgccgaccugaagagcacccagaacgccaucgacgagaucaccaacaaggugaacagcgugaucgagaagaugaacacccaguucaccgccgugggcaaggaguucaaccaccuggagaagagaaucgagaaccugaacaagaagguggacgacggcuuccuggacaucuggaccuacaacgccgagcugcuggugcugcuggagaacgagagaacccuggacuaccacgacagcaacgugaagaaccuguacgagaaggugagaagccagcugaagaacaacgccaaggagaucggcaacggcugcuucgaguucuaccacaagugcgacaacaccugcauggagagcgugaagaacggcaccuacgacuaccccaaguacagcgaggaggccaagcugaacagagaggagaucgacggcguggagcuggagagcaccagaaucuaccagauccuggccaucuacagcaccguggccagcagccuggugcugguggugagccugggcgccaucagcuucuggaugugcagcaacggcagccugcagugcagaaucugcaucuga

SEQ ID NO: 165774 - RNA, 1701 nt, Artificial Sequence
  derived and/or modified CDS sequence (opt4) from hemagglutinin__InfluenzaA__ADM31868
augaaggccauccugguggugcugcuguacaccuucgccaccgccaacgccgacacccugugcaucggcuaccacgccaacaacagcaccgacaccguggacaccgugcuggagaagaacgugaccgugacccacagcgugaaccugcuggaggacaagcacaacggcaagcugugcaagcugagaggcguggccccccugcaccugggcaagugcaacaucgccggcuggauccugggcaaccccgagugcgagcugcugagcaccgccagcagcuggagcuacaucguggagaccagcagcagcgacaacggcaccugcuaccccggcgacuucaucaacuacgaggagcugagagagcagcugagcagcgugagcagcuucgagagauucgagaucuuccccaagaccagcagcuggcccaaccacgacagcaacaagggcgugaccgccgccugcccccacgccggcgccaagagcuucuacaagaaccugaucuggcuggugaagaagggcaacagcuaccccaagcugagcaagagcuacaucaacgacaagggcaaggaggugcuggugcuguggggcgugcaccaccccagcaccagcgccgaccagcagagccuguaccagaacgccgacgccuacguguucgugggcaccagcagauacagcaagaaguucaagcccgagaucgccaucagacccaaggugagagaccaggagggcagaaugaacuacuacuggacccugguggagcccggcgacaagaucaccuucgaggccaccggcaaccugguggugcccagauacgccuucagcauggagagaaacgccggcagcggcaucaucaucagcgacacccccgugcacgacugcaacaccaccugccagacccccaagggcgccaucaacaccagccugcccuuccagaacauccaccccaucaccaucggcaagugccccaaguacgugaagagcaccaagcugagacuggccaccggccugagaaacgugcccagcauccagagcagaggccuguucggcgccaucgccggcuucaucgagggcggcuggaccggcaugguggacggcugguacggcuaccaccaccagaacgagcagggcagcggcuacgccgccgaccugaagagcacccagaacgccaucgacaagaucaccaacaaggugaacagcgugaucgagaagaugaacacccaguucaccgccgugggcaaggaguucaaccaccuggagaagagaaucgagaaccugaacaagaagguggacgacggcuuccuggacaucuggaccuacaacgccgagcugcuggugcugcuggagaacgagagaacccuggacuaccacgacagcaacgugaagaaccuguacgagaaggugagaagccagcugaagaacaacgccaaggagaucggcaacggcugcuucgaguucuaccacaagugcgacaacaccugcauggagagcgugaagaacggcaccuacgacuaccccaaguacagcgaggaggccaagcugaacagagagaagaucgacggcgugaagcuggagagcaccagaaucuaccagauccuggccaucuacagcaccguggccagcagccuggugcugguggugagccugggcgccaucagcuucuggaugugcagcaacggcagccugcagugcagaaucugcaucuga

SEQ ID NO: 165775 - RNA, 1701 nt, Artificial Sequence
  derived and/or modified CDS sequence (opt4) from hemagglutinin__InfluenzaA__ADM31878
augaaggccauccugguggugcugcuguacaccuucgccaccgccaacgccgacacccugugcaucggcuaccacgccaacaacagcaccgacaccguggacaccgugcuggagaagaacgugaccgugacccacagcgugaacauccuggaggacaagcacaacggcaagcugugcaagcugagaggcguggccccccugcaccugggcaagugcaacaucgccggcuggauccugggcaaccccgagugcgagagccugagcaccgccagcagcuggagcuacaucguggagaccagcagcagcgacaacggcaccugcuaccccggcgacuucaucgacuacgaggagcugagagagcagcugagcagcgugagcagcuucgagagauucgagaucuuccccaaggccagcagcuggcccaaccacgacagcaacaagggcgugaccgccgccugcccccacgccggcgccaagagcuucuacaagaaccugaucuggcuggugaagaagggcaacagcuaccccaagcugagcaagagcuacaucaacgacaagggcaaggaggugcuggugcuguggggcauccaccaccccagcaccagcgccgaccagcagagccuguaccagaacgccgacgccuacguguucgugggcaccagcagauacagcaagaaguucaagcccgagaucgccaucagacccaaggugagagaccaggagggcagaaugaacuacuacuggacccugguggagcccggcgacaagaucaccuucgaggccaccggcaaccugguggugcccagauacgccuucgccauggagagaaacgccggcagcggcaucaucaucagcgacacccccgugcacgacugcaacaccaccugccagacccccaagggcgccaucaacaccagccugcccuuccagaacauccaccccaucaccaucggcaagugccccaaguacgugaagagcaccaagcugagacuggccaccggccugagaaacgugcccagcauccagagcagaggccuguucggcgccaucgccggcuucaucgagggcggcuggaccggcaugguggacggcugguacggcuaccaccaccagaacgagcagggcagcggcuacgccgccgaccugaagagcacccagaacgccaucgacgagaucaccaacaaggugaacagcgugaucgagaagaugaacacccaguucaccgccgugggcaaggaguucaaccaccuggagaagagaaucgagaaccugaacaagaagguggacgacggcuuccuggacaucuggaccuacaacgccgagcugcuggugcugcuggagaacgagagaacccuggacuaccacgacagcaacgugaagaaccuguacgagaaggugagaagccagcugaagaacaacgccaaggagaucggcaacggcugcuucgaguucuaccacaagugcgacaacaccugcauggagagcgugaagaacggcaccuacgacuaccccaaguacagcgaggaggccaagcugaacagagaggagaucgacggcgugaagcuggagagcaccagaaucuaccagauccuggccaucuacagcaccguggccagcagccuggugcugguggugagccugggcgccaucagcuucuggaugugcagcaacggcagccugcagugcagaaucugcaucuga

SEQ ID NO: 165776 - RNA, 1701 nt, Artificial Sequence; identical to SEQ ID NO: 164378
  derived and/or modified CDS sequence (opt4) from hemagglutinin__InfluenzaA__ADM31888

SEQ ID NO: 165777 - RNA, 1701 nt, Artificial Sequence; identical to SEQ ID NO: 162909
  derived and/or modified CDS sequence (opt4) from hemagglutinin__InfluenzaA__ADM31898

SEQ ID NO: 165778 - RNA, 1701 nt, Artificial Sequence
  derived and/or modified CDS sequence (opt4) from hemagglutinin__InfluenzaA__ADM31908
augaaggccauccugguggugcugcuguacaccuucgccaccgccaacgccgacacccugugcaucggcuaccacgccaacaacagcaccgacaccguggacaccgugcuggagaagaacgugaccgugacccacagcgugaacauccuggaggacaagcacaacggcaagcugugcaagcugagaggcguggccccccugcaccugggcaagugcaacaucgccggcuggauccugggcaaccccgagugcgagagccugagcaccgccagcagcuggagcuacaucguggagaccagcagcagcgacaacggcaccugcuaccccggcgacuucaucgaccacgaggagcugagagagcagcugagcagcgugagcagcuucgagagauucgagaucuuccccaagaccagcagcuggcccaaccacgacagcaacaagggcgugaccgccgccugcccccacgccggcgccaagagcuucuacaagaaccugaucuggcuggugaagaagggcaacagcuaccccaagcugagcaagagcuacaucaacgacaagggcaaggaggugcuggugcuguggggcauccaccaccccagcaccagcgccgaccagcagagccuguaccagaacgccgacgccuacguguucgugggcagcagcagauacagcaagaaguucaagcccgagaucgccaucagacccaaggugagagaccaggagggcagaaugaacuacuacuggacccugguggagcccggcgacaagaucaccuucgaggccaccggcaaccugguggugcccagauacgccuucgccauggagagaaacgccggcagcggcaucaucaucagcgacacccccgugcacgacugcaacaccaccugccagacccccaagggcgccaucaacaccagccugcccuuccagaacauccaccccaucaccaucggcaagugccccaaguacgugaagagcaccaagcugagacuggccaccggccugagaaacgugcccagcauccagagcagaggccuguucggcgccaucgccggcuucaucgagggcggcuggaccggcaugguggacggcugguacggcuaccaccaccagaacgagcagggcagcggcuacgccgccgaccugaagagcacccagaacgccaucgacgagaucaccaacaaggugaacagcgugaucgagaagaugaacacccaguucaccgccgugggcaaggaguucaaccaccuggagaagagaaucgagaaccugaacaagaagguggacgacggcuuccuggacaucuggaccuacaacgccgagcugcuggugcugcuggagaacgagagaacccuggacuaccacgacagcaacgugaagaaccuguacgagaaggugagaagccagcugaagaacaacgccaaggagaucggcaacggcugcuucgaguucuaccacaagugcgacaacaccugcauggagagcgugaagaacggcaccuacgacuaccccaaguacagcgaggaggccaagcugaacagagaggagaucgacggcgugaagcuggagagcaccagaaucuaccagauccuggccaucuacagcaccguggccagcagccuggugcugguggugagccugggcgccaucagcuucuggaugugcagcaacggcagccugcagugcagaaucugcaucuga

SEQ ID NO: 165779 - RNA, 1701 nt, Artificial Sequence; identical to SEQ ID NO: 162909
  derived and/or modified CDS sequence (opt4) from hemagglutinin__InfluenzaA__ADM31918

SEQ ID NO: 165780 - RNA, 1701 nt, Artificial Sequence; identical to SEQ ID NO: 164501
  derived and/or modified CDS sequence (opt4) from hemagglutinin__InfluenzaA__ADM31928

SEQ ID NO: 165781 - RNA, 1701 nt, Artificial Sequence; identical to SEQ ID NO: 164501
  derived and/or modified CDS sequence (opt4) from hemagglutinin__InfluenzaA__ADM31948

SEQ ID NO: 165782 - RNA, 1701 nt, Artificial Sequence; identical to SEQ ID NO: 162729
  derived and/or modified CDS sequence (opt4) from hemagglutinin__InfluenzaA__ADM31958

SEQ ID NO: 165783 - RNA, 1701 nt, Artificial Sequence; identical to SEQ ID NO: 164501
  derived and/or modified CDS sequence (opt4) from hemagglutinin__InfluenzaA__ADM31968

SEQ ID NO: 165784 - RNA, 1701 nt, Artificial Sequence; identical to SEQ ID NO: 164317
  derived and/or modified CDS sequence (opt4) from hemagglutinin__InfluenzaA__ADM31978

SEQ ID NO: 165785 - RNA, 1701 nt, Artificial Sequence; identical to SEQ ID NO: 162909
  derived and/or modified CDS sequence (opt4) from hemagglutinin__InfluenzaA__ADM31998

SEQ ID NO: 165786 - RNA, 1701 nt, Artificial Sequence; identical to SEQ ID NO: 162909
  derived and/or modified CDS sequence (opt4) from hemagglutinin__InfluenzaA__ADM32008

SEQ ID NO: 165787 - RNA, 1701 nt, Artificial Sequence
  derived and/or modified CDS sequence (opt4) from hemagglutinin__InfluenzaA__ADM32018
augaaggccauccugguggugcugcuguacaccuucgccaucgccaacgccgacacccugugcaucggcuaccacgccaacaacagcaccgacaccguggacaccgugcuggagaagaacgugaccgugacccacagcgugaaccugcuggaggacaagcacaacggcaagcugugcaagcugagaggcguggccccccugcaccugggcaagugcgacaucgccggcuggauccugggcaaccccgagugcgagagccugagcaccgccagcagcuggagcuacaucguggagaccagcagcagcgacaacggcaccugcuaccccggcgacuucaucgacuacgaggagcugagagagcagcugagcagcgugagcagcuucgagagauucgagaucuuccccaagaccagcagcuggcccaaccacgacagcaacaagggcgugaccgccgccugcccccacgccggcgccaagagcuucuacaagaaccugaucuggcuggugaagaagggcaacagcuaccccaagcugagcaagagcuacaucaacgacaagggcaaggaggugcuggugcuguggggcauccaccaccccagcaccagcgccgaccagcagagccuguaccagaacgccgacgccuacguguucgugggcaccagcagauacagcaagaaguucaagcccgagaucgccaucagacccaaggugagagaccaggagggcagaaugaacuacuacuggacccugguggagcccggcgacaagaucaccuucgaggccaccggcaaccugguggugcccagauacgccuucgccauggagagaaacgccggcagcggcaucaucaucagcgacacccccgugcacgacugcaacaccaccugccagacccccaagggcgccaucaacaccagccugcccuuccagaacauccaccccaucaccaucggcaagugccccaaguacgugaagagcaccaagcugagacuggccaccggccugagaaacgugcccagcauccagagcagaggccuguucggcgccaucgccggcuucaucgagggcggcuggaccggcaugguggacggcugguacggcuaccaccaccagaacgagcagggcagcggcuacgccgccgaccugaagagcacccagaacgccaucgacgagaucaccaacaaggugaacagcgugaucgagaagaugaacacccaguucaccgccgugggcaaggaguucaaccaccuggagaagagaaucgagaaccugaacaagaagguggacgacggcuuccuggacaucuggaccuacaacgccgagcugcuggugcugcuggagaacgagagaacccuggacuaccacgacagcaacgugaagaaccuguacgagaaggugagaagccagcugaagaacaacgccaaggagaucggcaacggcugcuucgaguucuaccacaagugcgacaacaccugcauggagagcgugaagaacggcaccuacgacuaccccaaguacagcgaggaggccaagcugaacagagaggagaucgacggcgugaagcuggagagcaccagaaucuaccagauccuggccaucuacagcaccguggccagcagccuggugcugguggugagccugggcgccaucagcuucuggaugugcagcaacggcagccugcagugcagaaucugcaucuga

SEQ ID NO: 165788 - RNA, 1701 nt, Artificial Sequence
  derived and/or modified CDS sequence (opt4) from hemagglutinin__InfluenzaA__ADM32028
augaaggccauccugguggugcugcuguacaccuucgccaccgccaacgccgacacccugugcaucggcuaccacgccaacaacagcaccgacaccguggacaccgugcuggagaagaacgugaccgugacccacagcguggaccugcuggaggacaagcacaacggcaagcugugcaagcugagaggcguggccccccugcaccugggcaagugcaacaucgccggcuggauccugggcaaccccgagugcgagagccugagcaccgccagcagcuggagcuacaucguggagaccagcagcagcgacaacggcaccugcuaccccggcgacuucaucgacuacgaggagcugagagagcagcugagcagcgugagcagcuucgagagauucgagaucuuccccaagaccagcagcuggcccaaccacgacagcaacaagggcgugaccgccgccugcccccacgccggcgccaagagcuucuacaagaaccugaucuggcuggugaagaagggcaacagcuaccccaagcugagcaagagcuacaucaacgacaagggcaaggaggugcuggugcuguggggcauccaccaccccagcaccagcgccgaccagcagagccuguaccagaacgccgacgccuacguguucgugggcaccagcagauacagcaagaaguucaagcccgagaucgccaucagacccaaggugagagaccaggagggcagaaugaacuacuacuggacccugguggagcccggcgacaagaucaccuucgaggccaccggcaaccugguggugcccagauacgccuucgccauggagagaaacgccggcagcggcaucaucaucagcgacacccccgugcacgacugcaacaccaccugccagacccccaagggcgccaucaacaccagccugcccuuccagaacgugcaccccaucaccaucggcaagugccccaaguacgugaagagcaccaagcugagacuggccaccggccugagaaacgugcccagcauccagagcagaggccuguucggcgccaucgccggcuucaucgagggcggcuggaccggcaugguggacggcugguacggcuaccaccaccagaacgagcagggcagcggcuacgccgccgaccugaagagcacccagaacgccaucgacgagaucaccaacaaggugaacagcgugaucgagaagaugaacacccaguucaccgccgugggcaaggaguucaaccaccuggagaagagaaucgagaaccugaacaagaagguggacgacggcuuccuggacaucuggaccuacaacgccgagcugcuggugcugcuggagaacgagagaacccuggacuaccacgacagcaacgugaagaaccuguacgagaaggugagaagccagcugaagaacaacgccaaggagaucggcaacggcugcuucgaguucuaccacaagugcgacaacaccugcauggagagcgugaagaacggcaccuacgacuaccccaaguacagcgaggaggccaagcugaacagagaggagaucgacggcgugaagcuggagagcaccagaaucuaccagauccuggccaucuacagcaccguggccagcagccuggugcugguggugagccugggcgccaucagcuucuggaugugcagcaacggcagccugcagugcagaaucugcaucuga

SEQ ID NO: 165789 - RNA, 1701 nt, Artificial Sequence; identical to SEQ ID NO: 164501
  derived and/or modified CDS sequence (opt4) from hemagglutinin__InfluenzaA__ADM32038

SEQ ID NO: 165790 - RNA, 1701 nt, Artificial Sequence; identical to SEQ ID NO: 162909
  derived and/or modified CDS sequence (opt4) from hemagglutinin__InfluenzaA__ADM32048

SEQ ID NO: 165791 - RNA, 1701 nt, Artificial Sequence; identical to SEQ ID NO: 163893
  derived and/or modified CDS sequence (opt4) from hemagglutinin__InfluenzaA__ADM32058

SEQ ID NO: 165792 - RNA, 1701 nt, Artificial Sequence; identical to SEQ ID NO: 163893
  derived and/or modified CDS sequence (opt4) from hemagglutinin__InfluenzaA__ADM32068

SEQ ID NO: 165793 - RNA, 1701 nt, Artificial Sequence; identical to SEQ ID NO: 162729
  derived and/or modified CDS sequence (opt4) from hemagglutinin__InfluenzaA__ADM32078

SEQ ID NO: 165794 - RNA, 1701 nt, Artificial Sequence; identical to SEQ ID NO: 164317
  derived and/or modified CDS sequence (opt4) from hemagglutinin__InfluenzaA__ADM32088

SEQ ID NO: 165795 - RNA, 1701 nt, Artificial Sequence
  derived and/or modified CDS sequence (opt4) from hemagglutinin__InfluenzaA__ADM32098
augaaggccauccugguggugcugcuguacaccuucgccaucgccaacgccgacacccugugcaucggcuaccacgccaacaacagcaccgacaccguggacaccgugcuggagaagaacgugaccgugacccacagcgugaaccugcuggaggacaagcacaacggcaagcugugcaagcugagaggcguggccccccugcaccugggcaagugcaacaucgccggcuggauccugggcaaccccgagugcgagagccugagcaccgccagcagcuggagcuacaucguggagaccagcagcagcgacaacggcaccugcuaccccggcgacuucaucgacuacgaggagcugagagagcagcugagcagcgugagcagcuucgagagauucgagaucuuccccaagaccagcagcuggcccaaccacgacagcaacaagggcgugaccgccgccugcccccacgccggcgccaagagcuucuacaagaaccugaucuggcuggugaagaagggcaacagcuaccccaagcugagcaagagcuacaucaacgacaagggcaaggaggugcuggugcuguggggcauccaccaccccagcaccagcgccgaccagcagagccuguaccagaacgccgacgccuacguguucgugggcaccagcagauacagcaagaaguucaagcccgagaucgccaucagacccaaggugagagaccaggagggcagaaugaacuacuacuggacccugguggagcccggcgacaagaucaccuucgaggccaccggcaaccugguggugcccagauacgccuucgccauggagagaaacgccggcagcggcaucaucaucagcgacacccccgugcacgacugcaacaccaccugccagacccccaagggcgccaucaacaccagccugcccuuccagaacauccaccccaucaccaucggcaagugccccaaguacgugaagagcaccaagcugagacuggccaccggccugagaaacgugcccagcauccagagcagaggccuguucggcgccaucgccggcuucaucgagggcggcuggaccggcaugguggacggcugguacggcuaccaccaccagaacgagcagggcagcggcuacgccgccgaccugaagagcacccagaacgccaucgacgagaucaccaacaaggugaacagcgugaucgagaagaugaacacccaguucaccgccgugggcaaggaguucaaccaccuggagaagagaaucgagaaccugaacaagaagguggacgacggcuuccuggacaucuggaccuacaacgccgagcugcuggugcugcuggagaacgagagaacccuggacuaccacgacagcaacgugaagaaccuguacgagaaggugagaagccagcugaagaacaacgccaaggagaucggcaacggcugcuucgaguucuaccacaagugcgacaacaccugcauggagagcgugaagaacggcaccuacgacuaccccaaguacagcgaggaggccaagcugaacagagaggagaucgacggcgugaagcuggagagcaccagaaucuaccagauccuggccaucuacagcaccguggccagcagccuggugcugguggugagccugggcgccaucagcuucuggaugugcagcaacggcagccugcagugcagaaucugcaucuga

SEQ ID NO: 165796 - RNA, 1701 nt, Artificial Sequence; identical to SEQ ID NO: 162729
  derived and/or modified CDS sequence (opt4) from hemagglutinin__InfluenzaA__ADM32108

SEQ ID NO: 165797 - RNA, 1701 nt, Artificial Sequence; identical to SEQ ID NO: 164501
  derived and/or modified CDS sequence (opt4) from hemagglutinin__InfluenzaA__ADM32551

SEQ ID NO: 165798 - RNA, 1701 nt, Artificial Sequence; identical to SEQ ID NO: 162909
  derived and/or modified CDS sequence (opt4) from hemagglutinin__InfluenzaA__ADM32561

SEQ ID NO: 165799 - RNA, 1701 nt, Artificial Sequence; identical to SEQ ID NO: 162909
  derived and/or modified CDS sequence (opt4) from hemagglutinin__InfluenzaA__ADM32571

SEQ ID NO: 165800 - RNA, 1701 nt, Artificial Sequence; identical to SEQ ID NO: 162729
  derived and/or modified CDS sequence (opt4) from hemagglutinin__InfluenzaA__ADM32581

SEQ ID NO: 165801 - RNA, 1701 nt, Artificial Sequence; identical to SEQ ID NO: 164501
  derived and/or modified CDS sequence (opt4) from hemagglutinin__InfluenzaA__ADM32591

SEQ ID NO: 165802 - RNA, 1701 nt, Artificial Sequence; identical to SEQ ID NO: 162729
  derived and/or modified CDS sequence (opt4) from hemagglutinin__InfluenzaA__ADM32601

SEQ ID NO: 165803 - RNA, 1701 nt, Artificial Sequence; identical to SEQ ID NO: 162729
  derived and/or modified CDS sequence (opt4) from hemagglutinin__InfluenzaA__ADM32611

SEQ ID NO: 165804 - RNA, 1701 nt, Artificial Sequence; identical to SEQ ID NO: 163893
  derived and/or modified CDS sequence (opt4) from hemagglutinin__InfluenzaA__ADM32621

SEQ ID NO: 165805 - RNA, 1701 nt, Artificial Sequence
  derived and/or modified CDS sequence (opt4) from hemagglutinin__InfluenzaA__ADM32631
augaaggccauccugguggugcugcuguacaccuucgccaccgccaacgccgacacccugugcaucggcuaccacgccaacaacagcaccgacaccguggacaccgugcuggagaagaacgugaccgugacccacagcgugaacauccuggaggacaagcacaacggcaagcugugcaagcugaagggcguggccccccugcaccugggcaagugcaacaucgccggcuggauccugggcaaccccgagugcgagagccugagcaccgccagcagcuggagcuacaucguggagaccagcagcagcgacaacggcaccugcuaccccggcgacuucaucgacuacgaggagcugagagagcagcugagcagcgugagcagcuucgagagauucgagaucuuccccaagaccagcagcuggcccaaccacgacagcaacaagggcgugaccgccgccugcccccacgccggcgccaagagcuucuacaagaaccugaucuggcuggugaagaagggcaaccuguaccccaagcugagcaagagcuacaucaacgacaagggcaaggaggugcuggugcuguggggcauccaccaccccagcaccagcgccgaccagcagagccuguaccagaacgccgacgccuacguguucgugggcagcagcaaguacagcaagaaguucaagcccgagaucgccaucagacccaaggugagagaccaggagggcagaaugaacuacuacuggacccugguggagcccggcgacaagaucaccuucgaggccaccggcaaccugguggugcccagauacgccuucgccauggagagaaacgccggcagcggcaucaucaucagcgacacccccgugcacaacugcaacaccaccugccagacccccaagggcgccaucaacaccagccugcccuuccagaacauccaccccaucaccaucggcaagugccccaaguacgugaagagcaccaagcugagacuggccaccggccugagaaacgugcccagcauccagagcagaggccuguucggcgccaucgccggcuucaucgagggcggcuggaccggcaugguggacggcugguacggcuaccaccaccagaacgagcagggcagcggcuacgccgccgaccugaagagcacccagaacgccaucgacgagaucaccaacaaggugaacagcgugaucgagaagaugaacacccaguucaccgccgugggcaaggaguucaaccaccuggagaagagaaucgagaaccugaacaagaagguggacgacggcuuccuggacaucuggaccuacaacgccgagcugcuggugcugcuggagaacgagagaacccuggacuaccacgacagcaacgugaagaaccuguacgagaaggugagaagccagcugaagaacaacgccaaggagaucggcaacggcugcuucgaguucuaccacaagugcgacaacaccugcauggagagcgugaagaacggcaccuacgacuaccccaaguacagcgaggaggccaagcugaacagagaggagaucgacggcgugaagcuggagagcaccagaaucuaccagauccuggccaucuacagcaccguggccagcagccuggugcugguggugagccugggcgccaucagcuucuggaugugcagcaacggcagccugcagugcagaaucugcaucuga

SEQ ID NO: 165806 - RNA, 1701 nt, Artificial Sequence; identical to SEQ ID NO: 163893
  derived and/or modified CDS sequence (opt4) from hemagglutinin__InfluenzaA__ADM32641

SEQ ID NO: 165807 - RNA, 1701 nt, Artificial Sequence; identical to SEQ ID NO: 162729
  derived and/or modified CDS sequence (opt4) from hemagglutinin__InfluenzaA__ADM32651

SEQ ID NO: 165808 - RNA, 1701 nt, Artificial Sequence
  derived and/or modified CDS sequence (opt4) from hemagglutinin__InfluenzaA__ADM32661
augaaggccauccugguggugcugcuguacaccuucgccaucgccaacgccgacacccugugcaucggcuaccacgccaacaacagcaccgacaccguggacaccgugcuggagaagaacgugaccgugacccacagcgugaaccugcuggaggacaagcacaacggcaagcugugcaagcugagaggcguggccccccugcaccugggcaagugcaacaucgccggcuggauccugggcaaccccgagugcgagagccugagcaccgccagcagcuggagcuacaucguggagaccagcagcagcgacaacggcaccugcuaccccggcgacuucaacgacuacgaggagcugagagagcagcugagcagcgugagcagcuucgagagauucgagaucuuccccaagaccagcagcuggcccaaccacgacagcaacaagggcgugaccgccgccugcccccacgccggcgccaagagcuucuacaagaaccugaucuggcuggugaagaagggcaacagcuaccccaagcugagcaagagcuacaucaacgacaagggcaaggaggugcuggugcuguggggcauccaccaccccagcaccagcgccgaccagcagagccuguaccagaacgccgacgccuacguguucgugggcaccagcagauacagcaagaaguucaagcccgagaucgccaucagacccaaggugagagaccaggagggcagaaugaacuacuacuggacccugguggagcccggcgacaagaucaccuucgaggccaccggcaaccugguggugcccagauacgccuucgccauggagagaaacgccggcagcggcaucaucaucagcgacacccccgugcacgacugcaacaccaccugccagacccccaagggcgccaucaacaccagccugcccuuccagaacauccaccccaucaccaucggcaagugccccaaguacgugaagagcaccaagcugagacuggccaccggccugagaaacgugcccagcauccagagcagaggccuguucggcgccaucgccggcuucaucgagggcggcuggaccggcaugguggacggcugguacggcuaccaccaccagaacgagcagggcagcggcuacgccgccgaccugaagagcacccagaacgccaucgacgagaucaccaacaaggugaacagcgugaucgagaagaugaacacccaguucaccgccgugggcaaggaguucaaccaccuggagaagagaaucgagaaccugaacaagaagguggacgacggcuuccuggacaucuggaccuacaacgccgagcugcuggugcugcuggagaacgagagaacccuggacuaccacgacagcaacgugaagaaccuguacgagaaggugagaagccagcugaagaacaacgccaaggagaucggcaacggcugcuucgaguucuaccacaagugcgacaacaccugcauggagagcgugaagaacggcaccuacgacuaccccaaguacagcgaggaggccaagcugaacagagaggagaucgacggcgugaagcuggagagcaccagaaucuaccagauccuggccaucuacagcaccguggccagcagccuggugcugguggugagccugggcgccaucagcuucuggaugugcagcaacggcagccugcagugcagaaucugcaucuga

SEQ ID NO: 165809 - RNA, 1701 nt, Artificial Sequence; identical to SEQ ID NO: 164317
  derived and/or modified CDS sequence (opt4) from hemagglutinin__InfluenzaA__ADM32671

SEQ ID NO: 165810 - RNA, 1701 nt, Artificial Sequence; identical to SEQ ID NO: 162729
  derived and/or modified CDS sequence (opt4) from hemagglutinin__InfluenzaA__ADM32681

SEQ ID NO: 165811 - RNA, 1701 nt, Artificial Sequence; identical to SEQ ID NO: 162909
  derived and/or modified CDS sequence (opt4) from hemagglutinin__InfluenzaA__ADM32691

SEQ ID NO: 165812 - RNA, 1701 nt, Artificial Sequence; identical to SEQ ID NO: 162729
  derived and/or modified CDS sequence (opt4) from hemagglutinin__InfluenzaA__ADM32701

SEQ ID NO: 165813 - RNA, 1701 nt, Artificial Sequence; identical to SEQ ID NO: 162909
  derived and/or modified CDS sequence (opt4) from hemagglutinin__InfluenzaA__ADM32711

SEQ ID NO: 165814 - RNA, 1701 nt, Artificial Sequence; identical to SEQ ID NO: 162909
  derived and/or modified CDS sequence (opt4) from hemagglutinin__InfluenzaA__ADM32721

SEQ ID NO: 165815 - RNA, 1701 nt, Artificial Sequence; identical to SEQ ID NO: 162909
  derived and/or modified CDS sequence (opt4) from hemagglutinin__InfluenzaA__ADM32741

SEQ ID NO: 165816 - RNA, 1701 nt, Artificial Sequence; identical to SEQ ID NO: 162909
  derived and/or modified CDS sequence (opt4) from hemagglutinin__InfluenzaA__ADM32751

SEQ ID NO: 165817 - RNA, 1701 nt, Artificial Sequence; identical to SEQ ID NO: 164317
  derived and/or modified CDS sequence (opt4) from hemagglutinin__InfluenzaA__ADM32761

SEQ ID NO: 165818 - RNA, 1701 nt, Artificial Sequence
  derived and/or modified CDS sequence (opt4) from hemagglutinin__InfluenzaA__ADM32771
augaaggccauccugguggugcugcuguacaccuucgccaccgccaacgccgacacccugugcaucggcuaccacgccaacaacagcaccgacaccguggacaccgugcuggagaagaacgugaccgugacccacagcgugaaccugcuggaggacaagcacaacggcaagcugugcaagcugagaggcguggccccccugcaccugggcaagugcaacaucgccggcuggauccugggcaaccccgagugcgagagccugagcaccgccagcagcuggagcuacaucguggagaccagcagcagcgacaacggcaccugcuaccccggcgacuucaucgacuacgaggagcugagagagcagcugagcagcgugagcagcuucgagagauucgagaucuuccccaagaccagcagcuggcccaaccacgacagcaacaagggcgugaccgccgccugcccccacgccggcgccaagagcuucuacaagaaccugaucuggcuggugaagaagggcaacagcuaccccaagcugagcgagagcuacaucaacgacaagggcaaggaggugcuggugcuguggggcauccaccaccccagcaccagcgccgaccagcagagccuguaccagaacgccgacgccuacguguucgugggcaccagcagauacagcaagaaguucaagcccgagaucgccaucagacccaaggugagagaccaggagggcagaaugaacuacuacuggacccugguggagcccggcgacaagaucaccuucgaggccaccggcaaccugguggugcccagauacgccuucgccauggagagaaacgccggcagcggcaucaucaucagcgacacccccgugcacgacugcaacaccaccugccagacccccaagggcgccaucaacaccagccugcccuuccagaacauccaccccaucaccaucggcaagugccccaaguacgugaagagcaccaagcugagacuggccaccggccugagaaacgugcccagcauccagagcaagggccuguucggcgccaucgccggcuucaucgagggcggcuggaccggcaugguggacggcugguacggcuaccaccaccagaacgagcagggcagcggcuacgccgccgaccugaagagcacccagaacgccaucgacgagaucaccaacaaggugaacagcgugaucgagaagaugaacacccaguucaccgccgugggcaaggaguucaaccaccuggagaagagaaucgagaaccugaacaagaagguggacgacggcuuccuggacaucuggaccuacaacgccgagcugcuggugcugcuggagaacgagagaacccuggacuaccacgacagcaacgugaagaaccuguacgagaaggugagaagccagcugaagaacaacgccaaggagaucggcaacggcugcuucgaguucuaccacaagugcgacaacaccugcauggagagcgugaagaacggcaccuacgacuaccccaaguacagcgaggaggccaagcugaacagagaggagaucgacggcgugaagcuggagagcaccagaaucuaccagauccuggccaucuacagcaccguggccagcagccuggugcugguggugagccugggcgccaucagcuucuggaugugcagcaacggcagccugcagugcagaaucugcaucuga

SEQ ID NO: 165819 - RNA, 1701 nt, Artificial Sequence
  derived and/or modified CDS sequence (opt4) from hemagglutinin__InfluenzaA__ADM32781
augaaggccauccugguggugcugcuguacaccuucgccaccgccaacgccgacacccugugcaucggcuaccacgccaacaacagcaccgacaccguggacaccgugcuggagaagaacgugaccgugacccacagcguggaccugcuggaggacaagcacaacggcaagcugugcaagcugagaggcguggccccccugcaccugggcaagugcaacaucgccggcuggauccugggcaaccccgagugcgagagccugagcaccgccagcagcuggagcuacaucguggagaccagcagcagcgacaacggcaccugcuaccccggcgacuucaucgacuacgaggagcugagagagcagcugagcagcgugagcagcuucgagagauucgagaucuuccccaagaccagcagcuggcccaaccacgacagcaacaagggcgugaccgccgccugcccccacgccggcgccaagagcuucuacaagaaccugaucuggcuggugaagaagggcaacagcuaccccaagcugagcaagagcuacaucaacgacaagggcaaggaggugcuggugcuguggggcauccaccaccccagcaccagcgccgaccagcagagccuguaccagaacgccgacgccuacguguucgugggcaccagcagauacagcaagaaguucaagcccgagaucgccaucagacccaaggugagagaccaggagggcagaaugaacuacuacuggacccugguggagcccggcgacaagaucaccuucgaggccaccggcaaccugguggugcccagauacgccuucgccauggagagaaacgccggcagcggcaucaucaucagcgacacccccgugcacgacugcaacaccaccugccagacccccaagggcgccaucaacaccagcuuccccuuccagaacauccaccccaucaccaucggcaagugccccaaguacgugaagagcaccaagcugagacuggccaccggccugagaaacgugcccagcauccagagcagaggccuguucggcgccaucgccggcuucaucgagggcggcuggaccggcaugguggacggcugguacggcuaccaccaccagaacgagcagggcagcggcuacgccgccgaccugaagagcacccagaacgccaucgacgagaucaccaacaaggugaacagcgugaucgagaagaugaacacccaguucaccgccgugggcaaggaguucaaccaccuggagaagagaaucgagaaccugaacaagaagguggacgacggcuuccuggacaucuggaccuacaacgccgagcugcuggugcugcuggagaacgagagaacccuggacuaccacgacagcaacgugaagaaccuguacgagaaggugagaagccagcugaagaacaacgccaaggagaucggcaacggcugcuucgaguucuaccacaagugcgacaacaccugcauggagagcgugaagaacggcaccuacgacuaccccaaguacagcgaggaggccaagcugaacagagaggagaucgacggcgugaagcuggagagcaccagaaucuaccagauccuggccaucuacagcaccguggccagcagccuggugcugguggugagccugggcgccaucagcuucuggaugugcagcaacggcagccugcagugcagaaucugcaucuga

SEQ ID NO: 165820 - RNA, 1701 nt, Artificial Sequence; identical to SEQ ID NO: 162909
  derived and/or modified CDS sequence (opt4) from hemagglutinin__InfluenzaA__ADM32791

SEQ ID NO: 165821 - RNA, 1701 nt, Artificial Sequence
  derived and/or modified CDS sequence (opt4) from hemagglutinin__InfluenzaA__ADM32801
augaaggccauccugguggugcugcuguacaccuucgccaccgccaacgccgacacccugugcaucggcuaccacgccaacaacagcaccgacaccguggacaccgugcuggagaagaacgugaccgugacccacagcgugaacauccuggagaacaagcacaacggcaagcugugcaagcugagaggcguggccccccugcaccugggcaagugcaacaucgccggcuggauccugggcaaccccgagugcgagagccugagcaccgccagcagcuggagcuacaucguggagaccagcagcagcgacaacggcaccugcuaccccggcgacuucaucgacuacgaggagcugagagagcagcugagcagcgugagcagcuucgagagauucgagaucuuccccaagaccagcagcuggcccaaccacgacagcaacaagggcgugaccgccgccugcccccacgccggcgccaagagcuucuacaagaaccugaucuggcuggugaagaagggcaacagcuaccccaagcugagcaagagcuacaucaacgacaagggcaaggaggugcuggugcuguggggcauccaccaccccagcaccagcgccgaccagcagagccuguaccagaacgccgacgccuacguguucgugggcagcagcagauacagcaagaaguucaagcccgagaucgccaucagacccaaggugagagaccaggagggcagaaugaacuacuacuggacccugguggagcccggcgacaagaucaccuucgaggccaccggcaaccugguggugcccagauacgccuucgccauggagagaaacgccggcagcggcaucaucaucagcgacacccccgugcacgacugcaacaccaccugccagacccccaagggcgccaucaacaccagccugcccuuccagaacauccaccccaucaccaucggcaagugccccaaguacgugaagagcaccaagcugagacuggccaccggccugagaaacgugcccagcauccagagcagaggccuguucggcgccaucgccggcuucaucgagggcggcuggaccggcaugguggacggcugguacggcuaccaccaccagaacgagcagggcagcggcuacgccgccgaccugaagagcacccagaacgccaucgacgagaucaccaacaaggugaacagcgugaucgagaagaugaacacccaguucaccgccgugggcaaggaguucaaccaccuggagaagagaaucgagaaccugaacaagaagguggacgacggcuuccuggacaucuggaccuacaacgccgagcugcuggugcugcuggagaacgagagaacccuggacuaccacgacagcaacgugaagaaccuguacgagaaggugagaagccagcugaagaacaacgccaaggagaucggcaacggcugcuucgaguucuaccacaagugcgacaacaccugcauggagagcgugaagaacggcaccuacgacuaccccaaguacagcgaggaggccaagcugaacagagaggagaucgacggcgugaagcuggagagcaccagaaucuaccagauccuggccaucuacagcaccguggccagcagccuggugcugguggugagccugggcgccaucagcuucuggaugugcagcaacggcagccugcagugcagaaucugcaucuga

SEQ ID NO: 165822 - RNA, 1701 nt, Artificial Sequence
  derived and/or modified CDS sequence (opt4) from hemagglutinin__InfluenzaA__ADM32811
augaaggccauccugguggugcugcuguacaccuucgccaccgccaacgccgacacccugugcaucggcuaccacgccaacaacagcaccgacaccguggacaccgugcuggagaagaacgugaccgugacccacagcgugaaccugcuggaggacaagcacaacggcaagcugugcaagcugagaggcguggccccccugcaccugggcaagugcaacaucgccggcuggauccugggcaaccccgagugcgagagccugagcaccgccagcagcuggagcuacaucguggagaccagcagcagcgacaacggcaccugcuaccccggcgacuucaucgacuacgaggagcugagagagcagcugagcagcgugagcagcuucgagagauucgagaucuuccccaagaccagcagcuggcccaaccacgacagcaacaagggcgugaccgccgccugcccccacgccggcgccaagagcuucuacaagaaccugaucuggcuggugaagaagggcaacagcuaccccaagcugagcaagagcuacaucaacgacaagggcaaggaggugcuggugcuguggggcauccaccaccccagcaccagcgccgaccagcagagccuguaccagaacgccgacgccuacguguucgugggcaccagcagauacagcaagaaguucaagcccgagaucgccaucagacccaaggugagagaccaggagggcagaaugaacuacuacuggacccugguggagcccggcgacaagaucaccuucgaggccaccggcaaccugguggugcccagauacgccuucgccauggagagaaacgccggcagcggcaucaucaucagcgacacccccgugcacgacugcaacaccaccugccagacccccaagggcgccaucaacaccagccugcccuuccacaacauccaccccaucaccaucggcaagugccccaaguacgugaagagcaccaagcugagacuggccaccggccugagaaacgugcccagcauccagagcagaggccuguucggcgccaucgccggcuucaucgagggcggcuggaccggcaugguggacggcugguacggcuaccaccaccagaacgagcagggcagcggcuacgccgccgaccugaagagcacccagaacgccaucgacgagaucaccaacaaggugaacagcgugaucgagaagaugaacacccaguucaccgccgugggcaaggaguucaaccaccuggagaagagaaucgagaaccugaacaagaagguggacgacggcuuccuggacaucuggaccuacaacgccgagcugcuggugcugcuggagaacgagagaacccuggacuaccacgacagcaacgugaagaaccuguacgagaaggugagaagccagcugaagaacaacgccaaggagaucggcaacggcugcuucgaguucuaccacaagugcgacaacaccugcauggagagcgugaagaacggcaccuacgacuaccccaaguacagcgaggaggccaagcugaacagagaggagaucgacggcgugaagcuggagagcaccagaaucuaccagauccuggccaucuacagcaccguggccagcagccuggugcugguggugagccugggcgccaucagcuucuggaugugcagcaacggcagccugcagugcagaaucugcaucuga

SEQ ID NO: 165823 - RNA, 1701 nt, Artificial Sequence; identical to SEQ ID NO: 162729
  derived and/or modified CDS sequence (opt4) from hemagglutinin__InfluenzaA__ADM32821

SEQ ID NO: 165824 - RNA, 1701 nt, Artificial Sequence; identical to SEQ ID NO: 164317
  derived and/or modified CDS sequence (opt4) from hemagglutinin__InfluenzaA__ADM32831

SEQ ID NO: 165825 - RNA, 1701 nt, Artificial Sequence; identical to SEQ ID NO: 162909
  derived and/or modified CDS sequence (opt4) from hemagglutinin__InfluenzaA__ADM32841

SEQ ID NO: 165826 - RNA, 1701 nt, Artificial Sequence; identical to SEQ ID NO: 164317
  derived and/or modified CDS sequence (opt4) from hemagglutinin__InfluenzaA__ADM32851

SEQ ID NO: 165827 - RNA, 1701 nt, Artificial Sequence; identical to SEQ ID NO: 162909
  derived and/or modified CDS sequence (opt4) from hemagglutinin__InfluenzaA__ADM32861

SEQ ID NO: 165828 - RNA, 1701 nt, Artificial Sequence; identical to SEQ ID NO: 163893
  derived and/or modified CDS sequence (opt4) from hemagglutinin__InfluenzaA__ADM32871

SEQ ID NO: 165829 - RNA, 1701 nt, Artificial Sequence; identical to SEQ ID NO: 164896
  derived and/or modified CDS sequence (opt4) from hemagglutinin__InfluenzaA__ADM32881

SEQ ID NO: 165830 - RNA, 1701 nt, Artificial Sequence
  derived and/or modified CDS sequence (opt4) from hemagglutinin__InfluenzaA__ADM32929
augaaggccauccugguggugcugcuguacaccuucgccaccgccaacgccgacacccugugcaucggcuaccacgccaacaacagcaccgacaccguggacaccgugcuggagaagaacgugaccgugacccacagcgugaaccugcuggaggacaagcacaacggcaagcugugcaagcugagaggcguggccccccugcaccugggcaagugcaacaucgccggcuggauccugggcaaccccgagugcgagagccugagcaccgccagcagcuggagcuacaucguggagaccagcagcagcgacaacggcaccugcuaccccggcgacuucaucgacuacgaggagcugagagagcagcugagcagcgugagcagcuucgagagauucgagaucuuccccaagaccagcagcuggcccaaccacgacagcaacaagggcgugaccgccgccugcccccacgccggcgccaagagcuucuacaagaaccugaucuggcuggugaagaagggcaacagcuaccccaagcugagcaagagcuacaucaacgacaagggcaaggaggugcuggugcuguggggcauccaccaccccagcaccagcgccgaccagcagagccuguaccagaacgccgacgccuacguguucgugggcaccagcagauacagcaagaaguucaagcccgagaucgccaucagacccaaggugagagaccaggagggcagaaugaacuacuacuggacccugguggagcccggcgacaagaucaccuucgaggccaccggcaaccugguggugcccagauacgccuucgccauggagagaaacgccggcagcggcaucaucaucagcgacacccccgugcacgacugcaacaccaccugccagacccccaagggcgccaucaacaccagccugcccuuccagaacauccaccccaucaccaucggcaagugccccaaguacgugaagagcaccaagcugagacuggccaccggccugagaaacgugcccagcauccagagcagaggccuguucggcgccaucgccggcuucaucgagggcggcuggaccggcaugguggacggcugguacggcuaccaccaccagaacgagcagggcagcggcuacgccgccgaccugaagagcacccagaacgccaucgacaagaucaccaacaaggugaacagcgugaucgagaagaugaacacccaguucaccgccgugggcaaggaguucaaccaccuggagaagagaaucgagaaccugaacaagaagguggacgacggcuuccuggacaucuggaccuacaacgccgagcugcuggugcugcuggagaacgagagaacccuggacuaccacgacagcaacgugaagaaccuguacgagaaggugagaagccagcugaagaacaacgccaaggagaucggcaacggcugcuucgaguucuaccacaagugcgacaacaccugcauggagagcgugaagaacggcaccuacgacuaccccaaguacagcgaggaggccaagcugaacagagaggagaucgacggcgugaagcuggagagcaccagaaucuaccagauccuggccaucuacagcaccguggccagcagccuggugcugguggugagccugggcgccaucagcuucuggaugugcagcaacggcagccugagaugcagaaucugcaucuga

SEQ ID NO: 165831 - RNA, 1701 nt, Artificial Sequence
  derived and/or modified CDS sequence (opt4) from hemagglutinin__InfluenzaA__ADM32939
auggaggccauccugguggugcugcuguacaccuucgccaccgccaacgccgacacccugugcaucggcuaccacgccaacaacagcaccgacaccguggacaccgugcuggagaagaacgugaccgugacccacagcgugaaccugcuggaggacaagcacaacggcaagcugugcaagcugagaggcguggccccccugcaccugggcaagugcaacaucgccggcuggauccugggcaaccccgagugcgagagccugagcaccgccagcagcuggagcuacaucguggagaccagcagcagcgacaacggcaccugcuaccccggcgacuucaucgacuacgaggagcugagagagcagcugagcagcgugagcagcuucgagagauucgagaucuuccccaagaccagcagcuggcccaaccacgacagcaacaagggcgugaccgccgccugcccccacgccggcgccaagagcuucuacaagaaccugaucuggcuggugaagaagggcaacagcuaccccaagcugagcaagagcuacaucaacgacaagggcaaggaggugcuggugcuguggggcauccaccaccccagcaccagcgccgaccagcagagccuguaccagaacgccgacgccuacguguucgugggcagcagcagauacagcaagaaguucaagcccgagaucgccaucagacccaaggugagagaccaggagggcagaaugaacuacuacuggacccugguggagcccggcgacaagaucaccuucgaggccaccggcaaccugguggugcccagauacgccuucgccauggagagaaacgccggcagcggcaucaucaucagcgacacccccgugcacgacugcaacaccaccugccagacccccaagggcgccaucaacaccagccugcccuuccacaacauccaccccaucaccaucggcaagugccccaaguacgugaagagcaccaagcugagacuggccaccggccugagaaacauccccagcauccagagcagaggccuguucggcgccaucgccggcuucaucgagggcggcuggaccggcaugguggacggcugguacggcuaccaccaccagaacgagcagggcagcggcuacgccgccgaccugaagagcacccagaacgccaucgacgagaucaccaacaaggugaacagcgugaucgagaagaugaacacccaguucaccgccgugggcaaggaguucaaccaccuggagaagagaaucgagaaccugaacaagaagguggacgacggcuuccuggacaucuggaccuacaacgccgagcugcuggugcugcuggagaacgagagaacccuggacuaccacgacagcaacgugaagaaccuguacgagaaggugagaagccagcugaagaacaacgccaaggagaucggcaacggcugcuucgaguucuaccacaagugcgacaacaccugcauggagagcgugaagaacggcaccuacgacuaccccaaguacagcgaggaggccaagcugaacagagaggagaucgacggcgugaagcuggagagcaccagaaucuaccagauccuggccaucuacagcaccguggccagcagccuggugcugguggugagccugggcgccaucagcuucuggaugugcagcaacggcagccugagaugcagaaucugcaucuga

SEQ ID NO: 165832 - RNA, 1701 nt, Artificial Sequence
  derived and/or modified CDS sequence (opt4) from hemagglutinin__InfluenzaA__ADM32949
augaaggccauccugguggugcugcuguacaccuucgccaccgccaacgccgacacccugugcaucggcuaccacgccaacaacagcaccgacaccguggacaccgugcuggagaagaacgugaccgugacccacagcgugaaccugcuggaggacaagcacaacggcaagcugugcaagcugagaggcguggccccccugcaccugggcaagugcaacaucgccggcuggauccugggcaaccccgagugcgagagccugagcaccgccagcagcuggagcuacaucguggagaccagcagcagcgacaacggcaccugcuaccccggcgacuucaucgacuacgaggagcugagagagcagcugagcagcgugagcagcuucgagagauucgagaucuuccccaagaccagcagcuggcccaaccacgacagcaacaagggcgugaccgccgccugcccccacgccggcgccaagagcuucuacaagaaccugaucuggcuggugaagaagggcaacagcuaccccaagcugagcaagagcuacaucaacgacaagggcaaggaggugcuggugcuguggggcauccaccaccccagcaccagcgccgaccagcagagccuguaccagaacgccgacgccuacguguucgugggcaccagcagauacagcaagaaguucaagcccgagaucgccaucagacccaaggugagagaccaggagggcagaaugaacuacuacuggacccugguggagcccggcgacaagaucaccuucgaggccaccggcaaccugguggugcccagauacgccuucgccauggagagaaacgccggcagcggcaucaucaucagcgacacccccgugcacgacugcaacaccaccugccagacccccaacggcgccaucaacaccagccugcccuuccagaacauccaccccaucaccaucggcaagugccccaaguacgugaagagcaccaagcugagacuggccaccggccugagaaacauccccagcauccagagcagaggccuguucggcgccaucgccggcuucaucgagggcggcuggaccggcaugguggacggcugguacggcuaccaccaccagaacgagcagggcagcggcuacgccgccgaccugaagagcacccagaacgccaucgacgagaucaccaacaaggugaacagcgugaucgagaagaugaacacccaguucaccgccgugggcaaggaguucaaccaccuggagaagagaaucgagaaccugaacaagaagguggacgacggcuuccuggacaucuggaccuacaacgccgagcugcuggugcugcuggagaacgagagaacccuggacuaccacgacagcaacgugaagaaccuguacgagaaggugagaagccagcugaagaacaacgccaaggagaucggcaacggcugcuucgaguucuaccacaagugcgacaacaccugcauggagagcgugaagaacggcaccuacgacuaccccaaguacagcgaggaggccaagcugaacagagaggagaucgacggcgugaagcuggagagcaccagaaucuaccagauccuggccaucuacagcaccguggccagcagccuggugcugguggugagccugggcgccaucagcuucuggaugugcagcaacggcagccugagaugcagaaucugcaucuga

SEQ ID NO: 165833 - RNA, 1701 nt, Artificial Sequence
  derived and/or modified CDS sequence (opt4) from hemagglutinin__InfluenzaA__ADM32958
augaaggccauccugguguuccugcuguacaccuucgccaccgccaacgccgacacccugugcaucggcuaccacgccaacaacagcaccgacaccguggacaccgugcuggagaagaacgugaccgugacccacagcgugaacauccuggaggacaagcacaacggcaagcugugcaagcugagaggcguggccccccugcaccugggcaagugcaacaucgccggcuggauccugggcaaccccgagugcgagagccugagcaccgccagcagcuggagcuacaucguggagaccagcagcagcgacaacggcaccugcuaccccggcgacuucaucgacuacgaggagcugagagagcagcugagcagcgugagcagcuucgagagauucgagaucuuccccaagaccagcagcuggcccaaccacgacagcaacaagggcgugaccgccgccugcccccacgccggcgccaagagcuucuacaagaaccugaucuggcuggugaagaagggcaacagcuaccccaagcugagcaagagcuacaucaacgacaagggcaaggaggugcuggugcuguggggcauccaccaccccagcaccagcgccgaccagcagagccuguaccagaacgccgacgccuacguguucguggagagcagcagauacagcaagaaguucaagcccgagaucgccaucagacccaaggugagagaccaggagggcagaaugaacuacuacuggacccugguggagcccggcgacaagaucaccuucgaggccaccggcaaccugguggugcccagauacgccuucgccauggagagaaacgccggcagcggcaucaucaucagcgacacccccgugcacgacugcaacaccaccugccagacccccaagggcgccaucaacaccagccugcccuuccagaacauccaccccaucaccaucggcaagugccccaaguacgugaagagcaccaagcugagacuggccaccggccugagaaacgugcccagcauccagagcagaggccuguucggcgccaucgccggcuucaucgagggcggcuggaccggcaugguggacggcugguacggcuaccaccaccagaacgagcagggcagcggcuacgccgccgaccugaagagcacccagaacgccaucgacgagaucaccaacaaggugaacagcgugaucgagaagaugaacacccaguucaccgccgugggcaaggaguucaaccaccuggagaagagacuggagaaccugaacaagaagguggacgacggcuuccuggacaucuggaccuacaacgccgagcugcuggugcugcuggagaacgagagaacccuggacuaccacgacagcaacgugaagaaccuguacgagaaggugagaagccagcugaagaacaacgccaaggaggugggcaacggcugcuucgaguucuaccacaagugcgacaacaccugcauggagagcgugaagaacggcaccuacgacuaccccaaguacagcgaggaggccaagcugaacagagaggagaucgacggcgugaagcuggagagcaccagaaucuaccagauccuggccaucuacagcaccgccgccagcagccuggugcugguggugagccugggcgccaucagcuucuggaugugcagcaacggcagccugagaugcagaaucugcaucuga

SEQ ID NO: 165834 - RNA, 1701 nt, Artificial Sequence
  derived and/or modified CDS sequence (opt4) from hemagglutinin__InfluenzaA__ADM32977
augaaggccauccugguggugcugcugugcaccuucgccaccgccaacgccgacacccugugcaucggcuaccacgccaacaacagcaccgacaccguggacaccgugcuggagaagaacgugaccgugacccacagcgugaaccugcuggaggacaagcacaacggcaagcugugcaagcugagaggcguggccccccugcaccugggcaagugcaacaucgccggcuggauccugggcaaccccgagugcgagagccugagcaccgccagcagcuggagcuacaucguggagaccagcagcagcgacaacggcaccugcuaccccggcgacuucaucgacuacgaggagcugagagagcagcugagcagcgugagcagcuucgagagauucgagaucuuccccaagaccagcagcuggcccaaccacgacagcaacaagggcgugaccgccgccugcccccacgccggcgccaagagcuucuacaagaaccugaucuggcuggugaagaagggcaacagcuaccccaagcugagcaagagcuacaucaacgacaagggcaaggaggugcuggugcuguggggcauccaccaccccagcaccagcgccgaccagcagagccuguaccagaacgccgacgccuacguguucgugggcaccagcaaguacagcaagaaguucaagcccgagaucgccaucagacccaaggugagagaccaggagggcagaaugaacuacuacuggacccugguggagcccggcgacaagaucaccuucgaggccaccggcaaccugguggugcccagauacgccuucgccauggagagaaacgccggcagcggcaucaucaucagcgacacccccgugcacgacugcaacaccaccugccagacccccaagggcgccaucaacaccagccugcccuuccagaacauccaccccaucaccaucggcaagugccccaaguacgugaagagcaccaagcugagacuggccaccggccugagaaacgugcccagcauccagagcagaggccuguucggcgccaucgccggcuucaucgagggcggcuggaccggcaugguggacggcugguacggcuaccaccaccagaacgagcagggcagcggcuacgccgccgaccugaagagcacccagaacgccaucgacggcaucaccaacaagaucaacagcgugaucgagaagaugaacacccaguucaccgccgugggcaaggaguucaaccaccuggagaagagaaucgagaaccugaacaagaagguggacgacggcuuccuggacaucuggaccuacaacgccgagcugcuggugcugcuggagaacgagagaacccuggacuaccacgacagcaacgugaagaaccuguacgagaaggugagaagccagcugaagaacaacgccaaggagaucggcaacggcugcuucgaguucuaccacaagugcgacaacaccugcauggagagcgugaagaacggcaccuacgacuaccccaaguacagcgaggaggccaagcugaacagagaggagaucgacggcgugaagcuggagagcaccagaaucuaccagauccuggccaucuacagcaccguggccagcagccuggugcugguggugagccugggcgccaucagcuucuggaugugcagcaacggcagccugagaugcagaaucugcaucuga

SEQ ID NO: 165835 - RNA, 1701 nt, Artificial Sequence
  derived and/or modified CDS sequence (opt4) from hemagglutinin__InfluenzaA__ADM32986
augaaggccauccugguggugcugcuguacaccuucgccaccgccaacgccgacacccugugcaucggcuaccacgccaacaacagcaccgacaccguggacaccgugcuggagaagaacgugaccgugacccacagcgugaaccugcuggaggacaagcacaacggcaagcugugcaagcugagaggcguggccccccugcaccugggcaagugcaacaucgccggcuggauccugggcaaccccgagugcgagagccugagcaccgccagcagcuggagcuacaucguggagaccagcagcagcgacaacggcaccugcuaccccggcgacuucaucgacuacgaggagcugagagagcagcugagcagcgugagcagcuucgagagauucgagaucuuccccaagaccaacagcuggcccaaccacgacagcaacaagggcgugaccgccgccugcccccacgccggcgccaagagcuucuacaagaaccugaucuggcuggugaagaagggcaacagcuaccccaagcugagcaagagcuacaucaacgacaagggcaaggaggugcuggugcuguggggcauccaccaccccagcaccagcgccgaccagcagagccuguaccagaacgccgacgccuacguguucgugggcaccagcaaguacagcaagaaguucaagcccgagaucgccaucagacccaaggugagagaccaggagggcagaaugaacuacuacuggacccugguggagcccggcgacaagaucaccuucgaggccaccggcaaccugguggugcccagauacgccuucgccauggagagaaacgccggcagcggcaucaucaucagcgacacccccgugcacgacugcaacaccaccugccagacccccaagggcgccaucaacaccagccugcccuuccagaacauccaccccaucaccaucggcaagugccccaaguacgugaagagcaccaagcugagacuggccaccggccugagaaacgugcccagcauccagagcagaggccuguucggcgccaucgccggcuucaucgagggcggcuggaccggcaugguggacggcugguacggcuaccaccaccagaacgagcagggcagcggcuacgccgccgaccugaagagcacccagaacgccaucgacggcaucaccaacaagaucaacagcgugaucgagaagaugaacacccaguucaccgccgugggcaaggaguucaaccaccuggagaagagaaucgagaaccugaacaagaagguggacgacggcuuccuggacaucuggaccuacaacgccgagcugcuggugcugcuggagaacgagagaacccugaacuaccacgacagcaacgugaagaaccuguacgagaaggugagaagccagcugaagaacaacgccaaggagaucggcaacggcugcuucgaguucuaccacaagugcgacaacaccugcauggagagcgugaagaacggcaccuacgacuaccccaaguacagcgaggaggccaagcugaacagagaggagaucgacggcgugaagcuggagagcaccagaaucuaccagauccuggccaucuacagcaccguggccagcagccuggugcugguggugagccugggcgccaucagcuucuggaugugcagcaacggcagccugagaugcagaaucugcaucuga

SEQ ID NO: 165836 - RNA, 1701 nt, Artificial Sequence
  derived and/or modified CDS sequence (opt4) from hemagglutinin__InfluenzaA__ADM32995
augaaggccauccugguggugcugcuguacaccuucgccaccgccaacgccgacacccugugcaucggcuaccacgccaacaacagcaccgacaccguggacaccgugcuggagaagaacgugaccgugacccacagcgugaaccugcuggaggacaagcacaacggcaagcugugcaagcugagaggcguggccccccugcaccugggcaagugcaacaucgccggcuggauccugggcaaccccgagugcgagagccugagcaccgccagcagcuggagcuacaucguggagaccagcagcagcgacaacggcaccugcuaccccggcgacuucaucgacuacgaggagcugagagagcagcugagcagcgugagcagcuucgagagauucgagaucuuccccaagaccaacagcuggcccaaccacgacagcaacaagggcgugaccgccgccugcccccacgccggcgccaagagcuucuacaagaaccugaucuggcuggugaagaagggcaacagcuaccccaagcugagcaagagcuacaucaacgacaagggcaaggaggugcuggugcuguggggcauccaccaccccagcaccagcgccgaccagcagagccuguaccagaacgccgacgccuacguguucgugggcaccagcaaguacagcaagaaguucaagcccgagaucgccaucagacccaaggugagagaccaggagggcagaaugaacuacuacuggacccugguggagcccggcgacaagaucaccuucgaggccaccggcaaccugguggugcccagauacgccuucgccauggagagaaacgccggcagcggcaucaucaucagcgacacccccgugcacgacugcaacaccaccugccagacccccaagggcgccaucaacaccagccugcccuuccagaacauccaccccaucaccaucggcaagugccccaaguacgugaagagcaccaagcugagacuggccaccggccugagaaacgugcccagcauccagagcagaggccuguucggcgccaucgccggcuucaucgagggcggcuggaccggcaugguggacggcugguacggcuaccaccaccagaacgagcagggcagcggcuacgccgccgaccugaagagcacccagaacgccaucgacggcaucaccaacaagaucaacagcgugaucgagaagaugaacacccaguucaccgccgugggcaaggaguucaaccaccuggagaagagaaucgagaaccugaacaagaagguggacgacggcuuccuggacaucuggaccuacaacgccgagcugcuggugcugcuggagaacgagagaacccuggacuaccacgacagcaacgugaagaaccuguacgagaaggugagaagccagcugaagaacaacgccaaggagaucggcaacggcugcuucgaguucuaccacaagugcgacaacaccugcauggagagcgugaagaacggcaccuacgacuaccccaaguacagcgaggaggccaagcugaacagagaggagaucgacggcgugaagcuggagagcaccagaaucuaccagauccuggccaucuacagcaccguggccagcagccuggugcugguggugagccugggcgccaucagcuucuggaugugcagcaacggcagccugagaugcagaaucugcaucuga

SEQ ID NO: 165837 - RNA, 1701 nt, Artificial Sequence; identical to SEQ ID NO: 163830
  derived and/or modified CDS sequence (opt4) from hemagglutinin__InfluenzaA__ADM33004

SEQ ID NO: 165838 - RNA, 1701 nt, Artificial Sequence; identical to SEQ ID NO: 162729
  derived and/or modified CDS sequence (opt4) from hemagglutinin__InfluenzaA__ADM33023

SEQ ID NO: 165839 - RNA, 1701 nt, Artificial Sequence
  derived and/or modified CDS sequence (opt4) from hemagglutinin__InfluenzaA__ADM33040
augaaggccauccugguggugcugcuguacaccuucgccaccgccaacgccgacacccugugcaucggcuaccacgccaacaacagcaccgacaccguggacaccgugcuggagaagaacgugaccgugacccacagcgugaaccugcuggaggacaagcacaacggcaagcugugcaagcugagaggcguggccccccugcaccugggcaagugcaacaucgccggcuggauccugggcaaccccgagugcgagagccugagcaccgccagcagcuggagcuacaucguggagaccagcagcagcgacaacggcaccugcuaccccggcgacuucaucgacuacgaggagcugagagagcagcugagcagcgugagcagcuucgagagauucgagaucuuccccaagaccagcagcuggcccaaccacgacagcaacaagggcgugaccgccgccugcccccacgccggcgccaagagcuucuacaagaaccugaucuggcuggugaagaagggcaacagcuaccccaagcugagcaagagcuacaucaacgacaagggcaaggaggugcuggugcuguggggcauccaccaccccagcaccagcgccgaccagcagagccuguaccagaacgccgacgccuacguguucgugggcagcagcagauacagcaagaaguucaagcccgagaucgccaucagacccaaggugagagaccaggagggcagaaugaacuacuacuggacccugguggagcccggcgacaagaucaccuucgaggccaccggcaaccugguggugcccagauacgccuucgccauggagagaaacgccggcagcggcaucaucaucagcgacacccccgugcacgacugcaacaccaccugccagacccccaagggcgccaucaacaccagccugcccuuccagaacauccaccccaucaccaucggcaagugccccaaguacgugaagagcaccaagcugagacuggccaccggccugagaaacgugcccagcauccagagcagaggccuguucggcgccaucgccggcuucaucgagggcggcuggaccggcaugguggacggcugguacggcuaccaccaccagaacgagcagggcagcggcuacgccgccgaccugaagagcacccagaacgccaucgacgagaucaccaacaaggugaacagcgugaucgagaagaugaacacccaguucaccgccgugggcaaggaguucaaccaccuggagaagagaaucgagaaccugaacaagaagguggacgacggcuuccuggacaucuggaccuacaacgccgagcugcuggugcugcuggagaacgagagaacccuggacuaccacgacagcaacgugaagaaccuguacgagaaggugagaagccagcugaagaacaacgccaaggagaucggcaacggcugcuucgaguucuaccacaagugcgacaacaccugcauggagagcgugaagaacggcaccuacgacuaccccaaguacagcgaggaggccaagcugaacagagaggagaucgacggcgugaagcuggagagcaccagaaucuaccagauccuggccaucuacagcaccguggccagcagccuggugcugguggugagccugggcgccaucagcuucuggaugugcagcaacggcagccugagaugcagaaucugcaucuga

SEQ ID NO: 165840 - RNA, 1701 nt, Artificial Sequence
  derived and/or modified CDS sequence (opt4) from hemagglutinin__InfluenzaA__ADM33050
augaaggccauccugguggugcugcuguacaccuucgccaccgccaacgccgacacccugugcaucggcuaccacgccaacaacagcaccgacaccguggacaccgugcuggagaagaacgugaccgugacccacagcgugaaccugcuggaggacaagcacaacggcaagcugugcaagcugagaggcguggccccccugcaccugggcaagugcaacaucgccggcuggauccugggcaaccccgagugcgagagccugagcaccgccagcagcuggagcuacaucguggagaccagcagcagcgacaacggcaccugcuaccccggcgacuucaucgacuacgaggagcugagagagcagcugagcagcgugagcagcuucgagagauucgagaucuuccccaagaccagcagcuggcccaaccacgacagcaacaagggcgugaccgccgccugcccccacgccggcgccaagagcuucuacaagaaccugaucuggcuggugaagaagggcaacagcuaccccaagcugaacaagagcuacaucaacgacaagggcaaggaggugcuggugcuguggggcauccaccaccccagcaccagcgccgaccagcagagccuguaccagaacgccgacgccuacguguucgugggcaccagcagauacagcaagaaguucaagcccgagaucgccaucagacccaaggugagagaccaggagggcagaaugaacuacuacuggacccugguggagcccggcgacaagaucaccuucgaggccaccggcaaccugcuggugcccagauacgccuucgccauggagagaaacgccggcagcggcaucaucaucagcgacacccccgugcacgacugcaacaccaccugccagacccccaagggcgccaucaacaccagccugcccuuccagaacauccaccccaucaccaucggcaagugccccaaguacgugaagagcaccaagcugagacuggccaccggccugagaaacgugcccagcauccagagcagaggccuguucggcgccaucgccggcuucaucgagggcggcuggaccggcaugguggacggcugguacggcuaccaccaccagaacgagcagggcagcggcuacgccgccgaccugaagagcacccagaacgccaucgacgagaucaccaacaaggugaacagcgugaucgagaagaugaacacccaguucaccgccgugggcaaggaguucaaccaccuggagaagagaaucgagaaccugaacaagaagguggacgacggcuuccuggacaucuggaccuacaacgccgagcugcuggugcugcuggagaacgagagaacccuggacuaccacgacagcaacgugaagaaccuguacgagaaggugagaagccagcugaagaacaacgccaaggagaucggcaacggcugcuucgaguucuaccacaagugcgacaacaccugcauggagagcgugaagaacggcaccuacgacuaccccaaguacagcgaggaggccaagcugaacagagaggagaucgacggcgugaagcuggagagcaccagaaucuaccagauccuggccaucuacagcaccguggccagcagccuggugcugguggugagccugggcgccaucagcuucuggaugugcagcaacggcagccugagaugcagaaucugcaucuga

SEQ ID NO: 165841 - RNA, 1701 nt, Artificial Sequence
  derived and/or modified CDS sequence (opt4) from hemagglutinin__InfluenzaA__ADM33069
augaaggccauccugguggugcugcuguacaccuucgccaccgccaacgccgacacccugugcaucggcuaccacgccaacaacagcaccgacaccguggacaccgugcuggagaagaacgugaccgugacccacagcgugaaccugcuggaggacaagcacaacggcaagcugugcaagcugagaggcguggccccccugcaccugggcaagugcaacaucgccggcuggauccugggcaaccccgagugcgagagccugagcaccgccagcagcuggagcuacaucguggagaccagcagcagcgacaacggcaccugcuaccccggcgacuucaucgacuacgaggagcugagagagcagcugagcagcgugagcagcuucgagagauucgagaucuuccccaagaccagcagcuggcccaaccacgacagcaacaagggcgugaccgccgccugcccccacgccggcgccaagagcuucuacaagaaccugaucuggcuggugaagaagggcaacagcuaccccaagcugagcaagagcuacaucaacgacaagggcaaggaggugcuggugcuguggggcauccaccaccccagcaccagcgccgaccagcagagccuguaccagaacgccgacgccuacguguucgugggcaccagcagauacagcaagaaguucaagcccgagaucgccaucagacccaaggugagagaccaggagggcagaaugaacuacuacuggacccugguggagcccggcgacaagaucaccuucgaggccaccggcaaccugguggugcccagauacgccuucgccauggagagaaacgccggcagcggcaucaucaucagcgacacccccgugcacgacugcaacaccaccugccagacccccgagggcgccaucaacaccagccugcccuuccagaacauccaccccaucaccaucggcaagugccccaaguacgugaagagcaccaagcugagacuggccaccggccugagaaacgugcccagcauccagagcagaggccuguucggcgccaucgccggcuucaucgagggcggcuggaccggcaugguggacggcugguacggcuaccaccaccagaacgagcagggcagcggcuacgccgccgaccugaagagcacccagaacgccaucgacgagaucaccaacaaggugaacagcgugaucgagaagaugaacacccaguucaccgccgugggcaaggaguucaaccaccuggagaagagaaucgagaaccugaacaagaagguggacgacggcuuccuggacaucuggaccuacaacgccgagcugcuggugcugcuggagaacgagagaacccuggacuaccacgacagcaacgugaagaaccuguacgagaaggugagaagccagcugaagaacaacgccaaggagaucggcaacggcugcuucgaguucuaccacaagugcgacaacaccugcauggagagcgugaagaacggcaccuacgacuaccccaaguacagcgaggaggccaagcugaacagagaggagaucgacggcgugaagcuggagagcaccagaaucuaccagauccuggccaucuacagcaccguggccagcagccuggugcugguggugagccugggcgccaucagcuucuggaugugcagcaacggcagccugagaugcagaaucugcaucuga

SEQ ID NO: 165842 - RNA, 1701 nt, Artificial Sequence
  derived and/or modified CDS sequence (opt4) from hemagglutinin__InfluenzaA__ADM33079
augaaggccauccugguggugcugcuguacaccuucgccaccgccaacgccgacacccugugcaucggcuaccacgccaacaacagcaccgacaccguggacaccgugcuggagaagaacgugaccgugacccacagcgugaaccugcuggaggacaagcacaacggcaagcugugcaagcugagaggcguggccccccugcaccugggcaagugcaacaucgccggcuggauccugggcaaccccgagugcgagagccugagcaccgccagcagcuggagcuacaucguggagaccagcagcagcgacaacggcaccugcuaccccggcgacuucaucgacuacgaggagcugagagagcagcugagcagcgugagcagcuucgagagauucgagaucuuccccaagaccagcagcuggcccaaccacgacagcaacaagggcgugaccgccgccugcccccacgccggcgccaagagcuucuacaagaaccugaucuggcuggugaagaagggcaacagcuaccccaagcugagcaagagcuacaucaacgacaagggcaaggaggugcuggugcuguggggcauccaccaccccagcaccagcgccgaccagcagagccuguaccagaacgccgacgccuacguguucgugggcaccagcagauacagcaagaaguucaagcccgagaucgccaucagacccaaggugagagaccaggagggcagaaugaacuacuacuggacccugguggagcccggcgacaagaucaccuucgaggccaccggcaaccugguggugcccagauacgccuucgccauggagagaaacgccggcagcggcaucaucaucagcgacacccccgugcacgacugcaacaccaccugccagacccccaagggcgccaucaacaccagccugcccuuccagaacauccaccccaucaccaucggcaagugccccaaguacgugaagagcaccaagcugagacuggccaccggccugagaaacgugcccagcauccagagcagaggccuguucggcgccaucgccggcuucaucgagggcggcuggaccggcaugguggacggcugguacggcuaccaccaccagaacgagcagggcagcggcuacgccgccgaccugaagagcacccagaacgccaucgacgagaucaccaacaaggugaacagcgugaucgagaagaugaacacccaguucaccgccgugggcaaggaguucaaccaccuggagaagagaaucgagaaccugaacaagaagguggacgacggcuuccuggacaucuggaccuacaacgccgagcugcuggugcugcuggagaacgagagaacccuggacuaccacgacagcaacgugaagaaccuguacgagaaggugagaagccagcugaagaacaacgccaaggagaucggcaacggcugcuucgaguucuaccacaagugcgacaacaccugcauggagagcgugaagaacggcaccuacgacuaccccaaguacagcgaggaggccaagcugaacagagaggagaucgacggcgugaagcuggagagcaccagaaucuaccagauccuggccaucuacagcaccguggccagcagccuggugcugguggugagccugggcgccaucagcuucuggaugugcagcaacggcagccugagaugcagaaucugcaucuga

SEQ ID NO: 165843 - RNA, 1701 nt, Artificial Sequence
  derived and/or modified CDS sequence (opt4) from hemagglutinin__InfluenzaA__ADM33099
augaaggccauccugguggugcugcuguacaccuucgccaccgccaacgccgacacccugugcaucggcuaccacgccaacaacagcaccgacaccguggacaccgugcuggagaagaacgugaccgugacccacagcgugaaccugcuggaggacaagcacaacggcaagcugugcaagcugagaggcguggccccccugcaccugggcaagugcaacaucgccggcuggauccugggcaaccccgagugcgagagccugagcaccgccagcagcuggagcuacaucguggagaccagcagcagcgacaacggcaccugcuaccccggcgacuucaucgacuacgaggagcugagagagcagcugagcagcgugagcagcuucgagagauucgagaucuuccccaagaccagcagcuggcccaaccacgacagcaacaagggcgugaccgccgccugcccccacgccggcgccaagagcuucuacaagaaccugaucuggcuggugaagaagggcaacagcuaccccaagcugagcaagagcuacaucaacgacaagggcaaggaggugcuggugcuguggggcauccaccaccccagcaccagcgccgaccagcagagccuguaccagaacgccgacgccuacguguucgugggcaccagcagauacagcaagaaguucaagcccgagaucgccaucagacccaaggugagagaccaggagggcagaaugaacuacuacuggacccugguggagcccggcgacaagaucaccuucgaggccaccggcaaccugauggugcccagauacgccuucgccauggagagaaacgccggcagcggcaucaucaucagcgacacccccgugcacgacugcaacaccaccugccagacccccaagggcgccaucaacaccagccugcccuuccagaacauccaccccaucaccaucggcaagugccccaaguacgugaagagcaccaagcugagacuggccaccggccugagaaacgugcccagcauccagagcagaggccuguucggcgccaucgccggcuucaucgagggcggcuggaccggcaugguggacggcugguacggcuaccaccaccagaacgagcagggcagcggcuacgccgccgaccugaagagcacccagaacgccaucgacgagaucaccaacaaggugaacagcgugaucgagaagaugaacacccaguucaccgccgugggcaaggaguucaaccaccuggagaagagaaucgagaaccugaacaagaagguggacgacggcuuccuggacaucuggaccuacaacgccgagcugcuggugcugcuggagaacgagagaacccuggacuaccacgacagcaacgugaagaaccuguacgagaaggugagaagccagcugaagaacaacgccaaggagaucggcaacggcugcuucgaguucuaccacaagugcgacaacaccugcauggagagcgugaagaacggcaccuacgacuaccccaaguacagcgaggaggccaagcugaacagagaggagaucgacggcgugaagcuggagagcaccagaaucuaccagauccuggccaucuacagcaccguggccagcagccuggugcugguggugagccugggcgccaucagcuucuggaugugcagcaacggcagccugagaugcagaaucugcaucuga

SEQ ID NO: 165844 - RNA, 1701 nt, Artificial Sequence; identical to SEQ ID NO: 165843
  derived and/or modified CDS sequence (opt4) from hemagglutinin__InfluenzaA__ADM33109

SEQ ID NO: 165845 - RNA, 1701 nt, Artificial Sequence
  derived and/or modified CDS sequence (opt4) from hemagglutinin__InfluenzaA__ADM33128
augaaggccauccugguggugcugcuguacaccuucgccaccgccaacgccgacacccugugcaucggcuaccacgccaacaacagcaccgacaccguggacaccgugcuggagaagaacgugaccgugacccacagcgugaaccugcuggaggacaagcacaacggcaagcugugcaagcugagaggcguggccccccugcaccugggcaagugcaacaucgccggcuggauccugggcaaccccgagugcgagagccugagcaccgccagcagcuggagcuacaucguggagaccagcagcagcgacaacggcaccugcuaccccggcgacuucaucgacuacgaggagcugagagagcagcugagcagcgugagcagcuucgagagauucgagaucuuccccaagaccagcagcuggcccaaccacgacagcaacaagggcgugaccgccgccugcccccacgccggcgccaagagcuucuacaagaaccugaucuggcuggugaagaagggcaacagcuaccccaagcugagcaagagcuacaucaacgacaagggcaaggaggugcuggugcuguggggcauccaccaccccagcaccagcgccgaccagcagagccuguaccagaacgccgacgccuacguguucgugggcaccagcagauacagcaagaaguucaagcccgagaucgccaucagacccaaggugagagagcaggagggcagaaugaacuacuacuggacccugguggagcccggcgacaagaucaccuucgaggccaccggcaaccugguggugcccagauacgccuucgccauggagagaaacgccggcagcggcaucaucaucagcgacacccccgugcacgacugcaacaccaccugccagacccccaagggcgccaucaacaccagccugcccuuccagaacauccaccccaucaccaucggcaagugccccaaguacgugaagagcaccaagcugagacuggccaccggccugagaaacgugcccagcauccagagcagaggccuguucggcgccaucgccggcuucaucgagggcggcuggaccggcaugguggacggcugguacggcuaccaccaccagaacgagcagggcagcggcuacgccgccgaccugaagagcacccagaacgccaucgacgagaucaccaacaaggugaacagcgugaucgagaagaugaacacccaguucaccgccgugggcaaggaguucaaccaccuggagaagagaaucgagaaccugaacaagaagguggacgacggcuuccuggacaucuggaccuacaacgccgagcugcuggugcugcuggagaacgagagaacccuggacuaccacgacagcaacgugaagaaccuguacgagaaggugagaagccagcugaagaacaacgccaaggagaucggcaacggcugcuucgaguucuaccacaagugcgacaacaccugcauggagagcgugaagaacggcaccuacgacuaccccaaguacagcgaggaggccaagcugaacagagaggagaucgacggcgugaagcuggagagcaccagaaucuaccagauccuggccaucuacagcaccguggccagcagccuggugcugguggugagccugggcgccaucagcuucuggaugugcagcaacggcagccugagaugcagaaucugcaucuga

SEQ ID NO: 165846 - RNA, 1701 nt, Artificial Sequence; identical to SEQ ID NO: 165845
  derived and/or modified CDS sequence (opt4) from hemagglutinin__InfluenzaA__ADM33137

SEQ ID NO: 165847 - RNA, 1701 nt, Artificial Sequence; identical to SEQ ID NO: 165845
  derived and/or modified CDS sequence (opt4) from hemagglutinin__InfluenzaA__ADM33147

SEQ ID NO: 165848 - RNA, 1701 nt, Artificial Sequence; identical to SEQ ID NO: 165845
  derived and/or modified CDS sequence (opt4) from hemagglutinin__InfluenzaA__ADM33157

SEQ ID NO: 165849 - RNA, 1701 nt, Artificial Sequence
  derived and/or modified CDS sequence (opt4) from hemagglutinin__InfluenzaA__ADM33167
augaaggccauccugguggugcugcuguacaccuucgccaccgccaacgccgacacccugugcaucggcuaccacgccaacaacagcaccgacaccguggacaccgugcuggagaagaacgugaccgugacccacagcgugaacauccuggaggacaagcacaacggcaagcugugcaagcugagaggcguggccccccugcaccugggcaagugcaacaucgccggcuggauccugggcaaccccgagugcgagagccugagcaccgccagcagcuggagcuacaucguggagaccagcagcagcgacaacggcaccugcuaccccggcgacuucaucgacuacgaggagcugagagagcagcugagcagcgugagcagcuucgagagauucgagaucuuccccaagaccagcagcuggcccaaccacgacagcaacaagggcgugaccgccgccugcccccacgccggcgccaagagcuucuacaagaaccugaucuggcuggugaagaagggcaacagcuaccccaagcugagcaagagcuacaucaacgacaagggcaaggaggugcuggugcuguggggcauccaccaccccagcaccagcgccgaccagcagagccuguaccagaacgccgacgccuacguguucgugggcaccagcagauacagcaagaaguucaagcccgagaucgccaucagacccaaggugagagaccaggagggcagaaugaacuacuacuggacccugguggagcccggcgacaagaucaccuucgaggccaccggcaaccugguggugcccagauacgccuucgccauggagagaaacgccggcagcggcaucaucaucagcgacacccccgugcacgacugcaacaccaccugccagacccccaagggcgccaucaacaccagccugcccuuccagaacauccaccccaucaccaucggcaagugccccaaguacgugaagagcaccaagcugagacuggccaccggccugagaaacgugcccagcauccagagcagaggccuguucggcgccaucgccggcuucaucgagggcggcuggaccggcaugguggacggcugguacggcuaccaccaccagaacgagcagggcagcggcuacgccgccgaccugaagagcacccagaacgccaucgacgagaucaccaacaaggugaacagcgugaucgagaagaugaacacccaguucaccgccgugggcaaggaguucaaccaccuggagaagagaaucgagaaccugaacaagaagguggacgacggcuuccuggacaucuggaccuacaacgccgagcugcuggugcugcuggagaacgagagaacccuggacuaccacgacagcaacgugaagaaccuguacgagaaggugagaagccagcugaagaacaacgccaaggagaucggcaacggcugcuucgaguucuaccacaagugcgacaacaccugcauggagagcgugaagaacggcaccuacgacuaccccaaguacagcgaggaggccaagcugaacagagagaagaucgacggcgugaagcuggagagcaccagaaucuaccagauccuggccaucuacagcaccguggccagcagccuggugcugguggugagccugggcgccaucagcuucuggaugugcagcaacggcagccugagaugcagaaucugcaucuga

SEQ ID NO: 165850 - RNA, 1701 nt, Artificial Sequence; identical to SEQ ID NO: 164916
  derived and/or modified CDS sequence (opt4) from hemagglutinin__InfluenzaA__ADM33177

SEQ ID NO: 165851 - RNA, 1701 nt, Artificial Sequence; identical to SEQ ID NO: 165845
  derived and/or modified CDS sequence (opt4) from hemagglutinin__InfluenzaA__ADM33186

SEQ ID NO: 165852 - RNA, 1701 nt, Artificial Sequence; identical to SEQ ID NO: 165845
  derived and/or modified CDS sequence (opt4) from hemagglutinin__InfluenzaA__ADM33195

SEQ ID NO: 165853 - RNA, 1701 nt, Artificial Sequence; identical to SEQ ID NO: 165842
  derived and/or modified CDS sequence (opt4) from hemagglutinin__InfluenzaA__ADM33204

SEQ ID NO: 165854 - RNA, 1701 nt, Artificial Sequence
  derived and/or modified CDS sequence (opt4) from hemagglutinin__InfluenzaA__ADM33222
auggaggccauccugguggugcugcuguacaccuucgccaccgccaacgccgacacccugugcaucggcuaccacgccaacaacagcaccgacaccguggacaccgugcuggagaagaacgugaccgugacccacagcgugaaccugcuggaggacaagcacaacggcaagcugugcaagcugagaggcguggccccccugcaccugggcaagugcaacaucgccggcuggauccugggcaaccccgagugcgagagccugagcaccgccagcagcuggagcuacaucguggagaccagcagcagcgacaacggcaccugcuaccccggcgacuucaucgacuacgaggagcugagagagcagcugagcagcgugagcagcuucgagagauucgagaucuuccccaagaccagcagcuggcccaaccacgacagcaacaagggcgugaccgccgccugcccccacgccggcgccaagagcuucuacaagaaccugaucuggcuggugaagaagggcaacagcuaccccaagcugagcaagagcuacaucaacgacaagggcaaggaggugcuggugcuguggggcauccaccaccccagcaccagcgccgaccagcagagccuguaccagaacgccgacgccuacguguucgugggcagcagcagauacagcaagaaguucaagcccgagaucgccaucagacccaaggugagagaccaggagggcagaaugaacuacuacuggacccugguggagcccggcgacaagaucaccuucgaggccaccggcaaccugguggugcccagauacgccuucgccauggagagaaacgccggcagcggcaucaucaucagcgacacccccgugcacgacugcaacaccaccugccagacccccaagggcgccaucaacaccagccugcccuuccacaacauccaccccaucaccaucggcaagugccccaaguacgugaagagcaccaagcugagacuggccaccggccugagaaacgugcccagcauccagagcagaggccuguucggcgccaucgccggcuucaucgagggcggcuggaccggcaugguggacggcugguacggcuaccaccaccagaacgagcagggcagcggcuacgccgccgaccugaagagcacccagaacgccaucgacgagaucaccaacaaggugaacagcgugaucgagaagaugaacacccaguucaccgccgugggcaaggaguucaaccaccuggagaagagaaucgagaaccugaacaagaagguggacgacggcuuccuggacaucuggaccuacaacgccgagcugcuggugcugcuggagaacgagagaacccuggacuaccacgacagcaacgugaagaaccuguacgagaaggugagaaaccagcugaagaacaacgccaaggagaucggcaacggcugcuucgaguucuaccacaagugcgacaacaccugcauggagagcgugaagaacggcaccuacgacuaccccaaguacagcgaggaggccaagcugaacagagaggagaucgacggcgugaagcuggagagcaccagaaucuaccagauccuggccaucuacagcaccguggccagcagccuggugcugguggugagccugggcgccaucagcuucuggaugugcagcaacggcagccugagaugcagaaucugcaucuga

SEQ ID NO: 165855 - RNA, 1701 nt, Artificial Sequence
  derived and/or modified CDS sequence (opt4) from hemagglutinin__InfluenzaA__ADM33232
auggaggccauccugguggugcugcuguacaccuucgccaccgccaacgccgacacccugugcaucggcuaccacgccaacaacagcaccgacaccguggacaccgugcuggagaagaacgugaccgugacccacagcgugaaccugcuggaggacaagcacaacggcaagcugugcaagcugagaggcguggccccccugcaccugggcaagugcaacaucgccggcuggauccugggcaaccccgagugcgagagccugagcaccgccagcagcuggagcuacaucguggagaccagcagcagcgacaacggcaccugcuaccccggcgacuucaucgacuacgaggagcugagagagcagcugagcagcgugagcagcuucgagagauucgagaucuuccccaagaccagcagcuggcccaaccacgacagcaacaagggcgugaccgccgccugcccccacgccggcgccaagagcuucuacaagaaccugaucuggcuggugaagaagggcaacagcuaccccaagcugagcaagagcuacaucaacgacaagggcaaggaggugcuggugcuguggggcauccaccaccccagcaccagcgccgaccagcagagccuguaccagaacgccgacgccuacguguucgugggcagcagcagauacagcaagaaguucaagcccgagaucgccaucagacccaaggugagagaccaggagggcagaaugaacuacuacuggacccugguggagcccggcgacaagaucaccuucgaggccaccggcaaccugguggugcccagauacgccuucgccauggagagaaacgccggcagcggcaucaucaucagcgacacccccgugcacgacugcaacaccaccugccagacccccaagggcgccaucaacaccagccugcccuuccacaacauccaccccaucaccaucggcaagugccccaaguacgugaagagcaccaagcugagacuggccaccggccugagaaacgugcccagcauccagagcagaggccuguucggcgccaucgccggcuucaucgagggcggcuggaccggcaugguggacggcugguacggcuaccaccaccagaacgagcagggcagcggcuacgccgccgaccugaagagcacccagaacgccaucgacgagaucaccaacaaggugaacagcgugaucgagaagaccaacacccaguucaccgccgugggcaaggaguucaaccaccuggagaagagaaucgagaaccugaacaagaagguggacgacggcuuccuggacaucuggaccuacaacgccgagcugcuggugcugcuggagaacgagagaacccuggacuaccacgacagcaacgugaagaaccuguacgagaaggugagaaaccagcugaagaacaacgccaaggagaucggcaacggcugcuucgaguucuaccacaagugcgacaacaccugcauggagagcgugaagaacggcaccuacgacuaccccaaguacagcgaggaggccaagcugaacagagaggagaucgacggcgugaagcuggagagcaccagaaucuaccagauccuggccaucuacagcaccguggccagcagccuggugcugguggugagccugggcgccaucagcuucuggaugugcagcaacggcagccugcagugcagaaucugcaucuga

SEQ ID NO: 165856 - RNA, 1701 nt, Artificial Sequence
  derived and/or modified CDS sequence (opt4) from hemagglutinin__InfluenzaA__ADM33241
augaaggccauccugguggugcugcuguacaccuucgccaccgccaacgccgacacccugugcaucggcuaccacgccaacaacagcaccgacaccguggacaccgugcuggagaagaacgugaccgugacccacagcgugaacauccuggaggacaagcacaacggcaagcugugcaagcugagaggcguggccccccugcaccugggcaagugcaacaucgccggcuggauccugggcaaccccgagugcgagagccugagcaccgccagcagcuggagcuacaucguggagaccagcagcagcgacaacggcaccugcuaccccggcgacuucaucgacuacgaggagcugagagagcagcugagcagcgugagcagcuucgagagauucgagaucuuccccaagaccagcagcuggcccaaccacgacagcaacaagggcgugaccgccgccugcccccacgccggcgccaagagcuucuacaagaaccugaucuggcuggugaagaaggagaacagcuaccccaagcugagcaagagcuacaucaacgacaagggcaaggaggugcuggugcuguggggcauccaccaccccagcaccagcgccgaccagcagagccuguaccagaacgccgacgccuacguguucgugggcagcagcagauacagcaagaaguucaagcccgagaucaccaucagacccaaggugagagaccaggagggcagaaugaacuacuacuggacccugguggagcccggcgacaagaucaccuucgaggccaccggcaaccugguggugcccagauacgccuucgccauggagagaaacgccggcagcggcaucaucaucagcgacacccccgugcacgacugcaacaccaccugccagacccccaagggcgccaucaacaccagccugcccuuccagaacauccaccccaucaccaucggcaagugccccaaguacgugaagagcaccaagcugagacuggccaccggccugagaaacgugcccagcauccagagcagaggccuguucggcgccaucgccggcuucaucgagggcggcuggaccggcaugguggacggcugguacggcuaccaccaccagaacgagcagggcagcggcuacgccgccgaccugaagagcacccagaacgccaucgacgagaucaccaacaaggugaacagcgugaucgagaagaugaacacccaguucaccgccgugggcaaggaguucaaccaccuggagaagagaaucgagaaccugaacaagaagguggacgacggcuuccuggacaucuggaccuacaacgccgagcugcuggugcugcuggagaacgagagaacccuggacuaccacgacagcaacgugaagaaccuguacgagaaggugagaagccagcugaagaacaacgccaaggagaucggcaacggcugcuucgaguucuaccacaagugcgacaacaccugcauggagagcgugaagaacggcaccuacgacuaccccaaguacagcgaggaggccaagcugaacagagaggagaucgacggcgugaagcuggagagcaccagaaucuaccagauccuggccaucuacagcaccguggccagcagccuggugcugguggugagccugggcgccaucagcuucuggaugugcagcaacggcagccugagaugcagaaucugcaucuga

SEQ ID NO: 165857 - RNA, 1701 nt, Artificial Sequence; identical to SEQ ID NO: 165854
  derived and/or modified CDS sequence (opt4) from hemagglutinin__InfluenzaA__ADM33251

SEQ ID NO: 165858 - RNA, 1701 nt, Artificial Sequence
  derived and/or modified CDS sequence (opt4) from hemagglutinin__InfluenzaA__ADM33260
augaaggccauccugguggugcugcuguacaccuucgccaccgccaacgccgacacccugugcaucggcuaccacgccaacaacagcaccgacaccguggacaccgugcuggagaagaacgugaccgugacccacagcgugaacauccuggaggacaagcacaacggcaagcugugcaagcugagaggcguggccccccugcaccugggcaagugcaacaucgccggcuggauccugggcaaccccgagugcgagagccugagcaccgccagcagcuggagcuacaucguggagaccagcagcagcgacaacggcaccugcuaccccggcgacuucaucgacuacgaggagcugagagagcagcugagcagcgugagcagcuucgagagauucgagaucuuccccaagaccagcagcuggcccaaccacgacagcaacaagggcgugaccgccgccugcccccacgccggcgccaagagcuucuacaagaaccugaucuggcuggugaagaagggcgacagcuaccccaagcugagcaagagcuacaucaacgacaagggcaaggaggugcuggugcuguggggcauccaccaccccagcaccagcgccgaccagcagagccuguaccagaacgccgacgccuacguguucgugggcagcagcagauacagcaagaaguucaagcccgagaucgccaucagacccaaggugagagaccaggagggcagaaugaacuacuacuggacccugguggagcccggcgacaagaucaccuucgaggccaccggcaaccugguggugcccagauacgccuucgccauggagagaaacgccggcagcggcaucaucaucagcgacacccccgugcacgacugcaacaccaccugccagacccccaagggcgccaucaacaccagccugcccuuccagaacauccaccccaucaccaucggcaagugccccaaguacgugaagagcaccaagcugagacuggccaccggccugagaaacgugcccagcauccagagcagaggccuguucggcgccaucgccggcuucaucgagggcggcuggaccggcaugguggacggcugguacggcuaccaccaccagaacgagcagggcagcggcuacgccgccgaccugaagagcacccagaacgccaucgacgagaucaccaacaaggugaacagcgugaucgagaagaugaacacccaguucaccgccgugggcaaggaguucaaccaccuggagaagagaaucgagaaccugaacaagaagguggacgacggcuuccuggacaucuggaccuacaacaccgagcugcuggugcugcuggagaacgagagaacccuggacuaccacgacagcaacgugaagaaccuguacgagaaggugagaagccagcugaagaacaacgccaaggagaucggcaacggcugcuucgaguucuaccacaagugcgacaacaccugcauggagagcgugaagaacggcaccuacgacuaccccaaguacagcgaggaggccaagcugaacagagaggagaucgacggcgugaagcuggagagcaccagaaucuaccagauccuggccaucuacagcaccguggccagcagccuggugcugguggugagccugggcgccaucagcuucuggaugugcagcaacggcagccugagaugcagaaucugcaucuga

SEQ ID NO: 165859 - RNA, 1701 nt, Artificial Sequence
  derived and/or modified CDS sequence (opt4) from hemagglutinin__InfluenzaA__ADM33280
augaaggccauccugguggugcugcuguacaccuucgccaccgccaacgccgacacccugugcaucggcuaccacgccaacaacagcaccgacaccguggacaccgugcuggagaagaacgugaccgugacccacagcgugaacauccuggaggacaagcacaacggcaagcugugcaagcugagaggcguggccccccugcaccugggcaagugcaacaucgccggcuggauccugggcaaccccgagugcgagagccugagcaccgugagcagcuggagcuacaucguggagaccagcagcagcgacaacggcaccugcuaccccggcgacuucaucgacuacgaggagcugagagagcagcugagcagcgugagcagcuucgagagauucgagaucuuccccaagaccagcagcuggcccaaccacgacagcaacaagggcgugaccgccgccugcccccacgccggcgccaagagcuucuacaagaaccugaucuggcuggugaagaagggcaacagcuaccccaagcugagcaagagcuacaucaacgacaagggcaaggaggugcuggugcuguggggcauccaccaccccagcaccagcgccgaccagcagagccuguaccagaacgccgacgccuacguguucgugggcagcagcagauacagcaagaaguucaagcccgagaucgccaucagacccaaggugagagaccaggagggcagaaugaacuacuacuggacccugguggagcccggcgacaagaucaccuucgaggccaccggcaaccugguggugcccagauacgccuucgccauggagagaaacgccggcagcggcaucaucaucagcgacacccccgugcacgacugcaacaccaccugccagacccccagaggcgccaucaacaccagccugcccuuccagaacauccaccccaucaccaucggcaagugccccaaguacgugaagagcaccaagcugagacuggccaccggccugagaaacgugcccagcauccagagcagaggccuguucggcgccaucgccggcuucaucgagggcggcuggaccggcaugguggacggcugguacggcuaccaccaccagaacgagcagggcagcggcuacgccgccgaccugaagagcacccagaacgccaucgacgagaucaccaacaaggugaacagcgugaucgagaagaugaacacccaguucaccgccgugggcaaggaguucaaccaccuggagaagagaaucgagaaccugaacaagaagguggacgacggcuuccuggacaucuggaccuacaacgccgagcugcuggugcugcuggagaacgagagaacccuggacuaccacgacagcaacgugaagaaccuguacgagaaggugagaagccagcugaagaacaacgccaaggagaucggcaacggcugcuucgaguucuaccacaagugcgacaacaccugcauggagagcgugaagaacggcaccuacgacuaccccaaguacagcgaggaggccaagcugaacagagaggagaucgacggcgugaagcuggagagcaccagaaucuaccagauccuggccaucuacagcaccguggccagcagccuggugcugguggugagccugggcgccaucagcuucuggaugugcagcaacggcagccugcagugcagaaucugcaucuga

SEQ ID NO: 165860 - RNA, 1701 nt, Artificial Sequence; identical to SEQ ID NO: 163176
  derived and/or modified CDS sequence (opt4) from hemagglutinin__InfluenzaA__ADM33290

SEQ ID NO: 165861 - RNA, 1701 nt, Artificial Sequence; identical to SEQ ID NO: 162729
  derived and/or modified CDS sequence (opt4) from hemagglutinin__InfluenzaA__ADM33300

SEQ ID NO: 165862 - RNA, 1701 nt, Artificial Sequence; identical to SEQ ID NO: 162716
  derived and/or modified CDS sequence (opt4) from hemagglutinin__InfluenzaA__ADM33310

SEQ ID NO: 165863 - RNA, 1701 nt, Artificial Sequence
  derived and/or modified CDS sequence (opt4) from hemagglutinin__InfluenzaA__ADM33320
augaaggccauccugguggugaugcuguacaccuucgccaccgccaacgccgacacccugugcaucggcuaccacgccaacaacagcaccgacaccguggacaccgugcuggagaagaacgugaccgugacccacagcgugaaccugcuggaggacaagcacaacggcaagcugugcaagcugagaggcguggccccccugcaccugggcaagugcaacaucgccggcuggauccugggcaaccccgagugcgagagccugagcaccgccagcagcuggagcuacaucguggagaccuucagcagcgacaacggcaccugcuaccccggcgacuucaucgacuacgaggagcugagagagcagcugagcagcgugagcagcuucgagagauucgagaucuuccccaagaccagcagcuggcccaaccacgacagcaacaagggcgugaccgccgccugcccccacgccggcgccaagagcuucuacaagaaccugaucuggcuggugaagaagggcaacagcuaccccaagcugagcaagagcuacaucaacgacaagggcaaggaggugcuggugcuguggggcauccaccaccccagcaccagcgccgaccagcagagccuguaccagaacgccgacgccuacguguucgugggcagcagcagauacagcaagaaguucaagcccgagaucgccaucagacccaaggugagagaccaggagggcagaaugaacuacuacuggacccugguggagcccggcgacaagaucaccuucgaggccaccggcaaccugguggugcccagauacgccuucgccauggagagaaacgccggcagcggcaucaucaucagcgacacccccgugcacgacugcaacaccaccugccagacccccaagggcgccaucaacaccagccugcccuuccagaacauccaccccaucaccaucggcaagugccccaaguacgugaagagcaccaagcugagacuggccaccggccugagaaacgugcccagcauccagagcagaggccuguucggcgccaucgccggcuucaucgagggcggcuggaccggcaugguggacggcugguacggcuaccaccaccagaacgagcagggcagcggcuacgccgccgaccugaagagcacccagaacgccaucgacgagaucaccaacaaggugaacagcgugaucgagaagaugaacacccaguucaccgccgugggcaaggaguucaaccaccuggagaagagaaucgagaaccugaacaagaagguggacgacggcuuccuggacaucuggaccuacaacgccgagcugcuggugcugcuggagaacgagagaacccuggacuaccacgacagcaacgugaagaaccuguacgagaaggugagaagccagcugaagaacaacgccaaggagaucggcaacggcugcuucgaguucuaccacaagugcgacaacaccugcauggagagcgugaagaacggcaccuacgacuaccccaaguacagcgaggaggccaagcugaacagagaggagaucgacggcgugaagcuggagagcaccagaaucuaccagauccuggccaucuacagcaccguggccagcagccuggugcugguggugagccugggcgccaucagcuucuggaugugcagcaacggcagccugcagugcagaaucugcaucuga

SEQ ID NO: 165864 - RNA, 1701 nt, Artificial Sequence; identical to SEQ ID NO: 162755
  derived and/or modified CDS sequence (opt4) from hemagglutinin__InfluenzaA__ADM33340

SEQ ID NO: 165865 - RNA, 1701 nt, Artificial Sequence
  derived and/or modified CDS sequence (opt4) from hemagglutinin__InfluenzaA__ADM33355
augaaggccauccugguggugaugcuguacaccuucgccaccgccaacgccgacacccugugcaucggcuaccacgccaacaacagcaccgacaccguggacaccgugcuggagaagaacgugaccgugacccacagcgugaaccugcuggaggacaagcacaacggcaagcugugcaagcugagaggcguggccccccugcaccugggcaagugcaacaucgccggcuggauccugggcaaccccgagugcgagagccugagcaccgccagcagcuggagcuacaucguggagaccagcagcagcgacaacggcaccugcuaccccggcgacuucaucgacuacgaggagcugagagagcagcugagcagcgugagcagcuucgagagauucgagaucuuccccaagaccagcagcuggcccaaccacgacagcaacaagggcgugaccgccgccugcccccacgccggcgccaagagcuucuacaagaaccugaucuggcuggugaagaagggcaacagcuaccccaagcugagcaagagcuacaucaacgacaagggcaaggaggugcuggugcuguggggcauccaccaccccagcaccagcgccgaccagcagagccuguaccagaacgccgacgccuacguguucgugggcagcagcagauacagcaagaaguucaagcccgagaucgccaucagacccaaggugagagaccaggagggcagaaugaacuacuacuggacccugguggagcccggcgacaagaucaccuucgaggccaccggcaaccugguggugcccagauacgccuucgccauggagagaaacgccggcagcggcaucaucaucagcgacacccccgugcacaacugcaacaccaccugccagacccccaagggcgccaucaacaccagccugcccuuccagaacauccaccccaucaccaucggcaagugccccaaguacgugaagagcaccaagcugagacuggccaccggccugagaaacgugcccagcauccagagcagaggccuguucggcgccaucgccggcuucaucgagggcggcuggaccggcaugguggacggcugguacggcuaccaccaccagaacgagcagggcagcggcuacgccgccgaccugaagagcacccagaacgccaucgacgagaucaccaacaaggugaacagcgugaucgagaagaugaacacccaguucaccgccgugggcaaggaguucaaccaccuggagaagagaaucgagaaccugaacaagaagguggacgacggcuuccuggacaucuggaccuacaacgccgagcugcuggugcugcuggagaacgagagaacccuggacuaccacgacagcaacgugaagaaccuguacgagaaggugagaagccagcugaagaacaacgccaaggagaucggcaacggcugcuucgaguucuaccacaagugcgacaacaccugcauggagagcgugaagaacggcaccuacgacuaccccaaguacagcgaggaggccaagcugaacagagaggagaucgacggcgugaagcuggagagcaccagaaucuaccagauccuggccaucuacagcaccguggccagcagccuggugcugguggugagccugggcgccaucagcuucuggaugugcagcaacggcagccugcagugcagaaucugcaucuga

SEQ ID NO: 165866 - RNA, 1701 nt, Artificial Sequence; identical to SEQ ID NO: 165865
  derived and/or modified CDS sequence (opt4) from hemagglutinin__InfluenzaA__ADM33365

SEQ ID NO: 165867 - RNA, 1701 nt, Artificial Sequence; identical to SEQ ID NO: 162755
  derived and/or modified CDS sequence (opt4) from hemagglutinin__InfluenzaA__ADM33375

SEQ ID NO: 165868 - RNA, 1701 nt, Artificial Sequence
  derived and/or modified CDS sequence (opt4) from hemagglutinin__InfluenzaA__ADM33385
augaaggccauccugguggugaugcuguacaccuucgccaccgccaacgccgacacccugugcaucggcuaccacgccaacaacagcaccgacaccguggacaccgugcuggagaagaacgugaccgugacccacagcgugaaccugcuggaggacaagcacaacggcaagcugugcaagcugagaggcguggccccccugcaccugggcaagugcaacaucgccggcuggauccugggcaaccccgagugcgagagccugagcaccgccagcagcuggagcuacaucguggagaccagcagcagcgacaacggcaccugcuaccccggcgacuucaucgacuacgaggagcugagagagcagcugagcagcgugagcagcuucgagagauucgagaucuuccccaagaccagcagcuggcccaaccacgacagcaacaagggcgugaccgccgccugcccccacgccggcgccaagagcuucuacaagaaccugaucuggcuggugaagaagggcaacagcuaccccaagcugagcaagagcuacaucaacgacaagggcaaggaggugcuggugcuguggggcauccaccaccccagcaccagcgccgaccagcagagccuguaccagaacgccgacgccuacguguucgugggcagcagcagauacagcaagaaguucaagcccgagaucgccaucagacccaaggugagagaccaggagggcagaaugaacuacuacuggacccugguggagcccggcgacaagaucaccuucgaggccaccggcaaccugguggugcccagauacgccuucgccauggagagaaacgccggcagcggcaucaucaucagcgacacccccgugcacgacugcaacaccaccugccagaccagcaagggcgccaucaacaccagccugcccuuccagaacauccaccccaucaccaucggcaagugccccaaguacgugaagagcaccaagcugagacuggccaccggccugagaaacgugcccagcauccagagcagaggccuguucggcgccaucgccggcuucaucgagggcggcuggaccggcaugguggacggcugguacggcuaccaccaccagaacgagcagggcagcggcuacgccgccgaccugaagagcacccagaacgccaucgacgagaucaccaacaaggugaacagcgugaucgagaagaugaacacccaguucaccgccgugggcaaggaguucaaccaccuggagaagagaaucgagaaccugaacaagaagguggacgacggcuuccuggacaucuggaccuacaacgccgagcugcuggugcugcuggagaacgagagaacccuggacuaccacgacagcaacgugaagaaccuguacgagaaggugagaagccagcugaagaacaacgccaaggagaucggcaacggcugcuucgaguucuaccacaagugcgacaacaccugcauggagagcgugaagaacggcaccuacgacuaccccaaguacagcgaggaggccaagcugaacagagaggagaucgacggcgugaagcuggagagcaccagaaucuaccagauccuggccaucuacagcaccguggccagcagccuggugcugguggugagccugggcgccaucagcuucuggaugugcagcaacggcagccugcagugcagaaucugcaucuga

SEQ ID NO: 165869 - RNA, 1701 nt, Artificial Sequence; identical to SEQ ID NO: 163176
  derived and/or modified CDS sequence (opt4) from hemagglutinin__InfluenzaA__ADM33395

SEQ ID NO: 165870 - RNA, 1701 nt, Artificial Sequence; identical to SEQ ID NO: 163176
  derived and/or modified CDS sequence (opt4) from hemagglutinin__InfluenzaA__ADM33405

SEQ ID NO: 165871 - RNA, 1701 nt, Artificial Sequence; identical to SEQ ID NO: 165865
  derived and/or modified CDS sequence (opt4) from hemagglutinin__InfluenzaA__ADM33415

SEQ ID NO: 165872 - RNA, 1701 nt, Artificial Sequence; identical to SEQ ID NO: 163572
  derived and/or modified CDS sequence (opt4) from hemagglutinin__InfluenzaA__ADM33425

SEQ ID NO: 165873 - RNA, 1701 nt, Artificial Sequence
  derived and/or modified CDS sequence (opt4) from hemagglutinin__InfluenzaA__ADM34007
augaaggccauccugguggugcugcuguacaccuucgccaccgccaacgccgacacccugugcaucggcuaccacgccaacaacagcaccgacaccguggacaccgugcuggagaagaacgugaccgugacccacagcgugaaccugcuggaggacaagcacaacggcaagcugugcaagcugagaggcguggccccccugcaccugggcaagugcaacaucgccggcuggauccugggcaaccccgagugcgagagccugagcaccgccagcagcuggagcuacaucguggagaccagcagcagcgacaacggcaccugcuaccccggcgacuucaucgacuacgaggagcugagagagcagcugagcagcgugagcagcuucgagagauucgagaucuuccccaagaccagcagcuggcccaaccacgacagcaacaagggcgugaccgccgccugcccccacgccggcgccaagagcuucuacaagaaccugaucuggcuggugaagaagggcaacagcuaccccaagcugagcaagagcuacaucaacgacaagggcaaggaggugcuggugcuguggggcauccaccaccccagcaccagcgccgaccagcagagccuguaccagaacgccgacgccuacguguucgugggcaccagcagauacagcaagaaguucaagcccgagaucgccaucagacccaaggugagagaccaggagggcagaaugaacuacuacuggacccuggaggagcccggcgacaagaucaccuucgaggccaccggcaaccugguggugcccagauacgccuucgccauggagagaaacgccggcagcggcaucaucaucagcgacacccccgugcacgacugcaacaccaccugccagacccccaagggcgccaucaacaccagccugcccuuccagaacauccaccccaucaccaucggcaagugccccaaguacgugaagagcaccaagcugagacuggccaccggccugagaaacgugcccagcauccagagcagaggccuguucggcgccaucgccggcuucaucgagggcggcuggaccggcaugguggacggcugguacggcuaccaccaccagaacgagcagggcagcggcuacgccgccgaccugaagagcacccagaacgccaucgacgagaucaccaacaaggugaacagcgugaucgagaagaugaacacccaguucaccgccgugggcaaggaguucaaccaccuggagaagagaaucgagaaccugaacaagaagguggacgacggcuuccuggacaucuggaccuacaacgccgagcugcuggugcugcuggagaacgagagaacccuggacuaccacgacagcaacgugaagaaccuguacgagaaggugagaagccagcugaagaacaacgccaaggagaucggcaacggcugcuucgaguucuaccacaagugcgacaacaccugcauggagagcgugaagaacggcaccuacgacuaccccaaguacagcgaggaggccaagcugaacagagaggagaucgacggcgugaagcuggagagcaccagaaucuaccagauccuggccaucuacagcaccguggccagcagccuggugcugguggugagccugggcgccaucagcuucuggaugugcagcaacggcagccugcagugcagaaucugcaucuga

SEQ ID NO: 165874 - RNA, 1701 nt, Artificial Sequence; identical to SEQ ID NO: 162729
  derived and/or modified CDS sequence (opt4) from hemagglutinin__InfluenzaA__ADM52443

SEQ ID NO: 165875 - RNA, 1701 nt, Artificial Sequence
  derived and/or modified CDS sequence (opt4) from hemagglutinin__InfluenzaA__ADM52453
augaaggccauccugguggugcugcuguacaccuucgccaccgccaacgccgacacccugugcaucggcuaccacgccaacaacagcaccgacaccguggacaccgugcuggagaagaacgugaccgugacccacagcgugaacauccuggaggacaagcacaacggcaagcugugcaagcugagaggcguggccccccugcaccugggcaagugcaacaucgccggcuggauccugggcaaccccgagugcgagagccugagcaccgccagcagcuggagcuacaucguggagaccagcagcagcgacaacggcaccugcuaccccggcgacuucaucgacuacgaggagcugagagagcagcugagcagcgugagcagcuucgagagauucgagaucuuccccaagaccagcagcuggcccaaccacgacagcaacaagggcgugaccgccgccugcccccacgccggcgccaagagcuucuacaagaaccugaucuggcuggugaagaagggcaacagcuaccccaagcugagcaagagcuacaucaacgacaagggcaaggaggugcuggugcuguggggcauccaccaccccagcaccagcgccgaccagcagagccuguaccagaacgccgacgccuacguguucgugggcagcagcagauacagcaagaaguucaagcccgagaucgccaucagacccaaggugagagaccaggagggcagaaugaacuacuacuggacccugguggagcccggcgacaagaucaccuucgaggccaccggcaaccugguggugcccagauacgccuucgccauggagagaaacgccggcagcggcaucaucaucagcgacacccccauccacgacugcaacaccaccugccagacccccaagggcgccaucaacaccagccugcccuuccagaacgugcaccccaucaccaucggcaagugccccaaguacgugaagagcaccaagcugagacuggccaccggccugagaaacgugcccagcauccagagcagaggccuguucggcgccaucgccggcuucaucgagggcggcuggaccggcaugguggacggcugguacggcuaccaccaccagaacgagcagggcagcggcuacgccgccgaccugaagagcacccagaacgccaucgacgagaucaccaacaaggugaacagcgugaucgagaagaugaacacccaguucaccgccgugggcaaggaguucaaccaccuggagaagagaaucgagaaccugaacaagaagguggacgacggcuuccuggacaucuggaccuacaacgccgagcugcuggugcugcuggagaacgagagaacccuggacuaccacgacagcaacgugaagaaccuguacgagaaggugagaagccagcugaagaacaacgccaaggagaucggcaacggcugcuucgaguucuaccacaagugcgacaacaccugcauggagagcgugaagaacggcaccuacgacuaccccaaguacagcgaggaggccaagcugaacagagaggagaucgacggcgugaagcuggagagcaccagaaucuaccagauccuggccaucuacagcaccguggccagcagccuggugcugguggugagccugggcgccaucagcuucuggaugugcagcaacggcagccugcagugcagaaucugcaucuga

SEQ ID NO: 165876 - RNA, 1701 nt, Artificial Sequence
  derived and/or modified CDS sequence (opt4) from hemagglutinin__InfluenzaA__ADM52473
augaaggccauccuggccgugcugcuguacaccuucgccaccgccaacgccgacacccugugcaucggcuaccacgccaacaacagcaccgacaccguggacaccgugcuggagaagaacgugaccgugacccacagcgugaaccugcuggaggacaagcacaacggcaagcugugcaagcugagaggcguggccccccugcaccugggcaagugcaacaucgccggcuggauccugggcaaccccgagugcgagagccugagcaccgccagcagcuggagcuacaucguggagaccagcagcagcggcaacggcaccugcuaccccggcgacuucaucgacuacgaggagcugagagagcagcugagcagcgugagcagcuucgagagauucgagaucuuccccaagaccagcagcuggcccaaccacgacagcaacaagggcgugaccgccgccugcccccacgccggcgccaagagcuucuacaagaaccugcuguggcuggugaagaagggcaacagcuaccccaagcugagcaagagcuacaucaacgacaagggcaaggaggugcuggugcuguggggcauccaccaccccagcaccagcgccgaccagcagagccuguaccagaacgccgacgccuacguguucgugggcaccagcagauacagcaagaaguucaagcccgagaucgccaucagacccaaggugagagaccaggagggcagaaugaacuacuacuggacccuggugggccccggcgacaagaucaccuucgaggccaccggcaaccugguggugcccagauacgccuucgccauggagagaaacgccggcagcggcaucaucaucagcgacacccccgugcacgacugcaacaccaccugccagacccccaagggcgccaucaacaccagccugcccuuccagaacauccaccccaucaccaucggcaagugccccaaguacgugaagagcaccaagcugagacuggccaccggccugagaaacgugcccagcauccagagcagaggccuguucggcgccaucgccggcuucaucgagggcggcuggaccggcaugguggacggcugguacggcuaccaccaccagaacgagcagggcagcggcuacgccgccgaccugaagagcacccagaacgccaucgacgagaucaccaacaaggugaacagcgugaucgagaagaugaacacccaguucaccgccgugggcaaggaguucaaccaccuggagaagagaaucgagaaccugaacaagaagguggacgacggcuuccuggacaucuggaccuacaacgccgagcugcuggugcugcuggagaacgagagaacccuggacuaccacgacagcaacgugaagaaccuguacgagaaggugagaagccagcugaagaacaacgccaaggagaucggcaacggcugcuucgaguucuaccacaagugcgacaacaccugcauggagagcgugaagaacggcaccuacgacuaccccaaguacagcgaggaggccaagcugaacagagaggagaucgacggcgugaagcuggagagcaccagaaucuaccagauccuggccaucuacagcaccguggccagcagccuggugcugguggugagccugggcgccaucagcuucuggaugugcagcaacggcagccugcagugcagaaucugcaucuga

SEQ ID NO: 165877 - RNA, 1701 nt, Artificial Sequence; identical to SEQ ID NO: 163893
  derived and/or modified CDS sequence (opt4) from hemagglutinin__InfluenzaA__ADM52483

SEQ ID NO: 165878 - RNA, 1701 nt, Artificial Sequence; identical to SEQ ID NO: 162909
  derived and/or modified CDS sequence (opt4) from hemagglutinin__InfluenzaA__ADM52493

SEQ ID NO: 165879 - RNA, 1701 nt, Artificial Sequence; identical to SEQ ID NO: 162909
  derived and/or modified CDS sequence (opt4) from hemagglutinin__InfluenzaA__ADM52513

SEQ ID NO: 165880 - RNA, 1701 nt, Artificial Sequence; identical to SEQ ID NO: 162909
  derived and/or modified CDS sequence (opt4) from hemagglutinin__InfluenzaA__ADM52524

SEQ ID NO: 165881 - RNA, 1701 nt, Artificial Sequence; identical to SEQ ID NO: 162909
  derived and/or modified CDS sequence (opt4) from hemagglutinin__InfluenzaA__ADM52534

SEQ ID NO: 165882 - RNA, 1701 nt, Artificial Sequence; identical to SEQ ID NO: 162909
  derived and/or modified CDS sequence (opt4) from hemagglutinin__InfluenzaA__ADM52554

SEQ ID NO: 165883 - RNA, 1701 nt, Artificial Sequence; identical to SEQ ID NO: 162909
  derived and/or modified CDS sequence (opt4) from hemagglutinin__InfluenzaA__ADM52564

SEQ ID NO: 165884 - RNA, 1701 nt, Artificial Sequence; identical to SEQ ID NO: 162716
  derived and/or modified CDS sequence (opt4) from hemagglutinin__InfluenzaA__ADM52574

SEQ ID NO: 165885 - RNA, 1701 nt, Artificial Sequence; identical to SEQ ID NO: 162729
  derived and/or modified CDS sequence (opt4) from hemagglutinin__InfluenzaA__ADM52584

SEQ ID NO: 165886 - RNA, 1701 nt, Artificial Sequence
  derived and/or modified CDS sequence (opt4) from hemagglutinin__InfluenzaA__ADM52594
augaaggccauccugguggugcugcuguacaccuucgccaccgccaacgccgacacccugugcaucggcuaccacgccaacaacagcaccgacaccguggacaccgugcuggagaagaacgugaccgugacccacagcgugaaccugcuggaggacaagcacaacggcaagcugugcaagcugagaggcguggccccccugcaccugggcaagugcaacaucgccggcuggauccugggcaaccccgagugcgagagccugagcaccgccagcagcuggagcuacaucguggagaccagcagcagcgacaacggcaccugcuaccccggcgacuucaucgacuacgaggagcugagagagcagcugagcagcgugagcagcuucgagagauucgagaucuuccccaagaccagcagcuggcccaaccacgacagcaacaagggcgugaccgccgccugcccccacgccggcgccaagagcuucuacaagaaccugaucuggcuggugaagaagggcaacagcuaccccaagcugagcaagagcuacaucaacgacaagggcaaggaggugcuggugcuguggggcauccaccaccccagcaccagcgccgaccagcagagccuguaccagaacgccgacgccuacguguucgugggcaccagcaaguacagcaagaaguucaagcccgagaucgccaucagacccaaggugagagaccaggagggcagaaugaacuacuacuggacccugguggagcccggcgacaagaucaccuucgaggccaccggcaaccugguggugcccagauacgccuucgccauggagagaaacgccggcagcggcaucaucaucagcgacacccccgugcacgacugcaacaccaccugccagacccccaagggcgccaucaacaccagccugcccuuccagaacauccaccccaucaccaucggcaagugccccaaguacgugaagagcaccaagcugagacuggccaccggccugagaaacgugcccagcauccagagcagaggccuguucggcgccaucgccggcuucaucgagggcggcuggaccggcaugguggacggcugguacggcuaccaccaccagaacgagcagggcagcggcuacgccgccgaccugaagagcacccagaacgccaucgacaagaucaccaacaaggugaacagcgugaucgagaagaugaacacccaguucaccgccgugggcaaggaguucaaccaccuggagaagagaaucgagaaccugaacaagaagguggacgacggcuuccuggacaucuggaccuacaacgccgagcugcuggugcugcuggagaacgagagaacccuggacuaccacgacagcaacgugaagaaccuguacgagaaggugagaagccagcugaagaacaacgccaaggagaucggcaacggcugcuucgaguucuaccacaagugcgacaacaccugcauggagagcgugaagaacggcaccuacgacuaccccaaguacagcgaggaggccaagcugaacagagaggagaucgacggcgugaagcuggagagcaccagaaucuaccagauccuggccaucuacagcaccguggccagcagccuggugcugguggugagccugggcgccaucagcuucuggaugugcagcaacggcagccugcagugcagaaucugcaucuga

SEQ ID NO: 165887 - RNA, 1701 nt, Artificial Sequence; identical to SEQ ID NO: 162909
  derived and/or modified CDS sequence (opt4) from hemagglutinin__InfluenzaA__ADM52604

SEQ ID NO: 165888 - RNA, 1701 nt, Artificial Sequence; identical to SEQ ID NO: 162909
  derived and/or modified CDS sequence (opt4) from hemagglutinin__InfluenzaA__ADM52614

SEQ ID NO: 165889 - RNA, 1701 nt, Artificial Sequence; identical to SEQ ID NO: 164501
  derived and/or modified CDS sequence (opt4) from hemagglutinin__InfluenzaA__ADM52624

SEQ ID NO: 165890 - RNA, 1701 nt, Artificial Sequence; identical to SEQ ID NO: 162909
  derived and/or modified CDS sequence (opt4) from hemagglutinin__InfluenzaA__ADM52634

SEQ ID NO: 165891 - RNA, 1701 nt, Artificial Sequence; identical to SEQ ID NO: 162909
  derived and/or modified CDS sequence (opt4) from hemagglutinin__InfluenzaA__ADM52644

SEQ ID NO: 165892 - RNA, 1701 nt, Artificial Sequence; identical to SEQ ID NO: 162909
  derived and/or modified CDS sequence (opt4) from hemagglutinin__InfluenzaA__ADM52654

SEQ ID NO: 165893 - RNA, 1701 nt, Artificial Sequence; identical to SEQ ID NO: 164317
  derived and/or modified CDS sequence (opt4) from hemagglutinin__InfluenzaA__ADM52664

SEQ ID NO: 165894 - RNA, 1701 nt, Artificial Sequence; identical to SEQ ID NO: 164501
  derived and/or modified CDS sequence (opt4) from hemagglutinin__InfluenzaA__ADM52674

SEQ ID NO: 165895 - RNA, 1701 nt, Artificial Sequence; identical to SEQ ID NO: 162909
  derived and/or modified CDS sequence (opt4) from hemagglutinin__InfluenzaA__ADM52684

SEQ ID NO: 165896 - RNA, 1701 nt, Artificial Sequence; identical to SEQ ID NO: 164501
  derived and/or modified CDS sequence (opt4) from hemagglutinin__InfluenzaA__ADM52704

SEQ ID NO: 165897 - RNA, 1701 nt, Artificial Sequence; identical to SEQ ID NO: 164317
  derived and/or modified CDS sequence (opt4) from hemagglutinin__InfluenzaA__ADM52714

SEQ ID NO: 165898 - RNA, 1701 nt, Artificial Sequence
  derived and/or modified CDS sequence (opt4) from hemagglutinin__InfluenzaA__ADM86399
augaaggccauccugguggugcugcuguacaccuucgccaccgccaacgccgacacccugugcaucggcuaccacgccaacaacagcaccgacaccguggacaccgugcuggagaagaacgugaccgugacccacagcgugaacauccuggaggacaagcacaacggcaagcugugcaagcugagaggcguggccccccugcaccugggcaagugcaacaucgccggcuggauccugggcaaccccgagugcgagagccugagcaccgccagcagcuggagcuacaucguggagaccagcagcagcgacaacggcaccugcuaccccggcgacuucaucgacuacgaggagcugagagagcagcugagcagcgugagcagcuucgagagauucgagaucuuccccaagaccagcagcuggcccaaccacgacagcaacaagggcgugaccgccgccugcccccacgccggcgccaagagcuucuacaagaaccugaucuggcuggugaagaagggcaacagcuaccccaagcugagcaagagcuacaucaacgacaagggcaaggaggugcuggugcuguggggcauccaccaccccagcaccagcgccgaccagcagagccuguaccagaacgccgacgccuacguguucgugggcagcagcagauacagcaagaaguucaagcccgagaucgccaucagacccaaggugagagaccaggagggcagaaugaacuacuacuggacccugguggagcccggcgacaagaucaccuucgaggccaccggcaaccugguggugcccagauacgccuucgccauggagagaaacgccggcagcggcaucaucaucagcgacacccccgugcacgacugcaacaccaccugccagacccccaagggcgccgugaacaccagccugcccuuccagaacauccaccccaucaccaucggcaagugccccaaguacgugaagagcaccaagcugagacuggccaccggccugagaaacgugcccagcauccagagcagaggccuguucggcgccaucgccggcuucaucgagggcggcuggaccggcaugguggacggcugguacggcuaccaccaccagaacgagcagggcagcggcuacgccgccgaccugaagagcacccagaacgccaucgacgagaucaccaacaaggugaacagcgugaucgagaagaugaacacccaguucaccgccgugggcaaggaguucaaccaccuggagaagagaaucgagaaccugaacaagaagguggacgacggcuuccuggacaucuggaccuacaacgccgagcugcuggugcugcuggagaacgagagaacccuggacuaccacgacagcaacgugaagaaccuguacgagaaggugagaagccagcugaagaacaacgccaaggaggugggcaacggcugcuucgaguucuaccacaagugcgacaacaccugcauggagagcgugaagaacggcaccuacgacuaccccaaguacagcgaggaggccaagcugaacagagaggagaucgacggcgugaagcuggagagcaccagaaucuaccagauccuggccaucuacagcaccgccgccagcagccuggugcugguggugagccugggcgccaucagcuucuggaugugcagcaacggcagccugcagugcagaaucugcaucuga

SEQ ID NO: 165899 - RNA, 1701 nt, Artificial Sequence; identical to SEQ ID NO: 162729
  derived and/or modified CDS sequence (opt4) from hemagglutinin__InfluenzaA__ADM86409

SEQ ID NO: 165900 - RNA, 1701 nt, Artificial Sequence; identical to SEQ ID NO: 162729
  derived and/or modified CDS sequence (opt4) from hemagglutinin__InfluenzaA__ADM86419

SEQ ID NO: 165901 - RNA, 1701 nt, Artificial Sequence; identical to SEQ ID NO: 164378
  derived and/or modified CDS sequence (opt4) from hemagglutinin__InfluenzaA__ADM86440

SEQ ID NO: 165902 - RNA, 1701 nt, Artificial Sequence; identical to SEQ ID NO: 162729
  derived and/or modified CDS sequence (opt4) from hemagglutinin__InfluenzaA__ADM86450

SEQ ID NO: 165903 - RNA, 1707 nt, Artificial Sequence
  derived and/or modified CDS sequence (opt4) from hemagglutinin__InfluenzaA__ADM95450
auggagaagaucgugcugcuguucgccaucgugagccuggugaagagcgaccagaucugcaucggcuaccacgccaacaacagcaccgagcagguggacaccaucauggagaagaacgugaccgugacccacgcccaggacauccuggagaagacccacaacggcaagcugugcgaccuggacggcgugaagccccugauccugagagacugcagcguggccggcuggcugcugggcaaccccaugugcgacgaguucaucaacgugcccgaguggagcuacaucguggagaaggccaaccccgugaacgaccugugcuaccccggcgacuucaacgacuacgaggagcugaagcaccugcugagcagaaucaaccacuucgagaagauccagaucauccccaagagcagcuggcccagccacgaggccagccugggcgugagcgccgccugccccuaccagggcaagagcagcuucuucagaaacgugguguggcugaucaagaagaacaacaccuaccccaccaucaagagaagcuacaacaacaccaaccaggaggaccugcuggugauguggggcauccaccaccccaacgacgccgccgagcagaccaaccuguaccagaaccccaccaccuacaucagcgugggcaccagcacccugaaccagagacugacccccagaaucgccaccagaagcaaggugaacggccagagcggcagaauggaguucuucuggaccauccugaagcccaacgacgccaucaacuucgagagcaacggcaacuucaucgcccccgaguacgccuacaagaucgugaagaagggcgacagcaccaucaugaagagcgagcuggaguacggcaacugcaacaccaagugccagacccccaugggcgccaucaacagcagcaugcccuuccacaacauccacccccugaccaucggcgagugccccaaguacgugaagagcaacagacuggugcuggccaccggccugagaaacagcccccagagagagggcagaagaaagaagagaggccuguucggcgccaucgccggcuucaucgagggcggcuggcagggcaugguggacggcugguacggcuaccaccacagcaacgagcagggcagcggcuacgccgccgacaaggagagcacccagaaggccaucgacggcgugaccaacaaggugaacagcaucaucgacaagaugaacacccaguucgaggccgugggcagagaguucaacaaccuggagagaagaaucgagaaccugaacaagaagauggaggacggcuuccuggacguguggaccuacaacgccgagcugcuggugcugauggagaacgagagaacccuggacuuccacgacagcaacgugaagaaccuguacgacaaggugagacugcagcugagagacaacgccaaggagcugggcaacggcugcuucgaguucuaccacaagugcgacaacgagugcauggagagcgugagaaacggcaccuacgacuacccccaguacagcgaggaggccagacugaagagagaggagaucagcggcgugaagcuggagagcaucggcaucuaccagauccugagcaucuacagcaccguggccagcagccuggcccuggccaucaugguggccggccugagccuguggaugugcagcaacggcagccugcagugcagaaucugcaucuga

SEQ ID NO: 165904 - RNA, 1701 nt, Artificial Sequence; identical to SEQ ID NO: 162729
  derived and/or modified CDS sequence (opt4) from hemagglutinin__InfluenzaA__ADM95745

SEQ ID NO: 165905 - RNA, 1701 nt, Artificial Sequence; identical to SEQ ID NO: 162729
  derived and/or modified CDS sequence (opt4) from hemagglutinin__InfluenzaA__ADM95746

SEQ ID NO: 165906 - RNA, 1701 nt, Artificial Sequence; identical to SEQ ID NO: 162729
  derived and/or modified CDS sequence (opt4) from hemagglutinin__InfluenzaA__ADM95747

SEQ ID NO: 165907 - RNA, 1701 nt, Artificial Sequence; identical to SEQ ID NO: 162729
  derived and/or modified CDS sequence (opt4) from hemagglutinin__InfluenzaA__ADM95749

SEQ ID NO: 165908 - RNA, 1701 nt, Artificial Sequence
  derived and/or modified CDS sequence (opt4) from hemagglutinin__InfluenzaA__ADM95750
augaaggccauccugguggugcugcuguacaccuucgccaccgccaacgccgacacccugugcaucggcuaccacgccaacaacagcaccgacaccguggacaccgugcuggagaagaacgugaccgugacccacagcuucaaccugcuggaggacaagcacaacggcaagcugugcaagcugagaggcguggccccccugcaccugggcaagugcaacaucgccggcuggauccugggcaaccccgagugcgagagccugagcaccgccagcagcuggagcuacaucguggagaccagcagcagcgacaacggcaccugcuaccccggcgacuucaucgacuacgaggagcugagagagcagcugagcagcgugagcagcuucgagagauucgagaucuuccccaagaccagcagcuggcccaaccacgacagcaacaagggcgugaccgccgccugcccccacgccggcgccaagagcuucuacaagaaccugaucuggcuggugaagaagggcagcagcuaccccaagcugagcaagagcuacaucaacgacaagggcaaggaggugcuggugcuguggggcauccaccaccccagcaccagcgccgaccagcagagccuguaccagaacgccgacgccuacguguucgugggcagcagcagauacagcaagaaguucaagcccgagaucgccaucagacccaaggugagagaccaggagggcagaaugaacuacuacuggacccugguggagcccggcgacaagaucaccuucgaggccaccggcaaccugguggugcccagauacgccuucgccauggagagaaacgccggcagcggcaucaucaucagcgacacccccgugcacgacugcaacaccaccugccagacccccaagggcgccaucaacaccagccugcccuuccagaacauccaccccaucaccaucggcaagugccccaaguacgugaagagcaccaagcugagacuggccaccggccugagaaacgugcccagcauccagagcagaggccuguucggcgccaucgccggcuucaucgagggcggcuggaccggcaugguggacggcugguacggcuaccaccaccagaacgagcagggcagcggcuacgccgccgaccugaagagcacccagaacgccaucgacgagaucaccaacaaggugaacagcgugaucgagaagaugaacacccaguucaccgccgugggcaaggaguucaaccaccuggagaagagaaucgagaaccugaacaagaagguggacgacggcuuccuggacaucuggaccuacaacgccgagcugcuggugcugcuggagaacgagagaacccuggacuaccacgacagcaacgugaagaaccuguacgagaaggugagaagccagcugaagaacaacgccaaggagaucggcaacggcugcuucgaguucuaccacaagugcgacaacaccugcauggagagcgugaagaacggcaccuacgacuaccccaaguacagcgaggaggccaagcugaacagagaggagaucgacggcgugaagcuggagagcaccagaaucuaccagauccuggccaucuacagcaccguggccagcagccuggugcugguggugagccugggcgccaucagcuucuggaugugcagcaacggcagccugcagugcagaaucugcaucuga

SEQ ID NO: 165909 - RNA, 1701 nt, Artificial Sequence; identical to SEQ ID NO: 162729
  derived and/or modified CDS sequence (opt4) from hemagglutinin__InfluenzaA__ADM95751

SEQ ID NO: 165910 - RNA, 1701 nt, Artificial Sequence; identical to SEQ ID NO: 162729
  derived and/or modified CDS sequence (opt4) from hemagglutinin__InfluenzaA__ADM95752

SEQ ID NO: 165911 - RNA, 1701 nt, Artificial Sequence; identical to SEQ ID NO: 162729
  derived and/or modified CDS sequence (opt4) from hemagglutinin__InfluenzaA__ADM95753

SEQ ID NO: 165912 - RNA, 1701 nt, Artificial Sequence; identical to SEQ ID NO: 162729
  derived and/or modified CDS sequence (opt4) from hemagglutinin__InfluenzaA__ADM95754

SEQ ID NO: 165913 - RNA, 1701 nt, Artificial Sequence; identical to SEQ ID NO: 162729
  derived and/or modified CDS sequence (opt4) from hemagglutinin__InfluenzaA__ADM95755

SEQ ID NO: 165914 - RNA, 1701 nt, Artificial Sequence; identical to SEQ ID NO: 162909
  derived and/or modified CDS sequence (opt4) from hemagglutinin__InfluenzaA__ADM95757

SEQ ID NO: 165915 - RNA, 1701 nt, Artificial Sequence; identical to SEQ ID NO: 162729
  derived and/or modified CDS sequence (opt4) from hemagglutinin__InfluenzaA__ADM95758

SEQ ID NO: 165916 - RNA, 1701 nt, Artificial Sequence
  derived and/or modified CDS sequence (opt4) from hemagglutinin__InfluenzaA__ADM95759
augaaggccauccugguggugcugcuguacaccuucgccaccgccaacgccgacacccugugcaucggcuaccacgccaacaacagcaccgacaccguggacaccgugcuggagaagaacgugaccgugacccacagcgugaaccugcuggaggacaagcacaacggcaagcugugcaagcugagaggcguggccccccugcaccugggcaagugcaacaucgccggcuggauccugggcaaccccgagugcgagagccugagcaccgccagcagcuggagcuacaucguggagaccagcagcagcgacuacggcaccugcuaccccggcgacuucaucgacuacgaggagcugagagagcagcugagcagcgugagcagcuucgagagauucgagaucuuccccaagaccagcagcuggcccaaccacgacagcaacaagggcgugaccgccgccugcccccacgccggcgccaagagcuucuacaagaaccugaucuggcuggugaagaagggcaacagcuaccccaagcugagcaagagcuacaucaacgacaagggcaaggaggugcuggugcuguggggcauccaccaccccagcaccagcgccgaccagcagagccuguaccagaacgccgacgccuacguguucgugggcaccagcagauacagcaagaaguucaagcccgagaucgccaucagacccaaggugagagaccaggagggcagaaugaacuacuacuggacccugguggagcccggcgacaagaucaccuucgaggccaccggcaaccugguggugcccagauacgccuucgccauggagagaaacgccggcagcggcaucaucaucagcgacacccccgugcacgacugcaacaccaccugccagacccccaagggcgccaucaacaccagccugcccuuccagaacauccaccccaucaccaucggcaagugccccaaguacgugaagagcaccaagcugagacuggccaccggccugagaaacgugcccagcauccagagcagaggccuguucggcgccaucgccggcuucaucgagggcggcuggaccggcaugguggacggcugguacggcuaccaccaccagaacgagcagggcagcggcuacgccgccgaccugaagagcacccagaacgccaucgacgagaucaccaacaaggugaacagcgugaucgagaagaugaacacccaguucaccgccgugggcaaggaguucaaccaccuggagaagagaaucgagaaccugaacaagaagguggacgacggcuuccuggacaucuggaccuacaacgccgagcugcuggugcugcuggagaacgagagaacccuggacuaccacgacagcaacgugaagaaccuguacgagaaggugagaagccagcugaagaacaacgccaaggagaucggcaacggcugcuucgaguucuaccacaagugcgacaacaccugcauggagagcgugaagaacggcaccuacgacuaccccaaguacagcgaggaggccaagcugaacagagaggagaucgacggcgugaagcuggagagcaccagaaucuaccagauccuggccaucuacagcaccguggccagcagccuggugcugguggugagccugggcgccaucagcuucuggaugugcagcaacggcagccugcagugcagaaucugcaucuga

SEQ ID NO: 165917 - RNA, 1701 nt, Artificial Sequence; identical to SEQ ID NO: 162716
  derived and/or modified CDS sequence (opt4) from hemagglutinin__InfluenzaA__ADM95760

SEQ ID NO: 165918 - RNA, 1701 nt, Artificial Sequence; identical to SEQ ID NO: 162729
  derived and/or modified CDS sequence (opt4) from hemagglutinin__InfluenzaA__ADM95761

SEQ ID NO: 165919 - RNA, 1701 nt, Artificial Sequence
  derived and/or modified CDS sequence (opt4) from hemagglutinin__InfluenzaA__ADM95763
augaaggccauccugguggugcugcuguacaccuucgccaccgccaacgccgacacccugugcaucggcuaccacgccaacaacagcaccgacaccguggacaccgugcuggagaagaacgugaccgugacccacagcgugaaccugcuggaggacaagaacaacggcaagcugugcaagcugagaggcguggccccccugcaccugggcaagugcaacaucgccggcuggauccugggcaaccccgagugcgagagccugagcaccgccagcagcuggagcuacaucguggagaccagcagcagcgacaacggcaccugcuaccccggcgacuucaucgacuacgaggagcugagagagcagcugagcagcgugagcagcuucgagagauucgagaucuuccccaagaccagcagcuggcccaaccacgacagcaacaagggcgugaccgccgccugcccccacgccggcgccaagagcuucuacaagaaccugaucuggcuggugaagaagggcaacagcuaccccaagcugagcaagagcuacaucaacgacaagggcaaggaggugcuggugcuguggggcauccaccaccccagcaccagcgccgaccagcagagccuguaccagaacgccgacgccuacguguucgugggcagcagcagauacagcaagaaguucaagcccgagaucgccaucagacccaaggugagagaccaggagggcagaaugaacuacuacuggacccugguggagcccggcgacaagaucaccuucgaggccaccggcaaccugguggugcccagauacgccuucgccauggagagaaacgccggcagcggcaucaucaucagcgacacccccgugcacgacugcaacaccaccugccagacccccaagggcgccaucaacaccagccugcccuuccagaacauccaccccaucaccaucggcaagugccccaaguacgugaagagcaccaagcugagacuggccaccggccugagaaacgugcccagcauccagagcagaggccuguucggcgccaucgccggcuucaucgagggcggcuggaccggcaugguggacggcugguacggcuaccaccaccagaacgagcagggcagcggcuacgccgccgaccugaagagcacccagaacgccaucgacgagaucaccaacaaggugaacagcgugaucgagaagaugaacacccaguucaccgccgugggcaaggaguucaaccaccuggagaagagaaucgagaaccugaacaagaagguggacgacggcuuccuggacaucuggaccuacaacgccgagcugcuggugcugcuggagaacgagagaacccuggacuaccacgacagcaacgugaagaaccuguacgagaaggugagaagccagcugaagaacaacgccaaggagaucggcaacggcugcuucgaguucuaccacaagugcgacaacaccugcauggagagcgugaagaacggcaccuacgacuaccccaaguacagcgaggaggccaagcugaacagagaggagaucgacggcgugaagcuggagagcaccagaaucuaccagauccuggccaucuacagcaccguggccagcagccuggugcugguggugagccugggcgccaucagcuucuggaugugcagcaacggcagccugcagugcagaaucugcaucuga

SEQ ID NO: 165920 - RNA, 1701 nt, Artificial Sequence; identical to SEQ ID NO: 162729
  derived and/or modified CDS sequence (opt4) from hemagglutinin__InfluenzaA__ADM95764

SEQ ID NO: 165921 - RNA, 1701 nt, Artificial Sequence; identical to SEQ ID NO: 162729
  derived and/or modified CDS sequence (opt4) from hemagglutinin__InfluenzaA__ADM95765

SEQ ID NO: 165922 - RNA, 1701 nt, Artificial Sequence; identical to SEQ ID NO: 162729
  derived and/or modified CDS sequence (opt4) from hemagglutinin__InfluenzaA__ADM95767

SEQ ID NO: 165923 - RNA, 1701 nt, Artificial Sequence; identical to SEQ ID NO: 163572
  derived and/or modified CDS sequence (opt4) from hemagglutinin__InfluenzaA__ADM95768

SEQ ID NO: 165924 - RNA, 1701 nt, Artificial Sequence; identical to SEQ ID NO: 163082
  derived and/or modified CDS sequence (opt4) from hemagglutinin__InfluenzaA__ADM95769

SEQ ID NO: 165925 - RNA, 1701 nt, Artificial Sequence; identical to SEQ ID NO: 164845
  derived and/or modified CDS sequence (opt4) from hemagglutinin__InfluenzaA__ADM95771

SEQ ID NO: 165926 - RNA, 1701 nt, Artificial Sequence; identical to SEQ ID NO: 162729
  derived and/or modified CDS sequence (opt4) from hemagglutinin__InfluenzaA__ADM95772

SEQ ID NO: 165927 - RNA, 1701 nt, Artificial Sequence; identical to SEQ ID NO: 162729
  derived and/or modified CDS sequence (opt4) from hemagglutinin__InfluenzaA__ADM95774

SEQ ID NO: 165928 - RNA, 1701 nt, Artificial Sequence; identical to SEQ ID NO: 162729
  derived and/or modified CDS sequence (opt4) from hemagglutinin__InfluenzaA__ADM95775

SEQ ID NO: 165929 - RNA, 1701 nt, Artificial Sequence; identical to SEQ ID NO: 163082
  derived and/or modified CDS sequence (opt4) from hemagglutinin__InfluenzaA__ADM95776

SEQ ID NO: 165930 - RNA, 1701 nt, Artificial Sequence; identical to SEQ ID NO: 163082
  derived and/or modified CDS sequence (opt4) from hemagglutinin__InfluenzaA__ADM95778

SEQ ID NO: 165931 - RNA, 1701 nt, Artificial Sequence
  derived and/or modified CDS sequence (opt4) from hemagglutinin__InfluenzaA__ADM95779
augaaggccauccugguggugcugcuguacaccuucgccaccgccaacgccgacacccugugcaucggcuaccacgccaacaacagcaccgacaccguggacaccgugcuggagaagaacgugaccgugacccacagcgugaaccugcuggaggacaagcacaacggcaagcugugcaagcugagaggcguggccccccugcaccugggcaagugcaacaucgccggcuggauccugggcaaccccgagugcgagagccugagcaccgccagcagcuggagcuacaucguggagaccagcagcagcgacaacggcaccugcuaccccggcgacuucaucgacuacgaggagcugagagagcagcugagcagcgugagcagcuucgagagauucgagaucuuccccaagaccagcagcuggcccaaccacgacagcaacaagggcgugaccgccgccugcccccacgccggcgccaagagcuucuacaagaaccugaucuggcuggugaagaagggcaacagcuaccccaagcugagcaagagcuacaucaacgacaagggcaaggaggugcuggugcuguggggcauccaccaccccagcaccagcgccgaccagcagagccuguaccagaacgccgacgccuacguguucgugggcaccagcagauacagcaagaaguucaagcccgagaucgccaucagacccaaggugagagaccaggagggcagaaugaacuacuacuggacccugguggagcccggcgacaagaucaccuucgaggccaccggcaaccugguggugcccagauacgccuucgccauggagagaaacgccggcagcggcaucaucaucagcgacacccccgugcacgacugcaacaccaccugccagacccccaagggcgccaucaacaccagccugcccuuccagaacauccaccccaucaccaucggcaagugccccaaguacgugaagagcaccaagcugagacuggccaccggccugagaaacauccccagcauccagagcagaggccuguucggcgccaucgccggcuucaucgagggcggcuggaccggcaugguggacggcugguacggcuaccaccaccagaacgagcagggcagcggcuacgccgccgaccugaagagcacccagaacgccaucgacgagaucaccaacaaggugaacagcgugaucgagaagaugaacacccaguucaccgccgugggcaaggaguucaaccaccuggagaagagaaucgagaaccugaacaagaagguggacgacggcuuccuggacaucuggaccuacaacgccgagcugcuggugcugcuggagaacgagagaacccuggacuaccacgacagcaacgugaagaaccuguacgagaaggugagaagccagcugaagaacaacgccaaggagaucggcaacggcugcuucgaguucuaccacaagugcgacaacaccugcauggagagcgugaagaacggcaccuacgacuaccccaaguacagcgaggaggccaagcugaacagagaggagaucgacggcgugaagcuggagcccaccagaaucuaccagauccuggccaucuacagcaccguggccagcagccuggugcugguggugagccugggcgccaucagcuucuggaugugcagcaacggcagccugcagugcagaaucugcaucuga

SEQ ID NO: 165932 - RNA, 1701 nt, Artificial Sequence; identical to SEQ ID NO: 163082
  derived and/or modified CDS sequence (opt4) from hemagglutinin__InfluenzaA__ADM95780

SEQ ID NO: 165933 - RNA, 1701 nt, Artificial Sequence; identical to SEQ ID NO: 163572
  derived and/or modified CDS sequence (opt4) from hemagglutinin__InfluenzaA__ADM95783

SEQ ID NO: 165934 - RNA, 1701 nt, Artificial Sequence; identical to SEQ ID NO: 162729
  derived and/or modified CDS sequence (opt4) from hemagglutinin__InfluenzaA__ADM95784

SEQ ID NO: 165935 - RNA, 1701 nt, Artificial Sequence; identical to SEQ ID NO: 162729
  derived and/or modified CDS sequence (opt4) from hemagglutinin__InfluenzaA__ADM95785

SEQ ID NO: 165936 - RNA, 1701 nt, Artificial Sequence
  derived and/or modified CDS sequence (opt4) from hemagglutinin__InfluenzaA__ADM95786
augaaggccauccugguggugcugcuguacaccuucgccaccgccaacgccgacacccugugcaucggcuaccacgccaacaacagcaccgacaccguggacaccgugcuggagaagaacgugaccgugacccacagcgugaaccugcuggaggacaagcacaacggcaagcugugcaagcugagaggcguggccccccugcaccugggcaagugcaacaucgccggcuggauccugggcaaccccgagugcgagagccugagcaccgccagcagcuggagcuacaucguggagaccagcagcagcgacaacggcaccugcuaccccggcgacuucaucgacuacgaggagcugagagagcagcugagcagcgugagcagcuucgagagauucgagaucuuccccaagaccagcagcuggcccaaccacgacagcaacaagggcgugaccgccgccugcagccacgccggcgccaagagcuucuacaagaaccugaucuggcuggugaagaagggcaacagcuaccccaagcugagcaagagcuacaucaacgacaagggcaaggaggugcuggugcuguggggcauccaccaccccagcaccagcgccgaccagcagagccuguaccagaacgccgacgccuacguguucgugggcaccagcagauacagcaagaaguucaagcccgagaucgccaucagacccaaggugagagagcaggagggcagaaugaacuacuacuggacccugguggagcccggcgacaagaucaccuucgaggccaccggcaaccugguggugcccagauacgccuucgccauggagagaaacgccggcagcggcaucaucaucagcgacacccccgugcacgacugcaacaccaccugccagacccccaagggcgccaucaacaccagccugcccuuccagaacauccaccccaucaccaucggcaagugccccaaguacgugaagagcaccaagcugagacuggccaccggccugagaaacgugcccagcauccagagcagaggccuguucggcgccaucgccggcuucaucgagggcggcuggaccggcaugguggacggcugguacggcuaccaccaccagaacgagcagggcagcggcuacgccgccgaccugaagagcacccagaacgccaucgacgagaucaccaacaaggugaacagcgugaucgagaagaugaacacccaguucaccgccgugggcaaggaguucaaccaccuggagaagagaaucgagaaccugaacaagaagguggacgacggcuuccuggacaucuggaccuacaacgccgagcugcuggugcugcuggagaacgagagaacccuggacuaccacgacagcaacgugaagaaccuguacgagaaggugagaagccagcugaagaacaacgccaaggagaucggcaacggcugcuucgaguucuaccacaagugcgacaacaccugcauggagagcgugaagaacggcaccuacgacuaccccaaguacagcgaggaggccaagcugaacagagaggagaucgacggcgugaagcuggagagcaccagaaucuaccagauccuggccaucuacagcaccguggccagcagccuggugcugguggugagccugggcgccaucagcuucuggaugugcagcaacggcagccugcagugcagaaucugcaucuga

SEQ ID NO: 165937 - RNA, 1701 nt, Artificial Sequence; identical to SEQ ID NO: 163082
  derived and/or modified CDS sequence (opt4) from hemagglutinin__InfluenzaA__ADM95788

SEQ ID NO: 165938 - RNA, 1701 nt, Artificial Sequence; identical to SEQ ID NO: 163082
  derived and/or modified CDS sequence (opt4) from hemagglutinin__InfluenzaA__ADM95789

SEQ ID NO: 165939 - RNA, 1701 nt, Artificial Sequence
  derived and/or modified CDS sequence (opt4) from hemagglutinin__InfluenzaA__ADM95790
augaaggccauccugguggugcugcuguacaccuucgccaccgccaacgccgacacccugugcaucggcuaccacgccaacaacagcaccgacaccguggacaccgugcuggagaagaacgugaccgugacccacagcgugaaccugcuggaggacaagcacaacggcaagcugugcaagcugagaggcguggccccccugcaccugggcaagugcaacaucgccggcuggauccugggcaaccccgagugcgagagccugagcaccgccagcagcuggagcuacaucguggagaccagcagcagcgacaacggcaccugcuaccccggcgacuucaucgacuacgaggagcugagagagcagcugagcagcgugagcagcuucgagagauucgagaucuuccccaagaccagcagcuggcccaaccacgacagcaacaagggcgugaccgccgccugcccccacgccggcgccaagagcuucuacaagaaccugaucuggcuggugaagaagggcaacagcuaccccaagcugagaaagagcuacaucaacgacaagggcaaggaggugcuggugcuguggggcauccaccaccccagcaccagcgccgaccagcagagccuguaccagaacgccgacgccuacguguucgugggcaccagcagauacagcaagaaguucaagcccgagaucgccaucagacccaaggugagagaccaggagggcagaaugaacuacuacuggacccugguggagcccggcgacaagaucaccuucgaggccaccggcaaccugguggugcccagauacgccuucgccauggagagaaacgccggcagcggcaucaucaucagcgacacccccgugcacgacugcaacaccaccugccagacccccaagggcgccaucaacaccagccugcccuuccagaacauccaccccaucaccaucggcaagugccccaaguacgugaagagcaccaagcugagacuggccaccggccugagaaacauccccagcauccagagcagaggccuguucggcgccaucgccggcuucaucgagggcggcuggaccggcaugguggacggcugguacggcuaccaccaccagaacgagcagggcagcggcuacgccgccgaccugaagagcacccagaacgccaucgacgagaucaccaacaaggugaacagcgugaucgagaagaugaacacccaguucaccgccgugggcaaggaguucaaccaccuggagaagagaaucgagaaccugaacaagaagguggacgacggcuuccuggacaucuggaccuacaacgccgagcugcuggugcugcuggagaacgagagaacccuggacuaccacgacagcaacgugaagaaccuguacgagaaggugagaagccagcugaagaacaacgccaaggagaucggcaacggcugcuucgaguucuaccacaagugcgacaacaccugcauggagagcgugaagaacggcaccuacgacuaccccaaguacagcgaggaggccaagcugaacagagaggagaucgacggcgugaagcuggagagcaccagaaucuaccagauccuggccaucuacagcaccguggccagcagccuggugcugguggugagccugggcgccaucagcuucuggaugugcagcaacggcagccugcagugcagaaucugcaucuga

SEQ ID NO: 165940 - RNA, 1701 nt, Artificial Sequence; identical to SEQ ID NO: 165939
  derived and/or modified CDS sequence (opt4) from hemagglutinin__InfluenzaA__ADM95791

SEQ ID NO: 165941 - RNA, 1701 nt, Artificial Sequence; identical to SEQ ID NO: 165939
  derived and/or modified CDS sequence (opt4) from hemagglutinin__InfluenzaA__ADM95792

SEQ ID NO: 165942 - RNA, 1701 nt, Artificial Sequence; identical to SEQ ID NO: 165326
  derived and/or modified CDS sequence (opt4) from hemagglutinin__InfluenzaA__ADM95793

SEQ ID NO: 165943 - RNA, 1701 nt, Artificial Sequence; identical to SEQ ID NO: 163082
  derived and/or modified CDS sequence (opt4) from hemagglutinin__InfluenzaA__ADM95794

SEQ ID NO: 165944 - RNA, 1701 nt, Artificial Sequence; identical to SEQ ID NO: 162729
  derived and/or modified CDS sequence (opt4) from hemagglutinin__InfluenzaA__ADM95795

SEQ ID NO: 165945 - RNA, 1701 nt, Artificial Sequence; identical to SEQ ID NO: 163831
  derived and/or modified CDS sequence (opt4) from hemagglutinin__InfluenzaA__ADM95798

SEQ ID NO: 165946 - RNA, 1701 nt, Artificial Sequence
  derived and/or modified CDS sequence (opt4) from hemagglutinin__InfluenzaA__ADM95799
augaaggccauccugguggugcugcuguacaccuucgccaccgccaacgccgacacccugugcaucggcuaccacgccaacaacagcaccgacaccguggacaccgugcuggagaagaacgugaccgugacccacagcgugaaccugcuggaggacaagcacaacggcaagcugugcaagcugagaggcguggccccccugcaccugggcaagugcaacaucgccggcuggauccugggcaaccccgagugcgagagccugagcaccgccagcagcuggagcuacaucguggagaccagcagcagcgacaacggcaccugcuaccccggcgacuucaucgacuacgaggagcugagagagcagcugagcagcgugagcagcuucgagagauucgagaucuuccccaagaccagcagcuggcccaaccacgacagcaacaagggcgugaccgccgccugcccccacgccggcgccaagagcuucuacaagaaccugaucuggcuggugaagaagggcaacagcuaccccaagcugagcaagagcuacaucaacgacaagggcaaggaggugcuggugcuguggggcauccaccaccccagcaccagcgccgaccagcagagccuguaccagaacgccgacgccuacguguucgugggcaccagcagauacagcaagaaguucaagcccgagaucgccaucagacccaaggugagagaccaggagggcagaaugaacuacuacuggacccugguggagcccggcgacaagaucaccuucgaggccaccggcaaccugguggugcccagauacgccuucgccauggagagaaacgccggcagcggcaucaucaucagcgacacccccgugcacgacugcaacaccaccugccagacccccaagggcgccaucaacaccagccugcccuuccagaacauccaccccaucaccaucggcaagugccccaaguacgugaagagcaccaagcugagacuggccaccggccugagaaacgugcccagcauccagagcagaggccuguucggcgccaucgccggcuucaucgagggcggcuggaccggcaugguggacggcugguacggcuaccaccaccagaacgagcagggcagcggcuacgccgccgaccugaagagcacccagaacgccaucgacgagaucaccaacaaggugaacagcgugaucgagaagaugaacacccaguucaccgccgugggcaaggaguucaaccaccuggagaagagaaucgagaaccugaacaagaagguggacgacggcuuccuggacaucuggaccuacaacgccgagcugcuggugcugcuggagaacgagagaacccuggacuaccacgacagcaacgugaagaaccuguacgagaaggugagaagccagcugaagaacaacgccaaggagaucgagaacggcugcuucgaguucuaccacaagugcgacaacaccugcauggagagcgugaagaacggcaccuacgacuaccccaaguacagcgaggaggccaagcugaacagagaggagaucgacggcgugaagcuggagagcaccagaaucuaccagauccuggccaucuacagcaccguggccagcagccuggugcugguggugagccugggcgccaucagcuucuggaugugcagcaacggcagccugcagugcagaaucugcaucuga

SEQ ID NO: 165947 - RNA, 1701 nt, Artificial Sequence
  derived and/or modified CDS sequence (opt4) from hemagglutinin__InfluenzaA__ADM95800
augaaggccauccugguggugcugcuguacaccuucgccaccgccaacgccgacacccugugcaucggcuaccacgccaacaacagcaccgacaccguggacaccgugcuggagaagaacgugaccgugacccacagcgugaaccugcuggaggacaagcacaacggcaagcugugcaagcugagaggcguggccccccugcaccugggcaagugcaacaucgccggcuggauccugggcaaccccgagugcgagagccugagcaccgccagcagcuggagcuacaucguggagaccagcagcagcgacaacggcaccugcuaccccggcgacuucaucgacuacgaggagcugagagagcagcugagcagcgugagcagcuucgagagauucgagaucuuccccaagaccagcagcuggcccaaccacgacagcaacaagggcgugaccgccgccugcccccacgccggcgccaagagcuucuacaagaaccugaucuggcuggugaagaagggcaacagcuaccccaagcugagcaagagcuacaucaacgacaagggcaaggaggugcuggugcuguggggcauccaccaccccagcaccagcgccgaccagcagagccuguaccagaacgccgacgccuacguguucgugggcaccagcagauacagcaagaaguucaagcccgagaucgccaucagacccaaggugagagaccaggagggcagaaugaacuacuacuggacccugguggcccccggcgacaagaucaccuucgaggccaccggcaaccugguggugcccagauacgccuucgccauggagagaaacgccggcagcggcaucaucaucagcgacacccccgugcacgacugcaacaccaccugccagacccccaagggcgccaucaacaccagccugcccuuccagaacauccaccccaucaccaucggcaagugccccaaguacgugaagagcaccaagcugagacuggccaccggccugagaaacgugcccagcauccagagcagaggccuguucggcgccaucgccggcuucaucgagggcggcuggaccggcaugguggacggcugguacggcuaccaccaccagaacgagcagggcagcggcuacgccgccgaccugaagagcacccagaacgccaucgacgagaucaccaacaaggugaacagcgugaucgagaagaugaacacccaguucaccgccgugggcaaggaguucaaccaccuggagaagagaaucgagaaccugaacaagaagguggacgacggcuuccuggacaucuggaccuacaacgccgagcugcuggugcugcuggagaacgagagaacccuggacuaccacgacagcaacgugaagaaccuguacgagaaggugagaagccagcugaagaacaacgccaaggagaucggcaacggcugcuucgaguucuaccacaagugcgacaacaccugcauggagagcgugaagaacggcaccuacgacuaccccaaguacagcgaggaggccaagcugaacagagaggagaucgacggcgugaagcuggagagcaccagaaucuaccagauccuggccaucuacagcaccguggccagcagccuggugcugguggugagccugggcgccaucagcuucuggaugugcagcaacggcagccugcagugcagaaucugcaucuga

SEQ ID NO: 165948 - RNA, 1701 nt, Artificial Sequence; identical to SEQ ID NO: 163082
  derived and/or modified CDS sequence (opt4) from hemagglutinin__InfluenzaA__ADM95801

SEQ ID NO: 165949 - RNA, 1701 nt, Artificial Sequence; identical to SEQ ID NO: 163082
  derived and/or modified CDS sequence (opt4) from hemagglutinin__InfluenzaA__ADM95802

SEQ ID NO: 165950 - RNA, 1701 nt, Artificial Sequence; identical to SEQ ID NO: 165936
  derived and/or modified CDS sequence (opt4) from hemagglutinin__InfluenzaA__ADM95803

SEQ ID NO: 165951 - RNA, 1701 nt, Artificial Sequence
  derived and/or modified CDS sequence (opt4) from hemagglutinin__InfluenzaA__ADM95804
augaaggccauccugguggugcugcuguacaccuucgccaccgccaacgccgacacccugugcaucggcuaccacgccaacaacagcaccgacaccguggacaccgugcuggagaagaacgugaccgugacccacagcgugaaccugcuggaggacaagcacaacggcaagcugugcaagcugagaggcguggccccccugcaccugggcaagugcaacaucgccggcuggauccugggcaaccccgagugcgagagccugagcaccgccagcagcuggagcuacaucguggagaccagcagcagcgacaacggcaccugcuaccccggcgacuucaucgacuacgaggagcugagagagcagcugagcagcgugagcagcuucgagagauucgagaucuuccccaagaccagcagcuggcccaaccacgacagcaacaagggcgugaccgccgccugcccccacgccggcgccaagaacuucuacaagaaccugaucuggcuggugaagaagggcaacagcuaccccaagcugagcaagagcuacaucaacgacaagggcaaggaggugcuggugcuguggggcauccaccaccccagcaccagcgccgaccagcagagccuguaccagaacgccgacgccuacguguucgugggcaccagcagauacagcaagaaguucaagcccgagaucgccaucagacccaaggugagagaccaggagggcagaaugaacuacuacuggacccugguggagcccggcgacaagaucaccuucgaggccaccggcaaccugguggugcccagauacgccuucgccauggagagaaacgccggcagcggcaucaucaucagcgacacccccgugcacgacugcaacaccaccugccagacccccaagggcgccaucaacaccagccugcccuuccagaacauccaccccaucaccaucggcaagugccccaaguacgugaagagcaccaagcugagacuggccaccggccugagaaacgugcccagcauccagagcagaggccuguucggcgccaucgccggcuucaucgagggcggcuggaccggcaugguggacggcugguacggcuaccaccaccagaacgagcagggcagcggcuacgccgccgaccugaagagcacccagaacgccaucgacgagaucaccaacaaggugaacagcgugaucgagaagaugaacacccaguucaccgccgugggcaaggaguucaaccaccuggagaagagaaucgagaaccugaacaagaagguggacgacggcuuccuggacaucuggaccuacaacgccgagcugcuggugcugcuggagaacgagagaacccuggacuaccacgacagcaacgugaagaagcuguacgagaaggugagaagccagcugaagaacaacgccaaggagaucggcaacggcugcuucgaguucuaccacaagugcgacaacaccugcauggagagcgugaagaacggcaccuacgacuaccccaaguacagcgaggaggccaagcugaacagagaggagaucgacggcgugaagcuggagagcaccagaaucuaccagauccuggccaucuacagcaccguggccagcagccuggugcugguggugagccugggcgccaucagcuucuggaugugcagcaacggcagccugcagugcagaaucugcaucuga

SEQ ID NO: 165952 - RNA, 1701 nt, Artificial Sequence; identical to SEQ ID NO: 164411
  derived and/or modified CDS sequence (opt4) from hemagglutinin__InfluenzaA__ADM95805

SEQ ID NO: 165953 - RNA, 1701 nt, Artificial Sequence; identical to SEQ ID NO: 163830
  derived and/or modified CDS sequence (opt4) from hemagglutinin__InfluenzaA__ADM95808

SEQ ID NO: 165954 - RNA, 1701 nt, Artificial Sequence; identical to SEQ ID NO: 163830
  derived and/or modified CDS sequence (opt4) from hemagglutinin__InfluenzaA__ADM95809

SEQ ID NO: 165955 - RNA, 1701 nt, Artificial Sequence; identical to SEQ ID NO: 163830
  derived and/or modified CDS sequence (opt4) from hemagglutinin__InfluenzaA__ADM95810

SEQ ID NO: 165956 - RNA, 1701 nt, Artificial Sequence
  derived and/or modified CDS sequence (opt4) from hemagglutinin__InfluenzaA__ADM95812
augaaggccauccugguggugcugcuguacaccuucgccaccgccaacgccgacacccugugcaucggcuaccacgccaacaacagcaccgacaccguggacaccgugcuggagaagaacgugaccgugacccacagcgugaaccugcuggaggacaagcacaacggcaagcugugcaagcugagaggcguggccccccugcaccugggcaagugcaacaucgccggcuggauccugggcaaccccgagugcgagcugcugagcaccgccagcagcuggagcuacaucguggagaccagcagcagcgacaacggcaccugcuaccccggcgacuucaucgacuacgaggagcugagagagcagcugagcagcgugagcagcuucgagagauucgagaucuuccccaagaccagcagcuggcccaaccacgacagcaacaagggcgugaccgccgccugcccccacgccggcgccaagagcuucuacaagaaccugaucuggcuggugaagaagggcaacagcuaccccaagcugagcaagagcuacaucaacgacaagggcaaggaggugcuggugcuguggggcauccaccaccccagcaccagcgccgaccagcagagccuguaccagaacgccgacgccuacguguucgugggcaccagcagauacagcaagaaguucaagcccgagaucgccaucagacccaaggugagagaccaggagggcagaaugaacuacuacuggacccugguggagcccggcgacaagaucaccuucgaggccaccggcaaccugguggugcccagauacgccuucgccauggagagaaacgccggcagcggcaucaucaucagcgacacccccgugcacgacugcaacaccaccugccagacccccaagggcgccaucaacaccagccugcccuuccagaacauccaccccaucaccaucggcaagugccccaaguacgugaagagcaccaagcugagacuggccaccggccugagaaacgugcccagcauccagagcagaggccuguucggcgccaucgccggcuucaucgagggcggcuggaccggcaugguggacggcugguacggcuaccaccaccagaacgagcagggcagcggcuacgccgccgaccugaagagcacccagaacgccaucgacgagaucaccaacaaggugaacagcgugaucgagaagaugaacacccaguucaccgccgugggcaaggaguucaaccaccuggagaagagaaucgagaaccugaacaagaagguggacgacggcuuccuggacaucuggaccuacaacgccgagcugcuggugcugcuggagaacgagagaacccuggacuaccacgacagcaacgugaagaaccuguacgagaaggugagaagccagcugaagaacaacgccaaggagaucggcaacggcugcuucgaguucuaccacaagugcgacaacaccugcauggagagcgugaagaacggcaccuacgacuaccccaaguacagcgaggaggccaagcugaacagagaggagaucgacggcgugaagcuggagagcaccagaaucuaccagauccuggccaucuacagcaccguggccagcagccuggugcugguggugagccugggcgccaucagcuucuggaugugcagcaacggcagccugcagugcagaaucugcaucuga

SEQ ID NO: 165957 - RNA, 1701 nt, Artificial Sequence; identical to SEQ ID NO: 165326
  derived and/or modified CDS sequence (opt4) from hemagglutinin__InfluenzaA__ADM95816

SEQ ID NO: 165958 - RNA, 1701 nt, Artificial Sequence; identical to SEQ ID NO: 165326
  derived and/or modified CDS sequence (opt4) from hemagglutinin__InfluenzaA__ADM95819

SEQ ID NO: 165959 - RNA, 1701 nt, Artificial Sequence; identical to SEQ ID NO: 164411
  derived and/or modified CDS sequence (opt4) from hemagglutinin__InfluenzaA__ADM95820

SEQ ID NO: 165960 - RNA, 1701 nt, Artificial Sequence; identical to SEQ ID NO: 165326
  derived and/or modified CDS sequence (opt4) from hemagglutinin__InfluenzaA__ADM95821

SEQ ID NO: 165961 - RNA, 1701 nt, Artificial Sequence; identical to SEQ ID NO: 163830
  derived and/or modified CDS sequence (opt4) from hemagglutinin__InfluenzaA__ADM95822

SEQ ID NO: 165962 - RNA, 1701 nt, Artificial Sequence; identical to SEQ ID NO: 163830
  derived and/or modified CDS sequence (opt4) from hemagglutinin__InfluenzaA__ADM95823

SEQ ID NO: 165963 - RNA, 1701 nt, Artificial Sequence
  derived and/or modified CDS sequence (opt4) from hemagglutinin__InfluenzaA__ADM95824
augaaggccauccugguggugcugcuguacaccuucgccaccgccaacgccgacacccugugcaucggcuaccacgccaacaacagcaccgacaccguggacaccgugcuggagaagaacgugaccgugacccacagcgugaaccugcuggaggacaagcacaacggcaagcugugcaagcugagaggcguggccccccugcaccugggcaagugcaacaucgccggcuggauccugggcaaccccgagugcgagagccugagcaccgccagcagcuggagcuacaucguggagaccagcagcagcgacaacggcaccugcuaccccggcgacuucaucgacuacgaggagcugagagagcagcugagcagcgugagcagcuucgagagauucgagaucuuccccaagaccagcagcuggcccaaccacgacagcaacaagggcgugaccgccgccugcccccacgccggcgccaagagcuucuacaagaaccugaucuggcuggugaagaagggcaacagcuaccccaagcugagcaagagcuacaucaacgacaagggcaaggaggugcuggugcuguggggcauccaccaccccagcaccagcgccgaccagcagagccuguaccagaacgccgacgccuacguguucgugggcaccagcagauacagcaagaaguucaagcccgagaucgccaucagacccaaggugagagaccaggagggcagaaugaacuaccacuggacccugguggagcccggcgacaagaucaccuucgaggccaccggcaaccugguggugcccagauacgccuucgccauggagagaaacgccggcagcggcaucaucaucagcgacacccccgugcacgacugcaacaccaccugccagacccccaagggcgccaucaacaccagccugcccuuccagaacauccaccccaucaccaucggcaagugccccaaguacgugaagagcaccaagcugagaauggccaccggccugagaaacgugcccagcauccagagcagaggccuguucggcgccaucgccggcuucaucgagggcggcuggaccggcaugguggacggcugguacggcuaccaccaccagaacgagcagggcagcggcuacgccgccgaccugaagagcacccagaacgccaucgacgagaucaccaacaaggugaacagcgugaucgagaagaugaacacccaguucaccgccgugggcaaggaguucaaccaccuggagaagagaaucgagaaccugaacaagaagguggacgacggcuuccuggacaucuggaccuacaacgccgagcugcuggugcugcuggagaacgagagaacccuggacuaccacgacagcaacgugaagaaccuguacgagaaggugagaagccagcugaagaacaacgccaaggagaucggcaacggcugcuucgaguucuaccacaagugcgacaacaccugcauggagagcgugaagaacggcaccuacgacuaccccaaguacagcgaggaggccaagcugaacagagaggagaucgacggcgugaagcuggagagcaccagaaucuaccagauccuggccaucuacagcaccguggccagcagccuggugcugguggugagccugggcgccaucagcuucuggaugugcagcaacggcagccugcagugcagaaucugcaucuga

SEQ ID NO: 165964 - RNA, 1701 nt, Artificial Sequence; identical to SEQ ID NO: 165326
  derived and/or modified CDS sequence (opt4) from hemagglutinin__InfluenzaA__ADM95825

SEQ ID NO: 165965 - RNA, 1701 nt, Artificial Sequence; identical to SEQ ID NO: 165326
  derived and/or modified CDS sequence (opt4) from hemagglutinin__InfluenzaA__ADM95826

SEQ ID NO: 165966 - RNA, 1701 nt, Artificial Sequence
  derived and/or modified CDS sequence (opt4) from hemagglutinin__InfluenzaA__ADM95827
augaaggccauccugguggugcugcuguacaccuucgccaccgccaacgccgacacccugugcaucggcuaccacgccaacaacagcaccgacaccguggacaccgugcuggagaagaacgugaccgugacccacagcgugaaccugcuggaggacaagcacaacggcaagcugugcaagcugaagggcguggccccccugcaccugggcaagugcaacaucgccggcuggauccugggcaaccccgagugcgagagccugagcaccgccagcagcuggagcuacaucguggagaccagcagcagcgacaacggcaccugcuaccccggcgacuucaucgacuacgaggagcugagagagcagcugagcagcgugagcagcuucgagagauucgagaucuuccccaagaccagcagcuggcccaaccacgacagcaacaagggcgugaccgccgccugcccccacgccggcgccaagagcuucuacaagaaccugaucuggcuggugaagaagggcaacagcuaccccaagcugagcaagagcuacaucaacgacaagggcaaggaggugcuggugcuguggggcauccaccaccccagcaccagcgccgaccagcagagccuguaccagaacgccgacgccuacguguucgugggcaccagcagauacagcaagaaguucaagcccgagaucgccaucagacccaaggugagagaccaggagggcagaaugaacuacuacuggacccugguggagcccggcgacaagaucaccuucgaggccaccggcaaccugguggugcccagauacgccuucgccauggagagaaacgccggcagcggcaucaucaucagcgacacccccgugcacgacugcaacaccaccugccagacccccaagggcgccaucaacaccagccugcccuuccagaacauccaccccaucaccaucggcaagugccccaaguacgugaagagcaccaagcugagacuggccaccggccugagaaacgugcccagcauccagagcagaggccuguucggcgccaucgccggcuucaucgagggcggcuggaccggcaugguggacggcugguacggcuaccaccaccagaacgagcagggcagcggcuacgccgccgaccugaagagcacccagcacgccaucgacgagaucaccaacaaggugaacagcgugaucgagaagaugaacacccaguucaccgccgugggcaaggaguucaaccaccuggagaagagaaucgagaaccugaacaagaagguggacgacggcuuccuggacaucuggaccuacaacgccgagcugcuggugcugcuggagaacgagagaacccuggacuaccacgacagcaacgugaagaaccuguacgagaaggugagaagccagcugaagaacaacgccaaggagaucggcaacggcugcuucgaguucuaccacaagugcgacaacaccugcauggagagcgugaagaacggcaccuacgacuaccccaaguacagcgaggaggccaagcugaacagagaggagaucgacggcgugaagcuggagagcaccagaaucuaccagauccuggccaucuacagcaccguggccagcagccuggugcugguggugagccugggcgccaucagcuucuggaugugcagcaacggcagccugcagugcagaaucugcaucuga

SEQ ID NO: 165967 - RNA, 1701 nt, Artificial Sequence
  derived and/or modified CDS sequence (opt4) from hemagglutinin__InfluenzaA__ADM95828
augaaggccauccugguggugcugcuguacaccuucgccaccgccaacgccgacacccugugcaucggcuaccacgccaacaacagcaccgacaccguggacaccgugcuggagaagaacgugaccgugacccacagcgugaaccugcuggaggacaagcacaacggcaagcugugcaagcugagaggcguggccccccugcaccugggcaagugcaacaucgccggcuggauccugggcaaccccgagugcgagagccugagcaccgccagcagcuggagcuacaucguggagaccagcagcagcgacaacggcaccugcuaccccggcgacuucaucgacuacgaggagcugagagagcagcugagcagcgugagcagcuucgagagauucgagaucuuccccaagaccagcagcuggcccaaccacgacagcaacaagggcgugaccgccgccugcccccacgccggcgccaagagcuucuacaagaaccugaucuggcuggugaagaagggcaacagcuaccccaagcugagcaagagcuacaucaacgacaagggcaaggaggugcuggugcuguggggcauccaccaccccagcaccagcgccgaccagcagagccuguaccagaacgccgacgccuacguguucgugggcaccagcagauacagcaagaaguucaagcccgagaucgccaucagacccaaggugagagaccaggagggcagaaugaacuacuacuggacccugguggagcccggcgacaagaucaccuucgaggccaccggcaaccugguggugcccagauacgccuucgccauggagagaaacgccggcagcggcaucaucaucagcgacacccccgcccacgacugcaacaccaccugccagacccccaagggcgccaucaacaccagccugcccuuccagaacauccaccccaucaccaucggcaagugccccaaguacgugaagagcaccaagcugagaauggccaccggccugagaaacgugcccagcauccagagcagaggccuguucggcgccaucgccggcuucaucgagggcggcuggaccggcaugguggacggcugguacggcuaccaccaccagaacgagcagggcagcggcuacgccgccgaccugaagagcacccagaacgccaucgacgagaucaccaacaaggugaacagcgugaucgagaagaugaacacccaguucaccgccgugggcaaggaguucaaccaccuggagaagagaaucgagaaccugaacaagaagguggacgacggcuuccuggacaucuggaccuacaacgccgagcugcuggugcugcuggagaacgagagaacccuggacuaccacgacagcaacgugaagaaccuguacgagaaggugagaagccagcugaagaacaacgccaaggagaucggcaacggcugcuucgaguucuaccacaagugcgacaacaccugcauggagagcgugaagaacggcaccuacgacuaccccaaguacagcgaggaggccaagcugaacagagaggagaucgacggcgugaagcuggagagcaccagaaucuaccagauccuggccaucuacagcaccguggccagcagccuggugcugguggugagccugggcgccaucagcuucuggaugugcagcaacggcagccugcagugcagaaucugcaucuga

SEQ ID NO: 165968 - RNA, 1701 nt, Artificial Sequence
  derived and/or modified CDS sequence (opt4) from hemagglutinin__InfluenzaA__ADM95829
augaaggccauccugguggugcugcuguacaccuucgccaccgccaacgccgacacccugugcaucggcuaccacgccaacaacagcaccgacaccguggacaccgugcuggagaagaacgugaccgugacccacagcgugaaccugcuggaggacaagcacaacggcaagcugugcaagcugagaggcguggccccccugcaccugggcaagugcaacaucgccggcuggauccugggcaaccccgagugcgagagccugagcaccgccagcagcuggagcuacaucguggagaccagcagcagcgacaacggcaccugcuaccccggcgacuucaucgacuacgaggagcugagagagcagcugagcagcgugagcagcuucgagagauucgagaucuuccccaagaccagcagcuggcccaaccacgacagcaacaagggcgugaccgccgccugcccccacgccggcgccaagagcuucuacaagaaccugaucuggcuggugaagaagggcaacagcuaccccaagcugagcaagagcuacaucaacgacaagggcaaggaggugcuggugcuguggggcauccaccaccccagcaccagcgccgaccagcagagccuguaccagaacgccgacgccuacguguucgugggcaccagcagauacagcaagaaguucaagcccgagaucgccaucagacccaaggugagagaccaggagggcagaaugaacuacuacuggacccugguggagcccggcgacaagaucaccuucgaggccaccggcaaccugguggugcccagauacgccuucgccauggagagaaacgccggcagcggcaucaucaucagcgacacccccgugcacgacugcaacaccaccugccagacccccaagggcgccaucaacaccagccugcccuuccagaacauccaccccaucaccaucggcaagugccccaaguacgugaagagcaccaagcugagacuggccaccggccugagaaacgugcccagcauccagagcagaggccuguucggcgccaucgccggcuucaucgagggcggcuggaccggcaugguggacggcugguacggcuaccaccaccagaacgagcagggcagcggcuacgccgccgaccugaagagcacccagaacgccaucgacgagaucaccaacaaggugaacagcgugaucgagaagaugaacacccaguucaccgccgugggcaaggaguucaaccaccuggagaagagaaucgagaaccugaacaagaagguggacgacggcuuccuggacaucuggaccuacaacgccgagcugcuggugcugcuggagaacgagagaacccuggacuaccacgacagcaacgugaagaagcuguacgagaaggugagaagccagcugaagaacaacgccaaggagaucggcaacggcugcuucgaguucuaccacaagugcgacaacaugugcauggagagcgugaagaacggcaccuacgacuaccccaaguacagcgaggaggccaagcugaacagagaggagaucgacggcgugaagcuggagagcaccagaaucuaccagauccuggccaucuacagcaccguggccagcagccuggugcugguggugagccugggcgccaucagcuucuggaugugcagcaacggcagccugcagugcagaaucugcaucuga

SEQ ID NO: 165969 - RNA, 1701 nt, Artificial Sequence
  derived and/or modified CDS sequence (opt4) from hemagglutinin__InfluenzaA__ADM95831
augaaggccauccugguggugcugcuguacaccuucgugaccgccaacgccgacacccugugcaucggcuaccacgccaacaacagcaccgacaccguggacaccgugcuggagaagaacgugaccgugacccacagcgugaaccugcuggaggacaagcacaacggcaagcugugcaagcugagaggcguggccccccugcaccugggcaagugcaacaucgccggcuggauccugggcaaccccgagugcgagagccugagcaccgccagcagcuggagcuacaucguggagaccagcagcagcgacaacggcaccugcuaccccggcgacuucaucgacuacgaggagcugagagagcagcugagcagcgugagcagcuucgagagauucgagaucuuccccaagaccagcagcuggcccaaccacgacagcaacaagggcgugaccgccgccugcccccacgccggcgccaagagcuucuacaagaaccugaucuggcuggugaagaagggcaacagcuaccccaagcugagcaagagcuacaucaacgacaagggcaaggaggugcuggugcuguggggcauccaccaccccagcaccagcgccgaccagcagagccuguaccagaacgccgacgccuacguguucgugggcaccagcagauacagcaagaaguucaagcccgagaucgccaucagacccaaggugagagaccaggagggcagaaugaacuacuacuggacccugguggagcccggcgacaagaucaccuucgaggccaccggcaaccugguggugcccagauacgccuucgccauggagaagaacgccggcagcggcaucaucaucagcgacacccccgugcacgacugcaacaccaccugccagacccccaagggcgccaucaacaccagccugcccuuccagaacauccaccccaucaccaucggcaagugccccaaguacgugaagagcaccaagcugagacuggccaccggccugagaaacgugcccagcauccagagcagaggccuguucggcgccaucgccggcuucaucgagggcggcuggaccggcaugguggacggcugguacggcuaccaccaccagaacgagcagggcagcggcuacgccgccgaccugaagagcacccagcacgccaucgacgagaucaccaacaaggugaacagcgugaucgagaagaugaacacccaguucaccgccgugggcaaggaguucaaccaccuggagaagagaaucgagaaccugaacaagaagguggacgacggcuuccuggacaucuggaccuacaacgccgagcugcuggugcugcuggagaacgagagaacccuggacuaccacgacagcaacgugaagaaccuguacgagaaggugagaagccagcugaagaacaacgccaaggagaucggcaacggcugcuucgaguucuaccacaagugcgacaacaccugcauggagagcgugaagaacggcaccuacgacuaccccaaguacagcgaggaggccaagcugaacagagaggagaucgacggcgugaagcuggagagcaccagaaucuaccagauccuggccaucuacagcaccguggccagcagccuggugcugguggugagccugggcgccaucagcuucuggaugugcagcaacggcagccugcagugcagaaucugcaucuga

SEQ ID NO: 165970 - RNA, 1701 nt, Artificial Sequence; identical to SEQ ID NO: 163830
  derived and/or modified CDS sequence (opt4) from hemagglutinin__InfluenzaA__ADM95832

SEQ ID NO: 165971 - RNA, 1701 nt, Artificial Sequence; identical to SEQ ID NO: 164411
  derived and/or modified CDS sequence (opt4) from hemagglutinin__InfluenzaA__ADM95833

SEQ ID NO: 165972 - RNA, 1701 nt, Artificial Sequence; identical to SEQ ID NO: 165956
  derived and/or modified CDS sequence (opt4) from hemagglutinin__InfluenzaA__ADM95834

SEQ ID NO: 165973 - RNA, 1701 nt, Artificial Sequence; identical to SEQ ID NO: 164411
  derived and/or modified CDS sequence (opt4) from hemagglutinin__InfluenzaA__ADM95836

SEQ ID NO: 165974 - RNA, 1701 nt, Artificial Sequence; identical to SEQ ID NO: 165326
  derived and/or modified CDS sequence (opt4) from hemagglutinin__InfluenzaA__ADM95837

SEQ ID NO: 165975 - RNA, 1701 nt, Artificial Sequence
  derived and/or modified CDS sequence (opt4) from hemagglutinin__InfluenzaA__ADM95838
augaaggccauccugguggugcugcuguacaccuucgccaccgccaacgccgacacccugugcaucggcuaccacgccaacaacagcaccgacaccguggacaccgugcuggagaagaacgugaccgugacccacagcgugaaccugcuggaggacaagcacaacggcaagcugugcaagcugagaggcguggccccccugcaccugggcaagugcaacaucgccggcuggauccugggcaaccccgagugcgagagccugagcaccgccagcagcuggagcuacaucguggagaccagcagcagcgacaacggcaccugcuaccccggcgacuucaucgacuacgaggagcugagagagcagcugagcagcgugagcagcuucgagagauucgagaucuuccccaagaccagcagcuggcccaaccacgacagcaacaagggcgugaccgccgccugccugcacgccggcgccaagagcuucuacaagaaccugaucuggcuggugaagaagggcaacagcuaccccaagcugagcaagagcuacaucaacgacaagggcaaggaggugcuggugcuguggggcauccaccaccccagcaccagcgccgaccagcagagccuguaccagaacgccgacgccuacguguucgugggcaccagcagauacagcaagaaguucaagcccgagaucgccaucagacccaaggugagagaccaggagggcagaaugaacuacuacuggacccugguggagcccggcgacaagaucaccuucgaggccaccggcaaccugguggugcccagauacgccuucgccauggagagaaacgccggcagcggcaucaucaucagcgacacccccgugcacgacugcaacaccaccugccagacccccaagggcgccaucaacaccagccugcccuuccagaacauccaccccaucaccaucggcaagugccccaaguacgugaagagcaccaagcugagacuggccaccggccugagaaacgugcccagcauccagagcagaggccuguucggcgccaucgccggcuucaucgagggcggcuggaccggcaugguggacggcugguacggcuaccaccaccagaacgagcagggcagcggcuacgccgccgaccugaagagcacccagaacgccaucgacaagaucaccaacaaggugaacagcgugaucgagaagaugaacacccaguucaccgccgugggcaaggaguucaaccaccuggagaagagaaucgagaaccugaacaagaagguggacgacggcuuccuggacaucuggaccuacaacgccgagcugcuggugcugcuggagaacgagagaacccuggacuaccacgacagcaacgugaagaaccuguacgagaaggugagaagccagcugaagaacaacgccaaggagaucggcaacggcugcuucgaguucuaccacaagugcgacaacaccugcauggagagcgugaagaacggcaccuacgacuaccccaaguacagcgaggaggccaagcugaacagagaggagaucgacggcgugaagcuggagagcaccagaaucuaccagauccuggccaucuacagcaccguggccagcagccuggugcugguggugagccugggcgccaucagcuucuggaugugcagcaacggcagccugcagugcagaaucugcaucuga

SEQ ID NO: 165976 - RNA, 1701 nt, Artificial Sequence; identical to SEQ ID NO: 164411
  derived and/or modified CDS sequence (opt4) from hemagglutinin__InfluenzaA__ADM95839

SEQ ID NO: 165977 - RNA, 1701 nt, Artificial Sequence; identical to SEQ ID NO: 165936
  derived and/or modified CDS sequence (opt4) from hemagglutinin__InfluenzaA__ADM95840

SEQ ID NO: 165978 - RNA, 1701 nt, Artificial Sequence; identical to SEQ ID NO: 165936
  derived and/or modified CDS sequence (opt4) from hemagglutinin__InfluenzaA__ADM95842

SEQ ID NO: 165979 - RNA, 1701 nt, Artificial Sequence; identical to SEQ ID NO: 165326
  derived and/or modified CDS sequence (opt4) from hemagglutinin__InfluenzaA__ADM95843

SEQ ID NO: 165980 - RNA, 1701 nt, Artificial Sequence; identical to SEQ ID NO: 165326
  derived and/or modified CDS sequence (opt4) from hemagglutinin__InfluenzaA__ADM95844

SEQ ID NO: 165981 - RNA, 1701 nt, Artificial Sequence
  derived and/or modified CDS sequence (opt4) from hemagglutinin__InfluenzaA__ADM95845
augaaggccauccugguggugcugcuguacaccuucgccaccgccaacgccgacacccugugcaucggcuaccacgccaacaacagcaccgacaccguggacaccgugcuggagaagaacgugaccgugacccacagcgugaaccugcuggaggacaagcacaacggcaagcugugcaagcugagaggcguggccccccugcaccugggcaagugcaacaucgccggcuggauccugggcaaccccgagugcgagagccugagcaccgccagcagcuggagcuacaucguggagaccagcagcagcgacaacggcaccugcuaccccggcgacuucaucgacuacgaggagcugagagagcagcugagcagcgugagcagcuucgagagauucgagaucuuccccaagaccagcagcuggcccaaccacgacagcaacaagggcgugaccgccgccugcccccacgccggcgccaagagcuucuacaagaaccugaucuggcuggugaagaagggcaacagcuaccccaagcugagcaagagcuacaucaacgacaagggcaaggaggugcuggugcuguggggcauccaccaccccagcaccagcgccgaccagcagagccuguaccagaacgccgacgccuacguguucgugggcaccagcagauacagcaagaaguucaagcccgagaucgccaucagacccaaggugagagaccaggagggcagaaugaacuacuacuggacccugguggagcccggcgacaagaucaccuucgaggccaccggcaaccugguggugcccagauacgccuucgccauggagagaaacgccggcagcggcaucaucaucagcgacacccccgugcacgacugcaacaccaccugccagacccccaagggcgccaucaacaccagccugcccuuccagaacauccaccccaucaccaucggcaagugccccaaguacgugaagagcaccaagcugagaauggccaccggccugagaaacgugcccagcauccagagcagaggccuguucggcgccaucgccggcuucaucgagggcggcuggaccggcaugguggacggcugguacggcuaccaccaccagaacgagcagggcagcggcuacgccgccgaccugaagagcacccagaacgccaucgacgagaucaccaacaaggugaacagcgugaucgagaagaugaacacccaguucaccgccgugggcaaggaguucaaccaccuggagaagagaaucgagaaccugaacaagaagguggacgacggcuuccuggacaucuggaccuacaacgccgagcugcuggugcugcuggagaacgagagaacccuggacuaccacgacagcaacgugaagaaccuguacgagaaggugagaagccagcugaagaacaacgccaaggagaucggcaacggcugcuucgaguucuaccacaagugcgacaacaccugcauggagagcgugaagaacggcaccuacgacuaccccaaguacagcgaggagaccaagcugaacagagaggagaucgacggcgugaagcuggagagcaccagaaucuaccagauccuggccaucuacagcaccguggccagcagccuggugcugguggugagccugggcgccaucagcuucuggaugugcagcaacggcagccugcagugcagaaucugcaucuga

SEQ ID NO: 165982 - RNA, 1701 nt, Artificial Sequence
  derived and/or modified CDS sequence (opt4) from hemagglutinin__InfluenzaA__ADM95846
augaaggccauccugguggugcugcuguacaccuucgccaccgccaacgccgacacccugugcaucggcuaccacgccaacaacagcaccgacaccguggacaccgugcuggagaagaacgugaccgugacccacagcgugaaccugcuggaggacaagcacaacggcaagcugugcaagcugagaggcguggccccccugcaccugggcaagugcaacaucgccggcuggauccugggcaaccccgagugcgagagccugagcaccgccagcagcuggagcuacaucguggaggccagcagcagcgacaacggcaccugcuaccccggcgacuucaucgacuacgaggagcugagagagcagcugagcagcgugagcagcuucgagagauucgagaucuuccccaagaccagcagcuggcccaaccacgacagcaacaagggcgugaccgccgccugcccccacgccggcgccaagagcuucuacaagaaccugaucuggcuggugaagaagggcaacagcuaccccaagcugagcaagagcuacaucaacgacaagggcaaggaggugcuggugcuguggggcauccaccaccccagcaccagcgccgaccagcagagccuguaccagaacgccgacgccuacguguucgugggcaccagcagauacagcaagaaguucaagcccgagaucgccaucagacccaaggugagagaccaggagggcagaaugaacuacuacuggacccugguggagcccggcgacaagaucaccuucgaggccaccggcaaccugguggugcccagauacgccuucgccauggagagaaacgccggcagcggcaucaucaucagcgacacccccgugcacgacugcaacaccaccugccagacccccaagggcgccaucaacaccagccugcccuuccagaacauccaccccaucaccaucggcaagugccccaaguacgugaagagcaccaagcugagacuggccaccggccugagaaacauccccagcauccagagcagaggccuguucggcgccaucgccggcuucaucgagggcggcuggaccggcaugguggacggcugguacggcuaccaccaccagaacgagcagggcagcggcuacgccgccgaccugaagagcacccagaacgccaucgacgagaucaccaacaaggugaacagcgugaucgagaagaugaacacccaguucaccgccgugggcaaggaguucaaccaccuggagaagagaaucgagaaccugaacaagaagguggacgacggcuuccuggacaucuggaccuacaacgccgagcugcuggugcugcuggagaacgagagaacccuggacuaccacgacagcaacgugaagaaccuguacgagaaggugagaagccagcugaagaacaacgccaaggagaucggcaacggcugcuucgaguucuaccacaagugcgacaacaccugcauggagagcgugaagaacggcaccuacgacuaccccaaguacagcgaggaggccaagcugaacagagaggagaucgacggcgugaagcuggagagcaccagaaucuaccagauccuggccaucuacagcaccguggccagcagccuggugcugguggugagccugggcgccaucagcuucuggaugugcagcaacggcagccugcagugcagaaucugcaucuga

SEQ ID NO: 165983 - RNA, 1701 nt, Artificial Sequence; identical to SEQ ID NO: 163830
  derived and/or modified CDS sequence (opt4) from hemagglutinin__InfluenzaA__ADM95847

SEQ ID NO: 165984 - RNA, 1701 nt, Artificial Sequence; identical to SEQ ID NO: 163830
  derived and/or modified CDS sequence (opt4) from hemagglutinin__InfluenzaA__ADM95848

SEQ ID NO: 165985 - RNA, 1701 nt, Artificial Sequence
  derived and/or modified CDS sequence (opt4) from hemagglutinin__InfluenzaA__ADM95849
augaaggccauccugguggugcugcuguacaccuucgccaccgccaacgccgacacccugugcaucggcuaccacgccaacaacagcaccgacaccguggacaccgugcuggagaagaacgugaccgugacccacagcgugaaccugcuggaggacaagcacaacggcaagcugugcaagcugagaggcguggccccccugcaccugggcaagugcaacaucgccggcuggauccugggcaaccccgagugcgagagccugagcaccgccagcagcuggagcuacaucguggagaccagcagcagcgacaacggcaccugcuaccccggcgacuucaucgacuacgaggagcugagagagcagcugagcagcgugagcagcuucgagagauucgagaucuuccccaagaccagcagcuggcccaaccacgacagcaacaagggcgugaccgccgccugcccccacgccggcgccaagagcuucuacaagaaccugaucuggcuggugaagaagggcaacagcuaccccaagcugagcaagagcuacaucaacgacaagggcaaggaggugcuggugcuguggggcauccaccaccccagcaccagcgccgaccagcagagccuguaccagaacgccgacgccuacguguucgugggcaccagcagauacagcaagaaguucaagcccgagaucgccaucagacccaaggugagagaccaggagggcagaaugaacuacuacuggacccugguggagcccggcgacaagaucaccuucgaggccaccggcaaccugguggugcccagauacgccuucgccauggagagaaacgccggcagcggcaucaucaucagcgacacccccgugcacgacugcaacaccaccugccagacccccaagggcgccaucaacaccagccugcccuuccagaacauccaccccaucaccaucggcaagugccccaaguacgugaagagcaccaagcugagacuggccaccggccugagaaacgugcccagcauccagagcagaggccuguucggcgccaucgccggcuucaucgagggcggcuggaccggcaugguggacggcugguacggcuaccaccaccagaacgagcagggcagcggcuacgccgccgaccugaagagcacccagaacgccaucgacgagaucaccaacaaggugaacagcgugaucgagaagaugaacacccaguucaccgccgugggcaaggaguucaaccaccuggagaagagaaucgagaaccugaacaagaagguggacgacggcuuccuggacaucuggaccuacaacgccgagcugcuggugcugcuggagaacgagagaacccuggacuaccacgacagcaacgugaagaagcuguacgagaaggugagaagccagcugaagaacaacgccaaggagaucggcaacggcugcuucgaguucuaccacaagugcgacaacaccugcauggagagcgugaagaacggcaccuacgacuaccccaaguacagcgaggaggccaagcugaacagagaggagaucgacggcgugaagcuggagagcaccagaaucuaccagauccuggccaucuacagcaccguggccagcagccuggugcuggugaucagccugggcgccaucagcuucuggaugugcagcaacggcagccugcagugcagaaucugcaucuga

SEQ ID NO: 165986 - RNA, 1701 nt, Artificial Sequence; identical to SEQ ID NO: 165326
  derived and/or modified CDS sequence (opt4) from hemagglutinin__InfluenzaA__ADM95850

SEQ ID NO: 165987 - RNA, 1701 nt, Artificial Sequence
  derived and/or modified CDS sequence (opt4) from hemagglutinin__InfluenzaA__ADM95851
augaaggccauccugguggugcugcuguacaccuucgccaccgccaacgccgacacccugugcaucggcuaccacgccaacaacagcaccgacaccguggacaccgugcuggagaagaacgugaccgugacccacagcgugaaccugcuggaggacaagcacaacggcaagcugugcaagcugagaggcguggccccccugcaccugggcaagugcaacaucgccggcuggauccugggcaaccccgagugcgagagccugagcaccaccagcagcuggagcuacaucguggagaccagcagcagcgacaacggcaccugcuaccccggcgacuucaucgacuacgaggagcugagagagcagcugagcagcgugagcagcuucgagagauucgagaucuuccccaagaccagcagcuggcccaaccacgacagcaacaagggcgugaccgccgccugcccccacgccggcgccaagagcuucuacaagaaccugaucuggcuggugaagaagggcaacagcuaccccaagcugagcaagagcuacaucaacgacaagggcaaggaggugcuggugcuguggggcauccaccaccccagcaccagcgccgaccagcagagccuguaccagaacgccgacgccuacguguucgugggcaccagcagauacagcaagaaguucaagcccgagaucgccaucagacccaaggugagagaccaggagggcagaaugaacuacuacuggacccugguggagcccggcgacaagaucaccuucgaggccaccggcaaccugguggugcccagauacgccuucgccauggagagaaacgccggcagcggcaucaucaucagcgacacccccgugcacgacugcaacaccaccugccagacccccaagggcgccaucaacaccagccugcccuuccagaacauccaccccaucaccaucggcaagugccccaaguacgugaagagcaccaagcugagacuggccaccggccugagaaacauccccagcauccagagcagaggccuguucggcgccaucgccggcuucaucgagggcggcuggaccggcaugguggacggcugguacggcuaccaccaccagaacgagcagggcagcggcuacgccgccgaccugaagagcacccagaacgccaucgacgagaucaccaacaaggugaacagcgugaucgagaagaugaacacccaguucaccgccgugggcaaggaguucaaccaccuggagaagagaaucgagaaccugaacaagaagguggacgacggcuuccuggacaucuggaccuacaacgccgagcugcuggugcugcuggagaacgagagaacccuggacuaccacgacagcaacgugaagaaccuguacgagaaggugagaagccagcugaagaacaacgccaaggagaucggcaacggcugcuucgaguucuaccacaagugcgacaacaccugcauggagagcgugaagaacggcaccuacgacuaccccaaguacagcgaggaggccaagcugaacagagaggagaucgacggcgugaagcuggagagcaccagaaucuaccagauccuggccaucuacagcaccguggccagcagccuggugcugguggugagccugggcgccaucagcuucuggaugugcagcaacggcagccugcagugcagaaucugcaucuga

SEQ ID NO: 165988 - RNA, 1701 nt, Artificial Sequence
  derived and/or modified CDS sequence (opt4) from hemagglutinin__InfluenzaA__ADM95852
augaaggccauccugguggugcugcuguacaccuucgccaccgccaacgccgacacccugugcaucggcuaccacgccaacaacagcaccgacaccguggacaccgugcuggagaagaacgugaccgugacccacagcgugaaccugcuggaggacaagcacaacggcaagcugugcaagcugagaggcguggccccccugcaccugggcaagugcaacaucgccggcuggauccugggcaaccccgagugcgagagccugagcaccgccagcagcuggagcuacaucguggagaccagcagcagcgacaacggcaccugcuaccccggcgacuucaucgacuacgaggagcugagagagcagcugagcagcgugagcagcuucgagagauucgagaucuuccccaagaccagcagcuggcccaaccacgacagcaacaagggcgugaccgccgccugcccccacgccggcgccaagagcuucuacaagaaccugaucuggcuggugaagaagggcaacagcuaccccaagcugagcaagagcuacaucaacgacaagggcaaggaggugcuggugcuguggggcauccaccaccccagcaccagcgccgaccagcagagccuguaccagaacgccgacgccuacguguucgugggcaccagcagauacagcaagaaguucaagcccgagaucgccaucagacccaaggugagagaccaggagggcagaaugaacuacuacuggacccugguggagcccggcgacaagaucaccuucgaggccaccggcaaccugguggugcccagauacgccuucgccauggagagaaacgccggcagcggcaucaucaucagcgacacccccgugcacgacugcaacaccaccugccagacccccaagggcgccaucaacaccagccugcccuuccagaacauccaccccaucaccaucggcaagugccccaaguacgugaagagcaccaagcugagacuggccaccggccugagaaacgugcccagcauccagagcagaggccuguucggcgccaucgccggcuucaucgagggcggcuggaccggcaugguggacggcugguacggcuaccaccaccagaacgagcagggcagcggcuacgccgccgaccugaagagcacccagaacgccaucgacgagaucaccaacaaggugaacagcgugaucgagaagaugaacacccaguucaccgccgugggcaaggaguucaaccaccuggagaagagaaucgagaaccugaacaagaagguggacgacggcuuccuggacaucuggaccuacaacgccgagcugcuggugcugcuggagaacgagagaacccuggacuaccacgacagcaacgugaagaagcuguacgagaagaucagaagccagcugaagaacaacgccaaggagaucggcaacggcugcuucgaguucuaccacaagugcgacaacaccugcauggagagcgugaagaacggcaccuacgacuaccccaaguacagcgaggaggccaagcugaacagagaggagaucgacggcgugaagcuggagagcaccagaaucuaccagauccuggccaucuacagcaccguggccagcagccuggugcugguggugagccugggcgccaucagcuucuggaugugcagcaacggcagccugcagugcagaaucugcaucuga

SEQ ID NO: 165989 - RNA, 1701 nt, Artificial Sequence; identical to SEQ ID NO: 164149
  derived and/or modified CDS sequence (opt4) from hemagglutinin__InfluenzaA__ADM95854

SEQ ID NO: 165990 - RNA, 1701 nt, Artificial Sequence
  derived and/or modified CDS sequence (opt4) from hemagglutinin__InfluenzaA__ADM95855
augaaggccauccugguggugcugcuguacaccuucgccaccaccaacgccgacacccugugcaucggcuaccacgccaacaacagcaccgacaccguggacaccgugcuggagaagaacgugaccgugacccacagcgugaaccugcuggaggacaagcacaacggcaagcugugcaagcugagaggcguggccccccugcaccugggcaagugcaacaucgccggcuggauccugggcaaccccgagugcgagagccugagcaccgccagcagcuggagcuacaucguggagaccagcagcagcgacaacggcaccugcuaccccggcgacuucaucgacuacgaggagcugagagagcagcugagcagcgugagcagcuucgagagauucgagaucuuccccaagaccagcagcuggcccaaccacgacagcaacaagggcgugaccgccgccugcccccacgccggcgccaagagcuucuacaagaaccugaucuggcuggugaagaagggcaacagcuaccccaagcugagcaagagcuacaucaacgacaagggcaaggaggugcuggugcuguggggcauccaccaccccagcaccagcgccgaccagcagagccuguaccagaacgccgacgccuacguguucgugggcaccagcagauacagcaagaaguucaagcccgagaucgccaucagacccaaggugagagaccaggagggcagaaugaacuacuacuggacccugguggagcccggcgacaagaucaccuucgaggccaccggcaaccugguggugcccagauacgccuucgccauggagagaaacgccggcagcggcaucaucaucagcgacacccccgugcacgacugcaacaccaccugccagacccccaagggcgccaucaacaccagccugcccuuccagaacauccaccccaucaccaucggcaagugccccaaguacgugaagagcaccaagcugagacuggccaccggccugagaaacgugcccagcauccagagcagaggccuguucggcgccaucgccggcuucaucgagggcggcuggaccggcaugguggacggcugguacggcuaccaccaccagaacgagcagggcagcggcuacgccgccgaccugaagagcacccagaacgccaucgacgagaucaccaacaaggugaacagcgugaucgagaagaugaacacccaguucaccgccgugggcaaggaguucaaccaccuggagaagagaaucgagaaccugaacaagaagguggacgacggcuuccuggacaucuggaccuacaacgccgagcugcuggugcugcuggagaacgagagaacccuggacuaccacgacagcaacgugaagaagcuguacgagaaggugagaagccagcugaagaacaacgccaaggagaucggcaacggcugcuucgaguucuaccacaagugcgacaacaccugcauggagagcgugaagaacggcaccuacgacuaccccaaguacagcgaggaggccaagcugaacagagaggagaucgacggcgugaagcuggagagcaccagaaucuaccagauccuggccaucuacagcaccguggccagcagccuggugcugguggugagccugggcgccaucagcuucuggaugugcagcaacggcagccugcagugcagaaucugcaucuga

SEQ ID NO: 165991 - RNA, 1701 nt, Artificial Sequence
  derived and/or modified CDS sequence (opt4) from hemagglutinin__InfluenzaA__ADM95857
augaaggccauccugguggugcugcuguacaccuucgccaccgccaacgccgacacccugugcaucggcuaccacgccaacaacagcaccgacaccguggacaccgugcuggagaagaacgugaccgugacccacagcgugaaccugcuggaggacaagcacaacggcaagcugugcaagcugagaggcguggccccccugcaccugggcaagugcaacaucgccggcuggauccugggcaaccccgagugcgagagccugagcaccgccaacagcuggagcuacaucguggagaccagcagcagcgacaacggcaccugcuaccccggcgacuucaucgacuacgaggagcugagagagcagcugagcagcgugagcagcuucgagagauucgagaucuuccccaagaccagcagcuggcccaaccacgacagcaacaagggcgugaccgccgccugcccccacgccggcgccaagagcuucuacaagaaccugaucuggcuggugaagaagggcaacagcuaccccaagcugagcaagagcuacaucaacgacaagggcaaggaggugcuggugcuguggggcauccaccaccccagcaccagcgccgaccagcagagccuguaccagaacgccgacgccuacguguucgugggcaccagcagauacagcaagaaguucaagcccgagaucgccaucagacccaaggugagagaccaggagggcagaaugaacuacuacuggacccugguggagcccggcgacaagaucaccuucgaggccaccggcaaccugguggugcccagauacgccuucgccauggagagaaacgccggcagcggcaucaucaucagcgacacccccgugcacgacugcaacaccaccugccagacccccaagggcgccaucaacaccagccugcccuuccagaacauccaccccaucaccaucggcaagugccccaaguacgugaagagcaccaagcugagaauggccaccggccugagaaacgugcccagcauccagagcagaggccuguucggcgccaucgccggcuucaucgagggcggcuggaccggcaugguggacggcugguacggcuaccaccaccagaacgagcagggcagcggcuacgccgccgaccugaagagcacccagaacgccaucgacgagaucaccaacaaggugaacagcgugaucgagaagaugaacacccaguucaccgccgugggcaaggaguucaaccaccuggagaagagaaucgagaaccugaacaagaagguggacgacggcuuccuggacaucuggaccuacaacgccgagcugcuggugcugcuggagaacgagagaacccuggacuaccacgacagcaacgugaagaaccuguacgagaaggugagaagccagcugaagaacaacgccaaggagaucggcaacggcugcuucgaguucuaccacaagugcgacaacaccugcauggagagcgugaagaacggcaccuacgacuaccccaaguacagcgaggaggccaagcugaacagagaggagaucgacggcgugaagcuggagagcaccagaaucuaccagauccuggccaucuacagcaccguggccagcagccuggugcugguggugagccugggcgccaucagcuucuggaugugcagcaacggcagccugcagugcagaaucugcaucuga

SEQ ID NO: 165992 - RNA, 1701 nt, Artificial Sequence; identical to SEQ ID NO: 164411
  derived and/or modified CDS sequence (opt4) from hemagglutinin__InfluenzaA__ADM95858

SEQ ID NO: 165993 - RNA, 1701 nt, Artificial Sequence
  derived and/or modified CDS sequence (opt4) from hemagglutinin__InfluenzaA__ADM95859
augaaggccauccugguggugcugcuguacaccuucgccaccgccaacgccgacacccugugcaucggcuaccacgccaacaacagcaccgacaccguggacaccgugcuggagaagaacgugaccgugacccacagcgugaaccugcuggaggacaagcacaacgagaagcugugcaagcugagaggcguggccccccugcaccugggcaagugcaacaucgccggcuggauccugggcaaccccgagugcgagagccugagcaccgccagcagcuggagcuacaucguggagaccagcagcagcgacaacggcaccugcuaccccggcgacuucaucgacuacgaggagcugagagagcagcugagcagcgugagcagcuucgagagauucgagaucuuccccaagaccagcagcuggcccaaccacgacagcaacaagggcgugaccgccgccugcccccacgccggcgccaagagcuucuacaagaaccugaucuggcuggugaagaagggcaacagcuaccccaagcugagcaagagcuacaucaacgacaagggcaaggaggugcuggugcuguggggcauccaccaccccagcaccagcgccgaccagcagagccuguaccagaacgccgacgccuacguguucgugggcaccagcagauacagcaagaaguucaagcccgagaucgccaucagacccaaggugagagaccaggagggcagaaugaacuacuacuggacccugguggagcccggcgacaagaucaccuucgaggccaccggcaaccugguggugcccagauacgccuucgccauggagagaaacgccggcagcggcaucaucaucagcgacacccccgugcacgacugcaacaccaccugccagacccccaagggcgccaucaacaccagccugcccuuccagaacauccaccccaucaccaucggcaagugccccaaguacgugaagagcaccaagcugagacuggccaccggccugagaaacgugcccagcauccagagcagaggccuguucggcgccaucgccggcuucaucgagggcggcuggaccggcaugguggacggcugguacggcuaccaccaccagaacgagcagggcagcggcuacgccgccgaccugaagagcacccagaacgccaucgacgagaucaccaacaaggugaacagcgugaucgagaagaugaacacccaguucaccgccgugggcaaggaguucaaccaccuggagaagagaaucgagaaccugaacaagaagguggacgacggcuuccuggacaucuggaccuacaacgccgagcugcuggugcugcuggagaacgagagaacccuggacuaccacgacagcaacgugaagaagcuguacgagaaggugagaagccagcugaagaacaacgccaaggagaucggcaacggcugcuucgaguucuaccacaagugcgacaacaccugcauggagagcgugaagaacggcaccuacgacuaccccaaguacagcgaggaggccaagcugaacagagaggagaucgacggcgugaagcuggagagcaccagaaucuaccagauccuggccaucuacagcaccguggccagcagccuggugcugguggugagccugggcgccaucagcuucuggaugugcagcaacggcagccugcagugcagaaucugcaucuga

SEQ ID NO: 165994 - RNA, 1701 nt, Artificial Sequence; identical to SEQ ID NO: 164356
  derived and/or modified CDS sequence (opt4) from hemagglutinin__InfluenzaA__ADM95860

SEQ ID NO: 165995 - RNA, 1701 nt, Artificial Sequence; identical to SEQ ID NO: 165956
  derived and/or modified CDS sequence (opt4) from hemagglutinin__InfluenzaA__ADM95862

SEQ ID NO: 165996 - RNA, 1701 nt, Artificial Sequence
  derived and/or modified CDS sequence (opt4) from hemagglutinin__InfluenzaA__ADM95864
augaaggccauccugguggugcugcuguacaccuucgccaccgccaacgccgacacccugugcaucggcuaccacgccaacaacagcaccgacaccguggacaccgugcuggagaagaacgugaccgugacccacagcgugaaccugcuggaggacaagcacaacggcaagcugugcaagcugagaggcguggccccccugcaccugggcaagugcaacaucgccggcuggauccugggcaaccccgagugcgagagccugagcaccgccagcagcuggagcuacaucguggagaccagcagcagcgacaacggcaccugcuaccccggcgacuucaucgacuacgaggagcugagagagcagcugagcagcgugagcagcuucgagagauucgagaucuuccccaagaccagcagcuggcccaaccacgacagcaacaagggcgugaccgccgccugcccccacgccggcgccaagagcuucuacaagaaccugaucuggcuggugaagaagggcaacagcuaccccaagcugagcaagagcuacaucaacgacaagggcaaggaggugcuggugcuguggggcauccaccaccccagcaccagcgccgaccagcagagccuguaccagaacgccgacgccuacguguucgugggcaccagcagauacagcaagaaguucaagcccgagaucgccaucagacccagagugagagaccaggagggcagaaugaacuaccacuggacccugguggagcccggcgacaagaucaccuucgaggccaccggcaaccugguggugcccagauacgccuucgccauggagagaaacgccggcagcggcaucaucaucagcgacacccccgugcacgacugcaacaccaccugccagacccccaagggcgccaucaacaccagccugcccuuccagaacauccaccccaucaccaucggcaagugccccaaguacgugaagagcaccaagcugagacuggccaccggccugagaaacauccccagcauccagagcagaggccuguucggcgccaucgccggcuucaucgagggcggcuggaccggcaugguggacggcugguacggcuaccaccaccagaacgagcagggcagcggcuacgccgccgaccugaagagcacccagaacgccaucgacgagaucaccaacaaggugaacagcgugaucgagaagaugaacacccaguucaccgccgugggcaaggaguucaaccaccuggagaagagaaucgagaaccugaacaagaagguggacgacggcuuccuggacaucuggaccuacaacgccgagcugcuggugcugcuggagaacgagagaacccuggacuaccacgacagcaacgugaagaaccuguacgagaaggugagaagccagcugaagaacaacgccaaggagaucggcaacggcugcuucgaguucuaccacaagugcgacaacaccugcauggagagcgugaagaacggcaccuacgacuaccccaaguacagcgaggaggccaagcugaacagagaggagaucgacggcgugaagcuggagagcaccagaaucuaccagauccuggccaucuacagcaccguggccagcagccuggugcugguggugagccugggcgccaucagcuucuggaugugcagcaacggcagccugcagugcagaaucugcaucuga

SEQ ID NO: 165997 - RNA, 1701 nt, Artificial Sequence; identical to SEQ ID NO: 164281
  derived and/or modified CDS sequence (opt4) from hemagglutinin__InfluenzaA__ADM95865

SEQ ID NO: 165998 - RNA, 1701 nt, Artificial Sequence
  derived and/or modified CDS sequence (opt4) from hemagglutinin__InfluenzaA__ADM95866
augaaggccauccugguggugcugcuguacaccuucgccaccaccaacgccgacacccugugcaucggcuaccacgccaacaacagcaccgacaccguggacaccgugcuggagaagaacgugaccgugacccacagcgugaaccugcuggaggacaagcacaacggcaagcugugcaagcugagaggcguggccccccugcaccugggcaagugcaacaucgccggcuggauccugggcaaccccgagugcgagagccugagcaccgccagcagcuggagcuacaucguggagaucagcagcagcgacaacggcaccugcuaccccggcgacuucaucgacuacgaggagcugagagagcagcugagcagcgugagcagcuucgagagauucgagaucuuccccaagaccagcagcuggcccaaccacgacagcaacaagggcgugaccgccgccugcccccacgccggcgccaagagcuucuacaagaaccugaucuggcuggugaagaagggcaacagcuaccccaagcugagcaagagcuacaucaacgacaagggcaaggaggugcuggugcuguggggcauccaccaccccagcaccagcgccgaccagcagagccuguaccagaacgccgacgccuacguguucgugggcaccagcagauacagcaagaaguucaagcccgagaucgccaucagacccaaggugagagaccaggagggcagaaugaacuacuacuggacccugguggagcccggcgacaagaucaccuucgaggccaccggcaaccugguggugcccagauacgccuucgccauggagagaaacgccggcagcggcaucaucaucagcgacacccccgugcacgacugcaacaccaccugccagacccccaagggcgccaucaacaccagccugcccuuccagaacauccaccccaucaccaucggcaagugccccaaguacgugaagagcaccaagcugagacuggugaccggccugagaaacgugcccagcauccagagcagaggccuguucggcgccaucgccggcuucaucgagggcggcuggaccggcaugguggacggcugguacggcuaccaccaccagaacgagcagggcagcggcuacgccgccgaccugaagagcacccagaacgccaucgacaagaucaccaacaaggugaacagcgugaucgagaagaugaacacccaguucaccgccgugggcaaggaguucaaccaccuggagaagagaaucgagaaccugaacaagaagguggacgacggcuuccuggacaucuggaccuacaacgccgagcugcuggugcugcuggagaacgagagaacccuggacuaccacgacagcaacgugaagaaccuguacgagaaggugagaagccagcugaagaacaacgccaaggagaucggcaacggcugcuucgaguucuaccacaagugcgacaacaccugcauggagagcgugaagaacggcaccuacgacuaccccaaguacagcgaggaggccaagcugaacagagaggagaucgacggcgugaagcuggagagcaccagaaucuaccagauccuggccaucuacagcaccgccgccagcagccuggugcugguggugagccugggcgccaucagcuucuggaugugcagcaacggcagccugcagugcagaaucugcaucuga

SEQ ID NO: 165999 - RNA, 1698 nt, Artificial Sequence; identical to SEQ ID NO: 165573
  derived and/or modified CDS sequence (opt4) from hemagglutinin__InfluenzaA__ADN06300

SEQ ID NO: 166000 - RNA, 1698 nt, Artificial Sequence
  derived and/or modified CDS sequence (opt4) from hemagglutinin__InfluenzaA__ADN06311
augaaggugaagcugcuggugcugcugugcacccugaccgccaccuacgccgacaccaucugcaucggcuaccacgccaacaacagcaccgacaccguggacaccgugcuggagaagaacgugaccgugacccacagcgugaaccugcuggagaacagccacaacggcaagcugugccugcugaagggcaucgccccccugcagcugggcaacugcagcguggccggcuggauccugggcaaccccgagugcgagcugcugaucagcaaggagagcuggagcuacaucguggagaagcccaaccccgagaacggcaccugcuaccccggccacuucgccgacuacgaggagcugagagagcagcugagcagcgugagcagcuucgagagauucgagaucuuccccaagggcagcagcuggcccaaccacaccgugaccggcgugagcgccagcugcagccacaacggcgagaacagcuucuacagaaaccugcuguggcugaccggcaagaacggccuguaccccaaccugagcaagagcuacgccaacaacaaggagaaggaggugcuggugcuguggggcgugcaccacccccccaacaucgccgaccagaagacccuguaccacaccgagaacgccuacgugagcguggugagcagccacuacagcagaaaguucacccccgagaucgccaagagacccaaggugagagaccaggagggcagaaucaacuacuacuggacccugcuggagcccggcgacaccaucaucuucgaggccaacggcaaccugaucgcccccagauacgccuucgcccugagcagaggcuucggcagcggcaucaucaacagcaacgcccccauggacaagugcgacgccaagugccagaccccccagggcgccaucaacagcagccugcccuuccagaacgugcaccccgugaccaucggcgagugccccaaguacgugagaagcgccaagcugagaauggugaccggccugagaaacauccccagcauccagagcagaggccuguucggcgccaucgccggcuucaucgagggcggcuggaccggcaugguggacggcugguacggcuaccaccaccagaacgagcagggcagcggcuacgccgccgaccagaagagcacccagaacgccaucaacggcaucaccaacaaggugaacagcgugaucgagaagaugaacacccaguucaccgccgugggcaaggaguucaacaagcuggagagaagaauggagaaccugaacaagaagguggacgacggcuucaucgacaucuggaccuacaacgccgagcugcuggugcugcuggagaacgagagaacccuggacuuccacgacagcaacgugaagaaccuguacgagaaggugaagagccagcugaagaacaacgccaaggagaucggcaacggcugcuucgaguucuaccacaagugcaacgacgagugcauggagagcgugaagaacggcaccuacgacuaccccaaguacagcgaggagagcaagcugaacagagagaagaucgacggcgugaagcuggagagcaugggcguguaccagauccuggccaucuacagcaccguggccagcagccuggugcugcuggugagccugggcgccaucagcuucuggaugugcagcaacggcagccugcagugcagaaucugcaucuga

SEQ ID NO: 166001 - RNA, 1698 nt, Artificial Sequence
  derived and/or modified CDS sequence (opt4) from hemagglutinin__InfluenzaA__ADN06322
augaaggugaagcugcuggugcugcugugcaccuucaccgccaccuacgccgacaccaucugcaucggcuaccacgccaacaacagcaccgacaccguggacaccgugcuggagaagaacgugaccgugacccacagcgugaaccugcuggagaacagccacaacggcaagcugugccugcugaagggcaucgccccccugcagcugggcaacugcagcguggccggcuggauccugggcaaccccgagugcgagcugcugaucagcaaggagagcuggagcuacaucguggagaagcccaaccccgagaacggcaccugcuaccccggccacuucgccgacuacgaggagcugagagagcagcugagcagcgugagcagcuucgagagauucgagaucuuccccaaggagagcagcuggcccaaccacaccgugaccggcgugagcgccagcugcagccacaacggcgagagcagcuucuacagaaaccugcuguggcugaccggcaagaacggccuguaccccaaccugagcaagagcuacgccaacaacaaggagaaggaggugcuggugcuguggggcgugcaccacccccccaacaugguggaccagagaacccuguacagaaccgagaacgccuacgugagcguggugagcagccacuacagcagaaaguucacccccgagaucgccaagagacccaaggugagagaccaggagggcagaaucaacuacuacuggacccugcuggagcccggcgacaccaucaucuucgaggccaacggcaaccugaucgcccccagauacgccuucgcccugagcagaggcuucggcagcggcaucaucaacagcaacgcccccaugggcaagugcgacgccaagugccagaccccccagggcgccaucaacagcagccugcccuuccagaacgugcaccccgugaccaucggcgagugccccaaguacgugagaagcgccaagcugagaauggugaccggccugagaaacauccccagcauccagagcagaggccuguucggcgccaucgccggcuucaucgagggcggcuggaccggcaugguggacggcugguacggcuaccaccaccagaacgagcagggcagcggcuacgccgccgaccagaagagcacccagaacgccaucaacggcaucaccaacaaggugaacagcgugaucgagaagaugaacacccaguucaccgccgugggcaaggaguucaacaagcuggagagaagaauggagaaccugaacaagaagguggacgacggcuucaucgacaucuggaccuacaacgccgagcugcuggugcugcuggagaacgagagaacccuggacuuccacgacagcaacgugaagaaccuguacgagaaggugaagagccagcugaagaacaacgccaaggagaucggcaacggcugcuucgaguucuaccacaagugcaacgacgagugcauggagagcgugaagaacggcaccuacgacuaccccaaguacagcgaggagagcaagcugaacagagagaagaucgacggcgugaagcuggagagcaugggcguguaccagauccuggccaucuacagcaccguggccagcagccuggugcugcuggugagccugggcgccaucagcuucuggaugugcagcaacggcagccugcagugcagaaucugcaucuga

SEQ ID NO: 166002 - RNA, 1698 nt, Artificial Sequence
  derived and/or modified CDS sequence (opt4) from hemagglutinin__InfluenzaA__ADN06344
augaaggugaagcugcuggugcugcugugcaccuucaccgccaccuacgccgacaccaucugcaucggcuaccacgccaacaacagcaccgacaccguggacaccgugcuggagaagaacgugaccgugacccacagcgugaaccugcuggagaacagccacaacggcaagcugugccugcugaagggcaucgccccccugcagcugggcaacugcagcguggccggcuggauccugggcaaccccgagugcgagcugcugaucagcaaggagagcuggagcuacaucguggagaagcccaaccccgagaacggcaccugcuaccccggccacuucgccgacuacgaggagcugagagagcagcugagcagcgugagcagcuucgagagauucgagaucuuccccaaggagagcagcuggcccaaccacaccgugaccggcgugagcgccagcugcagccacaacggcgagagcagcuucuacagaaaccugcuguggcugaccggcaagaacggccuguaccccaaccugagcaagagcuacgccaacaacaaggagaaggaggugcuggugcuguggggcgugcaccacccccccagcaucagcgaccagaagacccuguaccacaccgagaacgccuacgugagcguggugagcagccacuacagcagaaaguucacccccgagaucgccaagagacccaaggugagagaccaggagggcagaaucaacuacuacuggacccugcuggagcccggcgacaccaucaucuucgaggccaacggcaaccugaucgcccccagauacgccuucgcccugagcagaggcuucggcagcggcaucaucaacagcaacgcccccauggacaagugcgacgccaagugccagaccccccagggcgccaucaacagcagccugcccuuccagaacgugcaccccgugaccaucggcgagugccccaaguacgugagaagcgccaagcugagaauggugaccggccugagaaacauccccagcauccagagcagaggccuguucggcgccaucgccggcuucaucgagggcggcuggaccggcaugguggacggcugguacggcuaccaccaccagaacgagcagggcagcggcuacgccgccgaccagaagagcacccagaacgccaucaacggcaucaccaacaaggugaacagcgugaucgagaagaugaacacccaguucaccgccgugggcaaggaguucaacaagcuggagagaagaauggagaaccugaacaagaagguggacgacggcuucaucgacaucuggaccuacaacgccgagcugcuggugcugcuggagaacgagagaacccuggacuuccacgacagcaacgugaagaaccuguacgagaaggugaagagccagcugaagaacaacgccaaggagaucggcaacggcugcuucgaguucuaccacaagugcaacgacgagugcauggagagcgugaagaacggcaccuacgacuaccccaaguacagcgaggagagcaagcugaacagagagaagaucgacggcgugaagcuggagagcaugggcguguaccagauccuggccaucuacagcaccguggccagcagccuggugcugcuggugagccugggcgccaucagcuucuggaugugcagcaacggcagccugcagugcagaaucugcaucuga

SEQ ID NO: 166003 - RNA, 1701 nt, Artificial Sequence; identical to SEQ ID NO: 165593
  derived and/or modified CDS sequence (opt4) from hemagglutinin__InfluenzaA__ADN06366

SEQ ID NO: 166004 - RNA, 1701 nt, Artificial Sequence
  derived and/or modified CDS sequence (opt4) from hemagglutinin__InfluenzaA__ADN26165
augaaggccauccugguggugcugcuguacaccuucgccaccgccaacgccgacacccugugcaucggcuaccacgccaacaacagcaccgacaccguggacaccgugcuggagaagaacgugaccgugacccacagcgugaaccugcuggagggcaagcacaacggcaagcugugcaagcugagaggcguggccccccugcaccugggcaagugcaacaucgccggcuggauccugggcaaccccgagugcgagagccugagcaccgccagcagcuggagcuacaucguggagaccagcagcagcgacaacggcaccugcuaccccggcgacuucaucgacuacgaggagcugagagagcagcugagcagcgugagcagcuucgagagauucgagaucuuccccaagaccagcagcuggcccaaccacgacagcaacaagggcgugaccgccgccugcccccacgccggcgccaagagcuucuacaagaaccugaucuggcugaucaagaagggcaacagcuaccccaagcugagcaagagcuacaucaacgacaagggcaaggaggugcuggugcuguggggcauccaccaccccagcaccagcgccgaccagcagagccuguaccagaacgccgacgccuacguguucgugggcaccagcagauacagcaagaaguucaagcccgagaucgccaucagacccaaggugagagaccaggagggcagaaugaacuacuacuggacccugguggagcccggcgacaagaucaccuucgaggccaccggcaaccugguggugcccagauacgccuucgccauggagagaaacgccggcagcggcaucaucaucagcgacacccccgugcacgacugcaacaccaccugccagacccccaagggcgccaucaacaccagccugcccuuccagaacauccaccccaucaccaucggcaagugccccaaguacgugaagagcaccaagcugagacuggccaccggccugagaaacauccccagcauccagagcagaggccuguucggcgccaucgccggcuucaucgagggcggcuggaccggcaugguggacggcugguacggcuaccaccaccagaacgagcagggcagcggcuacgccgccgaccugaagagcacccagaacgccaucgacgagaucaccaacaaggugaacagcgugaucgagaagaugaacacccaguucaccgccgugggcaaggaguucaaccaccuggagaagagaaucgagaaccugaacaagaagguggacgacggcuuccuggacaucuggaccuacaacgccgagcugcuggugcugcuggagaacgagagaacccuggacuaccacgacagcaacgugaagaaccuguacgagaaggugagaagccagcugaagaacaacgccaaggagaucggcaacggcugcuucgaguucuaccacaagugcgacaacaccugcauggagagcgugaagaacggcaccuacgacuaccccaaguacagcgaggaggccaagcugaacagagaggagaucgacggcgugaagcuggagagcgccagaaucuaccagauccuggccaucuacagcaccguggccagcagccuggugcugguggugagccugggcgccaucagcuucuggaugugcagcaacggcagccugcagugcagaaucugcaucuga

SEQ ID NO: 166005 - RNA, 1701 nt, Artificial Sequence; identical to SEQ ID NO: 162909
  derived and/or modified CDS sequence (opt4) from hemagglutinin__InfluenzaA__ADN26175

SEQ ID NO: 166006 - RNA, 1701 nt, Artificial Sequence
  derived and/or modified CDS sequence (opt4) from hemagglutinin__InfluenzaA__ADN78194
augaaggccauccugguggugcugcuguacaccuucgccaccaccaacgccgacacccugugcaucggcuaccacgccaacaacagcaccgacaccguggacaccgugcuggagaagaacgugaccgugacccacagcgugaaccugcuggaggacaagcacaacggcaagcugugcaagcugagaggcguggccccccugcaccugggcaagugcaacaucgccggcuggauccugggcaaccccgagugcgagagccugagcaccgccagcagcuggagcuacaucguggagaccagcagcagcgacaacggcaccugcuaccccggcgacuucaucgacuacgaggagcugagagagcagcugagcagcgugagcagcuucgagagauucgagaucuuccccaagaccagcagcuggcccaaccacgacagcaacaagggcgugaccgccgccugcccccacgccggcgccaagagcuucuacaagaaccugaucuggcuggugaagaagggcaacagcuaccccaagcugagcaagagcuacaucaacgacaagggcaaggaggugcuggugcuguggggcauccaccaccccagcaccagcgccgaccagcagagccuguaccagaacgccgacgccuacguguucgugggcaccagcagauacagcaagaaguucaagcccgagaucgccaucagacccaaggugagagaccaggagggcagaaugaacuacuacuggacccugguggagcccggcgacaagaucaccuucgaggccaccggcaaccugguggugcccagauacgccuucgccauggagagaaacgccggcagcggcaucaucaucagcgacacccccgugcacgacugcaacaccaccugccagacccccaagggcgccaucaacaccagccugcccuuccagaacauccaccccaucaccaucggcaagugccccaaguacgugaagagcaccaagcugagacuggccaccggccugagaaacgugcccagcauccagagcagaggccuguucggcgccaucgccggcuucaucgagggcggcuggaccggcaugguggacggcugguacggcuaccaccaccagaacgagcagggcagcggcuacgccgccgaccugaagagcacccagaacgccaucgacaagaucaccaacaaggugaacagcgugaucgagaagaugaacacccaguucaccgccgugggcaaggaguucaaccaccuggagaagagaaucgagaaccugaacaagaagguggacgacggccugcuggacaucuggaccuacaacgccgagcugcuggugcugcuggagaacgagagaacccuggacuaccacgacagcaacgugaagaaccuguacgagaaggugagaagccagcugaagaacaacgccaaggagaucggcaacggcugcuucgaguucuaccacaagugcgacaacaccugcauggagagcgugaagaacggcaccuacgacuaccccaaguacagcgaggaggccaagcugaacagagaggagaucgacggcgugaagcuggagagcaccagaaucuaccagauccuggccaucuacagcaccguggccagcagccuggugcugguggugagccugggcgccaucagcuucuggaugugcagcaacggcagccugcagugcagaaucugcaucuga

SEQ ID NO: 166007 - RNA, 1701 nt, Artificial Sequence; identical to SEQ ID NO: 163893
  derived and/or modified CDS sequence (opt4) from hemagglutinin__InfluenzaA__ADN78195

SEQ ID NO: 166008 - RNA, 1701 nt, Artificial Sequence; identical to SEQ ID NO: 164281
  derived and/or modified CDS sequence (opt4) from hemagglutinin__InfluenzaA__ADN78212

SEQ ID NO: 166009 - RNA, 1701 nt, Artificial Sequence; identical to SEQ ID NO: 164281
  derived and/or modified CDS sequence (opt4) from hemagglutinin__InfluenzaA__ADN78221

SEQ ID NO: 166010 - RNA, 1698 nt, Artificial Sequence; identical to SEQ ID NO: 166000
  derived and/or modified CDS sequence (opt4) from hemagglutinin__InfluenzaA__ADN89050

SEQ ID NO: 166011 - RNA, 1698 nt, Artificial Sequence
  derived and/or modified CDS sequence (opt4) from hemagglutinin__InfluenzaA__ADN89061
augaaggugaagcugcuggugcugcugugcaccuucaccgccaccuacgccgacaccaucugcaucggcuaccacgccaacaacagcaccgacaccguggacaccgugcuggagaagaacgugaccgugacccacagcgugaaccugcuggagaacagccacaacggcaagcugugccugcugaagggcaucgccccccugcagcugggcaacugcagcguggccggcuggauccugggcaaccccgagugcgagcugcugaucagcaaggagagcuggagcuacaucguggagaagcccaaccccgagaacggcaccugcuaccccggccacuucgccgacuacgaggagcugagagagcagcugagcagcgugagcagcuucgagagauucgagaucuuccccaaggagagcagcuggcccaaccacaccgugaccggcgugagcgccagcugcagccacaacggcgagagcagcuucuacagaaaccugcuguggcugaccgagaagaacggccuguaccccaaccugagcaagagcuacgccaacaacaaggagaaggaggugcuggugcuguggggcgugcaccacccccccagcaucagcgaccagaagacccuguaccacaccgagaacgccuacgugagcguggugagcagccacuacagcagaaaguucacccccgagaucgccaagagacccaaggugagagaccaggagggcagaaucaacuacuacuggacccugcuggagcccggcgacaccaucaucuucgaggccaacggcaaccugaucgcccccagauacgccuucgcccugagcagaggcuucggcagcggcaucaucaacagcaacgcccccauggacaagugcgacgccaagugccagaccccccagggcgccaucaacagcagccugcccuuccagaacgugcaccccgugaccaucggcgagugccccaaguacgugagaagcgccaagcugagaauggugaccggccugagaaacauccccagcauccagagcagaggccuguucggcgccaucgccggcuucaucgagggcggcuggaccggcaugguggacggcugguacggcuaccaccaccagaacgagcagggcagcggcuacgccgccgaccagaagagcacccagaacgccaucaacgagaucaccaacaaggugaacagcgugaucgagaagaugaacacccaguucaccgccgugggcaaggaguucaacaagcuggagagaagaauggagaaccugaacaagaagguggacgacggcuucaucgacaucuggaccuacaacgccgagcugcuggugcugcuggagaacgagagaacccuggacuuccacgacagcaacgugaagaaccuguacgagaaggugaagaaccagcugaagaacaacgccaaggagaucggcaacggcugcuucgaguucuaccacaagugcaacgacgagugcauggagagcgugaagaacggcaccuacgacuaccccaaguacagcgaggagagcaagcugaacagagagaagaucgacggcgugaagcuggagagcaugggcguguaccagauccuggccaucuacagcaccguggccagcagccuggugcugcuggugagccugggcgccaucagcuucuggaugugcagcaacggcagccugcagugcagaaucugcaucuga

SEQ ID NO: 166012 - RNA, 1698 nt, Artificial Sequence; identical to SEQ ID NO: 166002
  derived and/or modified CDS sequence (opt4) from hemagglutinin__InfluenzaA__ADN89072

SEQ ID NO: 166013 - RNA, 1698 nt, Artificial Sequence
  derived and/or modified CDS sequence (opt4) from hemagglutinin__InfluenzaA__ADN89083
augaaggugaagcugcuggugcugcugugcaccuucaccgccaccuacgccgacaccaucugcaucggcuaccacgccaacaacagcaccgacaccguggacaccgugcuggagaagaacgugaccgugacccacagcgugaaccugcuggagaacagccacaacggcaagcugugccugcugaagggcaucgccccccugcagcugggcaacugcagcguggccggcuggauccugggcaaccccgagugcgagcugcugaucagcaaggagagcuggagcuacaucguggagaagcccaaccccgagaacggcaccugcuaccccggccacuucgccgacuacgaggagcugagagagcagcugagcagcgugagcagcuucgagagauucgagaucuuccccaaggagagcagcuggcccaaccacaccgugaccggcgugagcgccagcugcagccacaacggcgagaacagcuucuacagaaaccugcuguggcugaccggcaagaacggccuguaccccaaccugagcaagagcuacgccaacaacaaggagaaggaggugcuggugcuguggggcgugcaccacccccccaacauggccgaccagaagacccuguaccacaccgagaacgccuacgugagcguggugagcagccacuacagcagaaaguucacccccgagaucgccaagagacccaaggugagagaccaggagggcagaaucaacuacuacuggacccugcuggagcccggcgacaccaucaucuucgaggccaacggcaaccugaucgcccccagauacgccuucgcccugagcagaggcuucggcagcggcaucaucaacagcaacgcccccauggacaagugcgacgccaagugccagaccccccagggcgccaucaacagcagccugcccuuccagaacgugcaccccgugaccaucggcgagugccccaaguacgugagaagcgccaagcugagaauggugaccggccugagaaacauccccagcauccagagcagaggccuguucggcgccaucgccggcuucaucgagggcggcuggaccggcaugguggacggcugguacggcuaccaccaccagaacgagcagggcagcggcuacgccgccgaccagaagagcacccagaacgccaucaacggcaucaccaacaaggugaacagcgugaucgagaagaugaacacccaguucaccgccgugggcaaggaguucaacaagcuggagagaagaauggagaaccugaacaagaagguggacgacggcuucaucgacaucuggaccuacaacgccgagcugcuggugcugcuggagaacgagagaacccuggacuuccacgacagcaacgugaagaaccuguacgagaaggugaagagccagcugaagaacaacgccaaggagaucggcaacggcugcuucgaguucuaccacaagugcaacgacgagugcauggagagcgugaagaacggcaccuacgacuaccccaaguacagcgaggagagcaagcugaacagagagaagaucgacggcgugaagcuggagagcaugggcguguaccagauccuggccaucuacagcaccguggccagcagccuggugcugcuggugagccugggcgccaucagcuucuggaugugcagcaacggcagccugcagugcagaaucugcaucuga

SEQ ID NO: 166014 - RNA, 1698 nt, Artificial Sequence
  derived and/or modified CDS sequence (opt4) from hemagglutinin__InfluenzaA__ADN89094
augaaggugaagcugcuggugcugcugugcaccuucaccgccaccuacgccgacaccaucugcaucggcuaccacgccaacaacagcaccgacaccguggacaccgcccuggagaagaacgugaccgugacccacagcgugaaccugcuggagaacagccacaacggcaagcugugccugcugaagggcaucgccccccugcagcugggcaacugcagcguggccggcuggauccugggcaaccccgagugcgagcugcugaucagcaaggagagcuggagcuacaucguggagaagcccaaccccgagaacggcaccugcuaccccggccacuucgccgacuacgaggagcugagagagcagcugagcagcgugagcagcuucgagagauucgagaucuuccccaaggagagcagcuggcccaaccacaccgugaccggcgugagcgccagcugcagccacaacggcgagaacagcuucuacagaaaccugcuguggcugaccggcaagaacggccuguaccccaaccugagcaagagcuacgccaacaacaagggcaaggaggugcuggugcuguggggcgugcaccacccccccaacaucgccgaccagaagacccuguaccacaccgagaacgccuacgugagcguggugagcagccacuacagcagaaaguucacccccgagaucgccaagagacccaaggugagagaccaggagggcagaaucaacuacuacuggacccugcuggagcccggcgacaccaucaucuucgaggccaacggcaaccugaucgcccccagauacgccuucgcccugagcagaggcuucggcagcggcaucaucaacagcaacgcccccauggacaagugcgacgccaagugccagaccccccagggcgccaucaacagcagccugcccuuccagaacgugcaccccgugaccaucggcgagugccccaaguacgugagaagcgccaagcugagaauggugaccggccugagaaacauccccagcauccagagcagaggccuguucggcgccaucgccggcuucaucgagggcggcuggaccggcaugguggacggcugguacggcuaccaccaccagaacgagcagggcagcggcuacgccgccgaccagaagagcacccagaacgccaucaacggcaucaccaacaaggugaacagcgugaucgagaagaugaacacccaguucaccgccgugggcaaggaguucaacaagcuggagagaagaauggagaaccugaacaagaagguggacgacggcuucaucgacaucuggaccuacaacgccgagcugcuggugcugcuggagaacgagagaacccuggacuuccacgacagcaacgugaagaaccuguacgagaaggugaagagccagcugaagaacaacgccaaggagaucggcaacggcugcuucgaguucuaccacaagugcaacgacgagugcauggagagcgugaagaacggcaccuacgacuaccccaaguacagcgaggagagcaagcugaacagagagaagaucgacggcgugaagcuggagagcaugggcguguaccagauccuggccaucuacagcaccguggccagcagccuggugcugcuggugagccugggcgccaucagcuucuggaugugcagcaacggcagccugcagugcagaaucugcaucuga

SEQ ID NO: 166015 - RNA, 1698 nt, Artificial Sequence
  derived and/or modified CDS sequence (opt4) from hemagglutinin__InfluenzaA__ADN89116
augaaggugaagcugcugauccugcugugcaccuucaccgccaccuacgccgacaccaucugcaucggcuaccacgccaacaacagcaccgacaccguggacaccgugcuggagaagaacgugaccgugacccacagcgugaaccugcuggagaacagccacaacggcaagcugugccugcugaagggcaucgccccccugcagcugggcaacugcagcguggccggcuggauccugggcaaccccgagugcgagcugcugaucagcaaggagagcuggagcuacaucguggagaagcccaaccccgagaacggcaccugcuaccccggccacuucgccgacuacgaggagcugagagagcagcugagcagcgugagcagcuucgagagauucgagaucuuccccaaggagagcagcuggcccaaccacaccgugaccggcgugagcgccagcugcagccacaacggcgagagcagcuucuacagaaaccugcuguggcugaccgugaagaacggccuguaccccaaccugagcaagagcuacgccaacaacaaggagaaggaggugcuggugcuguggggcgugcaccacccccccaacaucguggaccagaagacccuguacagaaccgagaacgccuacgugagcguggugagcagccacuacagcagaaaguucacccccgagaucgccaagagacccaaggugagagaccaggagggcagaaucaacuacuacuggacccugcuggagcccggcgacaccaucaucuucgaggccaacggcaaccugaucgcccccagauacgccuucgcccugagcagaggcuucggcagcggcaucaucaacagcaacgcccccauggacaagugcgacgccaagugccagacccccagaggcgccaucaacagcagccugcccuuccagaacgugcaccccgugaccaucggcgagugccccaaguacgugagaagcgccaagcugagaauggugaccggccugagaaacauccccagcauccagagcagaggccuguucggcgccaucgccggcuucaucgagggcggcuggaccggcaugguggacggcugguacggcuaccaccaccagaacgagcagggcagcggcuacgccgccgaccagaagagcacccagaacgccaucaacggcaucaccaacaaggugaacagcgugaucgagaagaugaacacccaguucaccgccgugggcaaggaguucaacaaccuggagagaagaauggagaaccugaacaagaagguggacgacggcuucaucgacaucuggaccuacaacgccgagcugcuggugcugcuggagaacgagagaacccuggacuuccacgacagcaacgugaagaaccuguacgagaaggugaagagccagcugaagaacaacgccaaggagaucggcaacggcugcuucgaguucuaccacaagugcaacgacgagugcauggagagcgugaagaacggcaccuacgacuaccccaaguacagcgaggagagcaagcugaacagagagaagaucgacggcgugaagcuggagagcaugggcguguaccagauccuggccaucuacagcaccguggccagcagccuggugcugcuggugagccugggcgccaucagcuucuggaugugcagcaacggcagccugcagugcagaaucugcaucuga

SEQ ID NO: 166016 - RNA, 1698 nt, Artificial Sequence
  derived and/or modified CDS sequence (opt4) from hemagglutinin__InfluenzaA__ADN89127
augaaggugaagcugcuggugcugcugugcacccugaccgccaccuacgccgacaccaucugcaucggcuaccacgccaacaacagcaccgacaccguggacaccgugcuggagaagaacgugaccgugacccacagcgugaaccugcuggagaacagccacaacggcaagcugugccugcugaagggcaucgccccccugcagcugggcaacugcagcguggccggcuggauccugggcaaccccgagugcgagcugcugaucagcaaggagagcuggagcuacaucguggagaagcccaaccccgagaacggcaccugcuaccccggccacuucgccgacuacgaggagcugagagagcagcugagcagcgugagcagcuucgagagauucgagaucuuccccaagggcagcagcuggcccaaccacaccgugaccggcgugagcgccagcugcagccacaacggcgagaacagcuucuacagaaaccugcuguggcugaccggcaagaacggccuguaccccaaccugagcaagagcuacgccaacaacaaggagaaggaggugcuggugcuguggggcgugcaccacccccccaacaucgccgaccagaagacccuguaccacaccgagaacgccuacgugagcguggugagcagccacuacagcagaaaguucacccccgagaucgccaagagacccaaggugagagaccaggagggcagaaucaacuacuacuggacccugcuggagcccggcgacaccaucaucuucgaggccaacggcaaccugaucgcccccagauacgccuucgcccugagcagaggcuucggcagcggcaucaucaacagcaacgcccccauggacaagugcgacgccaagugccagaccccccagggcgccaucaacagcagccugcccuuccagaacgugcaccccgugaccaucggcgagugccccaaguacgugagaagcgccaagcugagaauggugaccggccugagaaacauccccagcauccagagcagaggccuguucggcgccaucgccggcuucaucgagggcggcuggaccggcaugguggacggcugguacggcuaccaccaccagaacgagcagggcagcggcuacgccgccgaccagaagagcacccagaacgccaucaacggcaucaccaacaaggugaacagcgugaucgagaagaugaacacccaguucaccgccgugggcaaggaguucaacaagcuggagagaagaauggagaaccugaacaagaagguggacgacggcuucaucgacaucuggaccuacaacgccgagcugcuggugcugcuggagaacgagagaacccuggacuuccacgacagcaacgugaagaaccuguacgagaaggugaagagccagcugaagaacaacgccgaggagaucggcaacggcugcuucgaguucuaccacaagugcaacgacgagugcauggagagcgugaagaacggcaccuacgacuaccccaaguacagcgaggagagcaagcugaacagagagaagaucgacggcgugaagcuggagagcaugggcguguaccagauccuggccaucuacagcaccguggccagcagccuggugcugcuggugagccugggcgccaucagcuucuggaugugcagcaacggcagccugcagugcagaaucugcaucuga

SEQ ID NO: 166017 - RNA, 1698 nt, Artificial Sequence
  derived and/or modified CDS sequence (opt4) from hemagglutinin__InfluenzaA__ADN89149
augaaggugaagcugcuggugcugcugugcaccuucaccgccaccuacgccgacaccaucugcaucggcuaccacgccaacaacagcaccgacaccguggacaccgugcuggagaagaacgugaccgugacccacagcgugaaccugcuggagaacagccacaacggcaagcugugccugcugaagggcaucgccccccugcagcugggcaacugcagcguggccggcuggauccugggcaaccccgagugcgagcugcugaucagcaaggagagcuggagcuacaucguggagaagcccaaccccgagaacggcaccugcuaccccggccacuucgccgacuacgaggagcugagagagcagcugagcagcgugagcagcuucgagagauucgagaucuuccccaaggagagcagcuggcccaaccacaccgugaccggcgugagcgccagcugcagccacaacggcgagagcagcuucuacagaaaccugcuguggcugaccgagaagaacggccuguaccccaaccugagcaagagcuacgccaacaacaaggagaaggaggugcuggugcuguggggcgugcaccacccccccagcaucagcgaccagaagacccuguaccacaccgagaacgccuacgugagcguggugagcagccacuacagcagaaaguucacccccgagguggccaagagacccaaggugagagaccaggagggcagaaucaacuacuacuggacccugcuggagcccggcgacaccaucaucuucgaggccaacggcaaccugaucgcccccagauacgccuucgcccugagcagaggcuucggcagcggcaucaucaacagcaacgcccccauggacaagugcgacgccaagugccagaccccccagggcgccaucaacagcagccugcccuuccagaacgugcaccccgugaccaucggcgagugccccaaguacgugagaagcgccaagcugagaauggugaccggccugagaaacauccccagcauccagagcagaggccuguucggcgccaucgccggcuucaucgagggcggcuggaccggcaugguggacggcugguacggcuaccaccaccagaacgagcagggcagcggcuacgccgccgaccagaagagcacccagaacgccaucaacggcaucaccaacaaggugaacagcgugaucgagaagaugaacacccaguucaccgccgugggcaaggaguucaacaagcuggagagaagaauggagaaccugaacaagaagguggacgacggcuucaucgacaucuggaccuacaacgccgagcugcuggugcugcuggagaacgagagaacccuggacuuccacgacagcaacgugaagaaccuguacgagaaggugaagagccagcugaagaacaacgccaaggagaucggcaacggcugcuucgaguucuaccacaagugcaacgacgagugcauggagagcgugaagaacggcaccuacgacuaccccaaguacagcgaggagagcaagcugaacagagagaagaucgacggcgugaagcuggagagcaugggcguguaccagauccuggccaucuacagcaccguggccagcagccuggugcugcuggugagccugggcgccaucagcuucuggaugugcagcaacggcagccugcagugcagaaucugcaucuga

SEQ ID NO: 166018 - RNA, 1698 nt, Artificial Sequence; identical to SEQ ID NO: 165573
  derived and/or modified CDS sequence (opt4) from hemagglutinin__InfluenzaA__ADN89171

SEQ ID NO: 166019 - RNA, 1698 nt, Artificial Sequence
  derived and/or modified CDS sequence (opt4) from hemagglutinin__InfluenzaA__ADN89182
augaaggugaagcugcuggugcugcugugcacccugaccgccaccuacgccgacaccaucugcaucggcuaccacgccaacaacagcaccgacaccguggacaccgugcuggagaagaacgugaccgugacccacagcgugaaccugcuggagaacagccacaacggcaagcugugccugcugaagggcaucgccccccugcagcugggcaacugcagcguggccggcuggauccugggcaaccccgagugcgagcugcugaucagcaaggagagcuggagcuacaucguggagaagcccaaccccgagaacggcaccugcuaccccggccacuucgccgacuacgaggagcugagagagcagcugagcagcgugagcagcuucgagagauucgagaucuuccccaaggagagcagcuggcccaaccacaccgugaccggcgugagcgccagcugcagccacaacggcgagagcagcuucuacagaaaccugcuguggcugaccggcaagaacggccuguaccccaaccugagcaagagcuacgccaacaacaaggagaaggaggugcuggugcuguggggcgugcaccacccccccaacaucguggaccagaagacccuguacagaaccgagaacgccuacgugagcguggugagcagccacuacagcagaaaguucacccccgagaucgccaagagacccaaggugagagaccaggagggcagaaucaacuacuacuggacccugcuggagcccggcgacaccaucaucuucgaggccaacggcaaccugaucgcccccagauacgccuucgcccugagcagaggcuucggcagcggcaucaucaacagcaacgcccccauggacaagugcgacgccaagugccagaccccccagggcgccaucaacagcagccugcccuuccagaacgugcaccccgugaccaucggcgagugccccaaguacgugagaagcgccaagcugagaauggugaccggccugagaaacauccccagcauccagagcagaggccuguucggcgccaucgccggcuucaucgagggcggcuggaccggcaugguggacggcugguacggcuaccaccaccagaacgagcagggcagcggcuacgccgccgaccagaagagcacccagaacgccaucaacggcaucaccaacaaggugaacagcgugaucgagaagaugaacacccaguucaccgccgugggcaaggaguucaacaagcuggagagaagaauggagaaccugaacaagaagguggacgacggcuucaucgacaucuggaccuacaacgccgagcugcuggugcugcuggagaacgagagaacccuggacuuccacgacagcaacgugaagaaccuguacgagaaggugaagagccagcugaagaacaacgccaaggagaucggcaacggcugcuucgaguucuaccacaagugcaacgacgagugcauggagagcgugaagaacggcaccuacgacuaccccaaguacagcgaggagagcaagcugaacagagagaagaucgacggcgugaagcuggagagcaugggcguguaccagauccuggccaucuacagcaccguggccagcagccuggugcugcuggugagccugggcgccaucagcuucuggaugugcagcaacggcagccugcagugcagaaucugcaucuga

SEQ ID NO: 166020 - RNA, 1698 nt, Artificial Sequence; identical to SEQ ID NO: 165573
  derived and/or modified CDS sequence (opt4) from hemagglutinin__InfluenzaA__ADN89193

SEQ ID NO: 166021 - RNA, 1698 nt, Artificial Sequence; identical to SEQ ID NO: 165573
  derived and/or modified CDS sequence (opt4) from hemagglutinin__InfluenzaA__ADN89204

SEQ ID NO: 166022 - RNA, 1698 nt, Artificial Sequence; identical to SEQ ID NO: 166000
  derived and/or modified CDS sequence (opt4) from hemagglutinin__InfluenzaA__ADN89215

SEQ ID NO: 166023 - RNA, 1698 nt, Artificial Sequence
  derived and/or modified CDS sequence (opt4) from hemagglutinin__InfluenzaA__ADN89226
augaaggugaagcugcuggugcugcugugcaccuucgccgccaccuacgccgacaccaucugcaucggcuaccacgccaacaacagcaccgacaccguggacaccgugcuggagaagaacgugaccgugacccacagcgugaaccugcuggagaacagccacaacggcaagcugugccugcugaagggcaucgccccccugcagcugggcaacugcagcguggccggcuggauccugggcaaccccgagugcgagcugcugaucagcaaggagagcuggagcuacaucguggagaagcccaaccccgagaacggcaccugcuaccccggccacuucgccgacuacgaggagcugagagagcagcugagcagcgugagcagcuucgagagauucgagaucuuccccaaggagagcagcuggcccaaccacaccgugaccggcgugagcgccagcugcagccacaacggcgagagcagcuucuacagaaaccugcuguggcugaccgagaagaacggccuguaccccaaccugagcaagagcuacgccaacaacaaggagaaggaggugcuggugcuguggggcgugcaccacccccccagcaucagcgaccagaagacccuguaccacaccgagaacgccuacgugagcguggugagcagccacuacagcagaaaguucacccccgagaucgccaagagacccaaggugagagaccaggagggcagaaucaacuacuacuggacccugcuggagcccggcgacaccaucaucuucgaggccaacggcaaccugaucgcccccagauacgccuucgcccugaacagaggcuucggcagcggcaucaucaacagcaacgcccccauggacaagugcgacgccaagugccagaccccccagggcgccaucaacagcagccugcccuuccagaacgugcaccccgugaccaucggcgagugccccaaguacgugagaagcgccaagcugagaauggugaccggccugagaaacauccccagcgugcagagcagaggccuguucggcgccaucgccggcuucaucgagggcggcuggaccggcaugguggacggcugguacggcuaccaccaccagaacgagcagggcagcggcuacgccgccgaccagaagagcacccagaacgccaucaacggcaucaccaacaaggugaacagcgugaucgagaagaugaacacccaguucaccgccgugggcaaggaguucaacaagcuggagagaagaauggagaaccugaacaagaagguggacgacggcuucaucgacaucuggaccuacaacgccgagcugcuggugcugcuggagaacgagagaacccuggacuuccacgacagcaacgugaagaaccuguacgagaaggugaagaaccagcugaagaacaacgccaaggagaucggcaacggcugcuucgaguucuaccacaagugcaacgacgagugcauggagagcgugaagaacggcaccuacgacuaccccaaguacagcgaggagagcaagcugaacagagagaagaucgacggcgugaagcuggagagcaugggcguguaccagauccuggccaucuacagcaccguggccagcagccuggugcugcuggugagccugggcgccaucagcuucuggaugugcagcaacggcagccugcagugcagaaucugcaucuga

SEQ ID NO: 166024 - RNA, 1698 nt, Artificial Sequence; identical to SEQ ID NO: 166000
  derived and/or modified CDS sequence (opt4) from hemagglutinin__InfluenzaA__ADN89237

SEQ ID NO: 166025 - RNA, 1698 nt, Artificial Sequence
  derived and/or modified CDS sequence (opt4) from hemagglutinin__InfluenzaA__ADN89248
augaaggugaagcugcuggugcugcugugcaccuucaccgccaccuacgccgacaccaucugcaucggcuaccacgccaacaacagcaccgacaccguggacaccgugcuggagaagaacgugaccgugacccacagcgugaaccugcuggagaacagccacaacggcaagcugugccugcugaagggcaucgccccccugcagcugggcaacugcagcaucgccggcuggauccugggcaaccccgagugcgagcugcugaucagcaaggagagcuggagcuacaucguggagaagcccaaccccgagaacggcaccugcuaccccggccacuucgccgacuacgaggagcugagagagcagcugagcagcgugagcagcuucgagagauucgagaucuuccccaaggagagcagcuggcccaaccacaccgugaccggcgugagcgccagcugcagccacaacggcgagagcagcuucuacagaaaccugcuguggcugaccggcaagaacggccuguaccccaaccugagcaagagcuacgccaacaacaaggagaaggaggugcuggugcuguggggcgugcaccacccccccagcaucagcgaccagaagacccuguaccacaccgagaacgccuacgugagcguggugagcagccacuacagcagaaaguucacccccgagaucgccaagagacccaaggugagagaccaggagggcagaaucaacuacuacuggacccugcuggagcccggcgacaccaucaucuucgaggccaacggcaaccugaucgcccccagauacgccuucgcccugagcagaggcuucggcagcggcaucaucaacagcaacgcccccauggacaagugcgacgccaagugccagaccccccagggcgccaucaacagcagccugcccuuccagaacgugcaccccgugaccaucggcgagugccccaaguacgugagaagcgccaagcugagaauggugaccggccugagaaacauccccagcauccagagcagaggccuguucggcgccaucgccggcuucaucgagggcggcuggaccggcaugguggacggcugguacggcuaccaccaccagaacgagcagggcagcggcuacgccgccgaccagaagagcacccagaacgccaucaacggcaucaccaacaaggugaacagcgugaucgagaagaugaacacccaguucaccgccgugggcaaggaguucaacaagcuggagagaagaauggagaaccugaacaagaagguggacgacggcuucaucgacaucuggaccuacaacgccgagcugcuggugcugcuggagaacgagagaacccuggacuuccacgacagcaacgugaagaaccuguacgagaaggugaagagccagcugaagaacaacgccaaggagaucggcaacggcugcuucgaguucuaccacaagugcaacgacgagugcauggagagcgugaagaacggcaccuacgacuaccccaaguacagcgaggagagcaagcugaacagagagaagaucgacggcgugaagcuggagagcaugggcguguaccagauccuggccaucuacagcaccguggccagcagccuggugcugcuggugagccugggcgccaucagcuucuggaugugcagcaacggcagccugcagugcagaaucugcaucuga

SEQ ID NO: 166026 - RNA, 1698 nt, Artificial Sequence; identical to SEQ ID NO: 166013
  derived and/or modified CDS sequence (opt4) from hemagglutinin__InfluenzaA__ADN89259

SEQ ID NO: 166027 - RNA, 1698 nt, Artificial Sequence
  derived and/or modified CDS sequence (opt4) from hemagglutinin__InfluenzaA__ADN89281
augaaggugaagcugcuggugcugcugugcaccuucaccgccaccuacgccgacaccaucugcaucggcuaccacgccaacaacagcaccgacaccguggacaccgugcuggagaagaacgugaccgugacccacagcgugaaccugcuggagaacagccacaacggcaagcugugccugcugaagggcaucgccccccugcagcugggcaacugcagcguggccggcuggauccugggcaaccccgagugcgagcugcugaucagcaaggagagcuggagcuacaucguggagaagcccaaccccgagaacggcaccugcuaccccggccacuucgccgacuacgaggagcugagagagcagcugagcagcgugagcagcuucgagagauucgagaucuuccccaaggagagcagcuggcccaaccacaccgugaccggcgugagcgccagcugcagccacaacggcgagagcagcuucuacagaaaccugcuguggcugaccgagaagaacggccuguaccccaaccugagcaagagcuacgccaacaacaaggagaaggaggugcuggugcuguggggcgugcaccacccccccagcaucagcgaccagaagacccuguaccacaccgagaacgccuacgugagcguggugagcagccacuacagcagaaaguucacccccgagaucgccaagagacccaaggugagagaccaggagggcagaaucaacuacuacuggacccugcuggagcccggcgacaccaucaucuucgaggccaacggcaaccugaucgcccccagauacgccuucgcccugagcagaggcuucggcagcggcaucaucaacagcaacgcccccauggacaagugcgacgccaagugccagaccccccagggcgccaucaacagcagccugcccuuccagaacgugcaccccgugaccaucggcgagugccccaaguacgugagaagcgccaagcugagaauggugaccggccugagaaacauccccagcauccagagcagaggccuguucggcgccaucgccggcuucaucgagggcggcuggaccggcaugguggacggcugguacggcuaccaccaccagaacgagcagggcagcggcuacgccgccgaccagaagagcacccagaacgccaucaacggcaucaccaacaaggugaacagcgugaucgagaagaugaacacccaguucaccgccgugggcaaggaguucaacaagcuggagagaagaauggagaaccugaacaagaagguggacgacggcuucaucgacaucuggaccuacaacgccgagcugcuggugcugcuggagaacgagagaacccuggacuuccacgacagcaacgugaagaaccuguacgagaaggugaagaaccagcugaagaacaacgccaaggagaucggcaacggcugcuucgaguucuaccacaagugcaacgacgagugcauggagagcgugaagaacggcaccuacgacuaccccaaguacagcgaggagagcaagcugaacagagagaagaucgacggcgugaagcuggagagcaugggcguguaccagauccuggccaucuacagcaccguggccagcagccuggugcugcuggugagccugggcgccaucagcuucuggaugugcagcaacggcagccugcagugcagaaucugcaucuga

SEQ ID NO: 166028 - RNA, 1698 nt, Artificial Sequence; identical to SEQ ID NO: 166027
  derived and/or modified CDS sequence (opt4) from hemagglutinin__InfluenzaA__ADN89292

SEQ ID NO: 166029 - RNA, 1698 nt, Artificial Sequence; identical to SEQ ID NO: 166027
  derived and/or modified CDS sequence (opt4) from hemagglutinin__InfluenzaA__ADN89303

SEQ ID NO: 166030 - RNA, 1698 nt, Artificial Sequence; identical to SEQ ID NO: 163686
  derived and/or modified CDS sequence (opt4) from hemagglutinin__InfluenzaA__ADN89314

SEQ ID NO: 166031 - RNA, 1698 nt, Artificial Sequence; identical to SEQ ID NO: 163191
  derived and/or modified CDS sequence (opt4) from hemagglutinin__InfluenzaA__ADN89325

SEQ ID NO: 166032 - RNA, 1698 nt, Artificial Sequence
  derived and/or modified CDS sequence (opt4) from hemagglutinin__InfluenzaA__ADN89336
augaaggugaagcugcuggugcugcugugcaccuucaccgccaccuacgccgacaccaucugcaucggcuaccacgccaacaacagcaccgacaccguggacaccgugcuggagaagaacgugaccgugacccacagcgugaaccugcuggagaacagccacaacggcaagcugugccugcugaagggcaucgccccccugcagcugggcaacugcagcguggccggcuggauccugggcaaccccgagugcgagcugcugaucagcaaggagagcuggagcuacaucguggagaagcccaaccccgagaacggcaccugcuaccccggccacuucgccgacuacgaggagcugagagagcagcugagcagcgugagcagcuucgagagauucgagaucuuccccaaggagagcagcuggcccaaccacaccgugaccggcgugagcgccagcugcagccacaacggcgagagaagcuucuacagaaaccugcuguggcugaccggcaagaacggccuguaccccaaccugagcaagagcuacgccaacaacaaggagaaggaggugcuggugcuguggggcgugcaccacccccccgacaucggcgaccagaagacccuguaccacaccgagaacgccuacgugagcguggugagcagccacuacagcagaaaguucacccccgagaucgccaagagacccaaggugagagaccaggagggcagaaucaacuacuacuggacccugcuggagcccggcgacaccaucaucuucgaggccaacggcaaccugaucgcccccagauacgccuucgcccugagcagaggcuucggcagcggcaucaucaacagcaacgcccccauggacaagugcgacgccaagugccagaccccccagggcgccaucaacagcagccugcccuuccagaacgugcaccccgugaccaucggcgagugccccaaguacgugagaagcgccaagcugagaauggugaccggccugagaaacauccccagcauccagagcagaggccuguucggcgccaucgccggcuucaucgagggcggcuggaccggcaugguggacggcugguacggcuaccaccaccagaacgagcagggcagcggcuacgccgccgaccagaagagcacccagaacgccaucaacggcaucaccaacaaggugaacagcgugaucgagaagaugaacacccaguucaccgccgugggcaaggaguucaacaagcuggagagaagaauggagaaccugaacaagaagguggacgacggcuucaucgacaucuggaccuacaacgccgagcugcuggugcugcuggagaacgagagaacccuggacuuccacgacagcaacgugaagaaccuguacgagaaggugaagagccagcugaagaacaacgccaaggagaucggcaacggcugcuucgaguucuaccacaagugcaacgacgagugcauggagagcgugaagaacggcaccuacgacuaccccaaguacagcgaggagagcaagcugaacagagagaagaucgacggcgugaagcuggagagcaugggcguguaccagauccuggccaucuacagcaccguggccagcagccuggugcugcuggugagccugggcgccaucagcuucuggaugugcagcaacggcagccugcagugcagaaucugcaucuga

SEQ ID NO: 166033 - RNA, 1698 nt, Artificial Sequence; identical to SEQ ID NO: 166023
  derived and/or modified CDS sequence (opt4) from hemagglutinin__InfluenzaA__ADN89347

SEQ ID NO: 166034 - RNA, 1698 nt, Artificial Sequence; identical to SEQ ID NO: 163191
  derived and/or modified CDS sequence (opt4) from hemagglutinin__InfluenzaA__ADN89358

SEQ ID NO: 166035 - RNA, 1698 nt, Artificial Sequence
  derived and/or modified CDS sequence (opt4) from hemagglutinin__InfluenzaA__ADN89369
augaaggugaagcugcuggugcugcugugcaccuucaccgccaccuacgccgacaccaucugcaucggcuaccacgccaacaacagcaccgacaccguggacaccgugcuggagaagaacgugaccgugacccacagcgugaaccugcuggagaacagccacaacggcaagcugugccugcugaagggcaucgccccccugcagcugggcaacugcagcguggccggcuggauccugggcaaccccgagugcgagcugcugaucagcaaggagagcuggagcuacaucguggagaagcccaaccccgagaacggcaccugcuaccccggccacuucgccgacuacgaggagcugagagagcagcugagcagcgugagcagcuucgagagauucgagaucuuccccaaggagagcagcuggcccaaccacaccgugaccggcgugagcgccagcugcagccacaacggcgagagcagcuucuacagaaaccugcuguggcugaccgugaagaacggccuguaccccaaccugagcaagagcuacgccaacaacaaggagaaggaggugcuggugcuguggggcgugcaccacccccccaacaucguggaccagaagacccuguacagaaccgagaacgccuacgugagcguggugagcagccacuacagcagaaaguucauccccgagaucgccaagagacccaaggugagagaccaggagggcagaaucaacuacuacuggacccugcuggagcccggcgacaccaucaucuucgaggccaacggcaaccugaucgcccccagauacgccuucgcccugagcagaggcuucggcagcggcaucaucaacagcaacgcccccauggacaagugcgacgccaagugccagacccccagaggcgccaucaacagcagccugcccuuccagaacgugcaccccgugaccaucggcgagugccccaaguacgugagaagcgccaagcugagaauggugaccggccugagaaacauccccagcauccagagcagaggccuguucggcgccaucgccggcuucaucgagggcggcuggaccggcaugguggacggcugguacggcuaccaccaccagaacgagcagggcagcggcuacgccgccgaccagaagagcacccagaacgccaucaacggcaucaccaacaaggugaacagcgugaucgagaagaugaacacccaguucaccgccgugggcaaggaguucaacaagcuggagagaagaauggagaaccugaacaagaagguggacgacggcuucaucgacaucuggaccuacaacgccgagcugcuggugcugcuggagaacgagagaacccuggacuuccacgacagcaacgugaagaaccuguacgagaaggugaagagccagcugaagaacaacgccaaggagaucggcaacggcugcuucgaguucuaccacaagugcaacgacgagugcauggagagcgugaagaacggcaccuacgacuaccccaaguacagcgaggagagcaagcugaacagagagaagaucgacggcgugaagcuggagagcaugggcguguaccagauccuggccaucuacagcaccguggccagcagccuggugcugcuggugagccugggcgccaucagcuucuggaugugcagcaacggcagccugcagugcagaaucugcaucuga

SEQ ID NO: 166036 - RNA, 1698 nt, Artificial Sequence
  derived and/or modified CDS sequence (opt4) from hemagglutinin__InfluenzaA__ADN89380
augaaggugaagcugcuggugcugcugugcacccugaccgccaccuacgccgacaccaucugcaucggcuaccacgccaacaacagcaccgacaccguggacaccgugcuggagaagaacgugaccgugacccacagcgugaaccugcuggagaacagccacaacggcaagcugugccugcugaagggcaucgccccccugcagcugggcaacugcagcguggccggcuggauccugggcaaccccgagugcgagcugcugaucagcaaggagagcuggagcuacaucguggagaagcccaaccccgagaacggcaccugcuaccccggccacuucgccgacuacgaggagcugagagagcagcugagcagcgugagcagcuucgagagauucgagaucuuccccaaggagagcagcuggcccaaccacaccgugaccggcgugagcgccagcugcagccacaacggcgagagcagcuucuacagaaaccugcuguggcugaccggcaagaacggccuguaccccaaccugagcaagagcuacgccaacaacaaggagaaggaggugcuggugcuguggggcgugcaccacccccccaacaucguggaccagaagacccuguacagaaccgagaacgccuacgugagcguggugagcagccacuacagcagaaaguucacccccgagaucgccaagagacccaaggugagagaccaggagggcagaaucaacuacuacuggacccugcuggagcccggcgacaccaucaucuucgaggccaacggcaaccugaucgcccccagauacgccuucgcccugagcagaggcuucggcagcggcaucaucaacagcaacgcccccauggacaagugcgacgccaagugccagaccccccagggcgccaucaacagcagccugcccuuccagaacgugcaccccgugaccaucggcgagugccccaaguacgugagaagcgccaagcugagaauggugaccggccugagaaacauccccagcauccagagcagaggccuguucggcgccaucgccggcuucaucgagggcggcuggaccggcaugguggacggcugguacggcuaccaccaccagaacgagcagggcagcggcuacgccgccgaccagaagagcacccagaacgccaucaacggcaucaccaacaaggugaacagcgugaucgagaagaugaacacccaguucaccgccgugggcaaggaguucaacaagcuggagagaagaauggagaaccugaacaagaagguggacgacggcuucaucgacaucuggaccuacaacgccgagcugcuggugcugcuggagaacgagagaacccuggacuuccacgacagcaacgugaagaaccuguacgagaaggugaagagccagcugaagaacaacgccaaggagaucggcaacggcugcuucgaguucuaccacaagugcaacaacgagugcauggagagcgugaagaacggcaccuacgacuaccccaaguacagcgaggagagcaagcugaacagagagaagaucgacggcgugaagcuggagagcaugggcguguaccagauccuggccaucuacagcaccguggccagcagccuggugcugcuggugagccugggcgccaucagcuucuggaugugcagcaacggcagccugcagugcagaaucugcaucuga

SEQ ID NO: 166037 - RNA, 1698 nt, Artificial Sequence
  derived and/or modified CDS sequence (opt4) from hemagglutinin__InfluenzaA__ADN89391
augaaggugaagcugcuggugcugcugugcaccuucaccgccaccuacgccgacaccaucugcaucggcuaccacgccaacaacagcaccgacaccguggacaccgugcuggagaagaacgugaccgugacccacagcgugaaccugcuggagaacagccacaacggcaagcugugccugcugaagggcaucgccccccugcagcugggcaacugcagcguggccggcuggauccugggcaaccccgagugcgagcugcugaucagcaaggagagcuggagcuacaucguggagaagcccaaccccgagaacggcaccugcuaccccggccacuucgccgacuacgaggagcugagagagcagcugagcagcgugagcagcuucgagagauucgagaucuuccccaaggagagcagcuggcccaaccacaccgugaccggcgugagcgccagcugcagccacaacggcgagagaagcuucuacaagaaccugcuguggcugaccggcaagaacggccuguaccccaaccugagcaagagcuacgccaacaacaaggagaaggaggugcuggugcuguggggcgugcaccacccccccgacaucggcgaccagaagacccuguaccacaccgagaacgccuacgugagcguggugagcagccacuacagcagaaaguucacccccgagaucgccaagagacccaaggugagagaccaggagggcagaaucaacuacuacuggacccugcuggagcccggcgacaccaucaucuucgaggccaacggcaaccugaucgcccccagauacgccuucgcccugagcagaggcuucggcagcggcaucaucaacagcaacgcccccauggacaagugcgacgccaagugccagaccccccagggcgccaucaacagcagccugcccuuccagaacgugcaccccgugaccaucggcgagugccccaaguacgugagaagcgccaagcugagaauggugaccggccugagaaacauccccagcauccagagcagaggccuguucggcgccaucgccggcuucaucgagggcggcuggaccggcaugguggacggcugguacggcuaccaccaccagaacgagcagggcagcggcuacgccgccgaccagaagagcacccagaacgccaucaacggcaucaccaacaaggugaacagcgugaucgagaagaugaacacccaguucaccgccgugggcaaggaguucaacaagcuggagagaagaauggagaaccugaacaagaagguggacgacggcuucaucgacaucuggaccuacaacgccgagcugcuggugcugcuggagaacgagagaacccuggacuuccacgacagcaacgugaagaaccuguacgagaaggugaagagccagcugaagaacaacgccaaggagaucggcaacggcugcuucgaguucuaccacaagugcaacgacgagugcauggagagcgugaagaacggcaccuacgacuaccccaaguacagcgaggagagcaagcugaacagagagaagaucgacggcgugaagcuggagagcaugggcguguaccagauccuggccaucuacagcaccguggccagcagccuggugcugcuggugagccugggcgccaucagcuucuggaugugcagcaacggcagccugcagugcagaaucugcaucuga

SEQ ID NO: 166038 - RNA, 1698 nt, Artificial Sequence
  derived and/or modified CDS sequence (opt4) from hemagglutinin__InfluenzaA__ADN89402
augaaggugaagcugcuggugcugcugugcaccuucaccgccaccuacgccgacaccaucugcaucggcuaccacgccaacaacagcaccgacaccguggacaccgugcuggagaagaacgugaccgugacccacagcgugaaccugcuggagaacagccacaacggcaagcugugccugcugaagggcaucgccccccugcagcugggcaacugcagcguggccggcuggauccugggcaaccccgagugcgagcugcugaucagcaagaagagcuggagcuacaucguggagaagcccaaccccgagaacggcaccugcuaccccggccacuucgccgacuacgaggagcugaaggagcagcugagcagcgugagcagcuucgagagauucgagaucuuccccaaggagagcagcuggcccaaccacaccgugaccggcgugagcgccagcugcagccacaacggcgagagcagcuucuacagaaaccugcuguggcugaccggcaagaacggccuguaccccaaccugagcaagagcuacgccaacaacaaggagaaggaggugcuggugcuguggggcgugcaccacccccccaacaucguggaccagaagacccuguacagaaccgagaacgccuacgugagcguggugagcagccacuacagcagaaaguucacccccgagaucgccaagagacccaaggugagagaccaggagggcagaaucaacuacuacuggacccugcuggagcccggcgacaccaucaucuucgaggccaacggcaaccugaucgcccccagauacgccuucgcccugagcagaggcuucggcagcggcaucaucaacagcaacgcccccaugggcaagugcgacgccaagugccagaccccccagggcgccaucaacagcagccugcccuuccagaacgugcaccccgugaccaucggcgagugccccaaguacgugagaagcgccaagcugagaauggugaccggccugagaaacauccccagcauccagagcagaggccuguucggcgccaucgccggcuucaucgagggcggcuggaccggcaugguggacggcugguacggcuaccaccaccagaacgagcagggcagcggcuacgccgccgaccagaagagcacccagaacgccaucaacggcaucaccaacaaggugaacagcgugaucgagaagaugaacacccaguucaccgccgugggcaaggaguucaacaagcuggagagaagaauggagaaccugaacaagaagguggacgacggcuucaucgacaucuggaccuacaacgccgagcugcuggugcugcuggagaacgagagaacccuggacuuccacgacagcaacgugaagaaccuguacgagaaggugaagagccagcugaagaacaacgccaaggagaucggcaacggcugcuucgaguucuaccacaagugcaacgacgagugcauggagagcgugaagaacggcaccuacgacuaccccaaguacagcgaggagagcaagcugaacagagagaagaucgacggcgugaagcuggagagcaugggcguguaccagauccuggccaucuacagcaccguggccagcagccuggugcugcuggugagccugggcgccaucagcuucuggaugugcagcaacggcagccugcagugcagaaucugcaucuga

SEQ ID NO: 166039 - RNA, 1698 nt, Artificial Sequence; identical to SEQ ID NO: 166000
  derived and/or modified CDS sequence (opt4) from hemagglutinin__InfluenzaA__ADN89413

SEQ ID NO: 166040 - RNA, 1698 nt, Artificial Sequence; identical to SEQ ID NO: 165573
  derived and/or modified CDS sequence (opt4) from hemagglutinin__InfluenzaA__ADN89424

SEQ ID NO: 166041 - RNA, 1698 nt, Artificial Sequence
  derived and/or modified CDS sequence (opt4) from hemagglutinin__InfluenzaA__ADN89435
augaaggugaagcugcuggugcugcugugcaccuucaccgccaccuacgccgacaccaucugcaucggcuaccacgccaacaacagcaccgacaccguggacaccgugcuggagaagaacgugaccgugacccacagcgugaaccugcuggagaacagccacaacggcaagcugugccugcugaagggcaucgccccccugcagcugggcaacugcagcguggccggcuggauccugggcaaccccgagugcgagcugcugaucagcaaggagagcuggagcuacaucguggagaagcccaaccccgagaacggcaccugcuaccccggccacuucgccgacuacgaggagcugagagagcagcugagcagcgugagcagcuucgagagauucgagaucuuccccaaggagagcagcuggcccaaccacaccgugaccggcgugagcgccagcugcagccacaacggcgagaacagcuucuacagaaaccugcuguggcugaccggcaagaacggccuguaccccaaccugagcaagagcuacgccaacaacaaggagaaggaggugcuggugcuguggggcgugcaccacccccccaacaucgccgaccagaagacccuguaccacaccgagaacgccuacgugagcguggugagcagccacuacagcagaaaguucacccccgagaucgccaagagacccaaggugagagaccaggagggcagaaucaacuacuacuggacccugcuggagcccggcgacaccaucaucuucgaggccaacggcaaccugaucgcccccagauacgccuucgcccugagcagaggcuucggcagcggcaucaucaacagcaacgcccccauggacaagugcgacgccaagugccagaccccccagggcgccaucaacagcagccugcccuuccagaacgugcaccccgugaccaucggcgagugccccaaguacgugagaagcgccaagcugagaauggugaccggccugagaaacauccccagcauccagagcagaggccuguucggcgccaucgccggcuucaucgagggcggcuggaccggcaugguggacggcugguacggcuaccaccaccagaacgagcagggcagcggcuacgccgccgaccagaagagcacccagaacgccaucaacggcaucaccaacaaggugaacagcgugaucgagaagaugaacacccaguucaccgccgugggcaaggaguucaacaagcuggagagaagaauggagaaccugaacaagaagguggacgacggcuucaucgacaucuggaccuacaacgccgagcugcuggugcugcuggagaacgagagaacccuggacuuccacgacagcaacgugaagaaccuguacgagaaggugaagagccagcugaagaacaacgccaaggagaucggcaacggcugcuucgaguucuaccacaagugcaacgacgagugcauggagagcgugaagaacggcaccuacgacuaccccaaguacagcgaggagagcagacugaacagagagaagaucgacggcgugaagcuggagagcaugggcguguaccagauccuggccaucuacagcaccguggccagcagccuggugcugcuggugagccugggcgccaucagcuucuggaugugcagcaacggcagccugcagugcagaaucugcaucuga

SEQ ID NO: 166042 - RNA, 1698 nt, Artificial Sequence
  derived and/or modified CDS sequence (opt4) from hemagglutinin__InfluenzaA__ADN89446
augaaggccaagcugcuggugcugcugugcaccuucaccgccaccuacgccgacaccaucugcaucggcuaccacgccaacaacagcaccgacaccguggacaccgugcuggagaagaacgugaccgugacccacagcgugaaccugcuggagaacagccacaacggcaagcugugccugcugaagggcaucgccccccugcagcugggcaacugcagcguggccggcuggauccugggcaaccccgagugcgagcugcugaucagcaaggagagcuggagcuacaucguggagaagcccaaccccgagaacggcaccugcuaccccggccacuucgccgacuacgaggagcugagagagcagcugagcagcgugagcagcuucgagagauucgagaucuuccccaaggagagcagcuggcccaaccacaccgugaccggcgugagcgccagcugcagccacaacggcgagaacagcuucuacagaaaccugcuguggcugaccggcaagaacggccuguaccccaaccugagcaagagcuacgccaacaacaaggagaaggaggugcuggugcuguggggcgugcaccacccccccaacaucgccgaccagaagacccuguaccacaccgagaacgccuacgugagcguggugagcagccacuacagcagaaaguucacccccgagaucgccaagagacccaaggugagagaccaggagggcagaaucaacuacuacuggacccugcuggagcccggcgacaccaucaucuucgaggccaacggcaaccugaucgcccccagauacgccuucgcccugagcagaggcuucggcagcggcaucaucaacagcaacgcccccauggacaagugcgacgccaagugccagaccccccagggcgccaucaacagcagccugcccuuccagaacgugcaccccgugaccaucggcgagugccccaaguacgugagaagcgccaagcugagaauggugaccggccugagaaacauccccagcauccagagcagaggccuguucggcgccaucgccggcuucaucgagggcggcuggaccggcaugguggacggcugguacggcuaccaccaccagaacgagcagggcagcggcuacgccgccgaccagaagagcacccagaacgccaucaacggcaucaccaacaaggugaacagcgugaucgagaagaugaacacccaguucaccgccgugggcaaggaguucaacaagcuggagagaagaauggagaaccugaacaagaagguggacgacggcuucaucgacaucuggaccuacaacgccgagcugcuggugcugcuggagaacgagagaacccuggacuuccacgacagcaacgugaagaaccuguacgagaaggugaagagccagcugaagaacaacgccaaggagaucggcaacggcugcuucgaguucuaccacaagugcaacgacgagugcauggagagcgugaagaacggcaccuacgacuaccccaaguacagcgaggagagcaagcugaacagagagaagaucgacggcgugaagcuggagagcaugggcguguaccagauccuggccaucuacagcaccguggccagcagccuggugcugcuggugagccugggcgccaucagcuucuggaugugcagcaacggcagccugcagugcagaaucugcaucuga

SEQ ID NO: 166043 - RNA, 1698 nt, Artificial Sequence; identical to SEQ ID NO: 165573
  derived and/or modified CDS sequence (opt4) from hemagglutinin__InfluenzaA__ADN89457

SEQ ID NO: 166044 - RNA, 1698 nt, Artificial Sequence
  derived and/or modified CDS sequence (opt4) from hemagglutinin__InfluenzaA__ADN89468
augaaggugaagcugcuggugcugcugugcaccuucaccgccaccuacgccgacaccaucugcaucggcuaccacgccaacaacagcaccgacaccguggacaccgugcuggagaagaacgugaccgugacccacagcgugaaccugcuggagaacagccacaacggcaagcugugccugcugaagggcaucgccccccugcagcugggcaacugcagcguggccggcuggauccugggcaaccccgagugcgagcugcugaucagcaaggagagcuggagcuacaucguggagaagcccaaccccgagaacggcaccugcuaccccggccacuucgccgacuacgaggagcugagagagcagcugagcagcgugagcagcuucgagagauucgagaucuuccccaaggacagcagcuggcccaaccacaccgugaccggcgugagcgccagcugcagccacaacggcgagagcagcuucuacagaaaccugcuguggcugaccggcaagaacggccuguaccccaaccugagcaagagcuacgccaacaacaaggagaaggaggugcuggugcuguggggcgugcaccacccccccagcaucaacgaccagaagacccuguaccacaccgagaacgccuacgugagcguggugagcagccacuacagcagaaaguucacccccgagaucgccaagagacccaaggugagagaccaggagggcagaaucaacuacuacuggacccugcuggagcccggcgacaccaucaucuucgaggccaacggcaaccugaucgcccccagauacgccuucgcccugagcagaggcuucggcagcggcaucaucaacagcaacgcccccauggacaagugcgacgccaagugccagaccccccagggcgccaucaacagcagccugcccuuccagaacgugcaccccgugaccaucggcgagugccccaaguacgugagaagcgccaagcugagaauggugaccggccugagaaacauccccagcauccagagcagaggccuguucggcgccaucgccggcuucaucgagggcggcuggaccggcaugguggacggcugguacggcuaccaccaccagaacgagcagggcagcggcuacgccgccgaccagaagagcacccagaacgccaucaacggcaucaccaacaaggugaacagcgugaucgagaagaugaacacccaguucaccgccgugggcaaggaguucagcaagcuggagagaagaauggagaaccugaacaagaagguggacgacggcuucaucgacaucuggaccuacaacgccgagcugcuggugcugcuggagaacgagagaacccuggacuuccacgacagcaacgugaagaaccuguacgagaaggugaagagccagcugaagaacaacgccaaggagaucggcaacggcugcuucgaguucuaccacaagugcaacgacgagugcauggagagcgugaagaacggcaccuacgacuaccccaaguacagcgaggagagcaagcugaacagagagaagaucgacggcgugaagcuggagagcaugggcguguaccagauccugaccaucuacagcaccguggccagcagccuggugcugcugaucagccugggcgccaucagcuucuggaugugcagcaacggcagccugcagugcagaaucugcaucuga

SEQ ID NO: 166045 - RNA, 1698 nt, Artificial Sequence; identical to SEQ ID NO: 166002
  derived and/or modified CDS sequence (opt4) from hemagglutinin__InfluenzaA__ADN89479

SEQ ID NO: 166046 - RNA, 1698 nt, Artificial Sequence; identical to SEQ ID NO: 166002
  derived and/or modified CDS sequence (opt4) from hemagglutinin__InfluenzaA__ADN89490

SEQ ID NO: 166047 - RNA, 1698 nt, Artificial Sequence; identical to SEQ ID NO: 166025
  derived and/or modified CDS sequence (opt4) from hemagglutinin__InfluenzaA__ADN89501

SEQ ID NO: 166048 - RNA, 1698 nt, Artificial Sequence; identical to SEQ ID NO: 166013
  derived and/or modified CDS sequence (opt4) from hemagglutinin__InfluenzaA__ADN89512

SEQ ID NO: 166049 - RNA, 1698 nt, Artificial Sequence; identical to SEQ ID NO: 166027
  derived and/or modified CDS sequence (opt4) from hemagglutinin__InfluenzaA__ADN89523

SEQ ID NO: 166050 - RNA, 1698 nt, Artificial Sequence; identical to SEQ ID NO: 166036
  derived and/or modified CDS sequence (opt4) from hemagglutinin__InfluenzaA__ADN89534

SEQ ID NO: 166051 - RNA, 1698 nt, Artificial Sequence; identical to SEQ ID NO: 166041
  derived and/or modified CDS sequence (opt4) from hemagglutinin__InfluenzaA__ADN89545

SEQ ID NO: 166052 - RNA, 1698 nt, Artificial Sequence; identical to SEQ ID NO: 163686
  derived and/or modified CDS sequence (opt4) from hemagglutinin__InfluenzaA__ADN89556

SEQ ID NO: 166053 - RNA, 1698 nt, Artificial Sequence; identical to SEQ ID NO: 166002
  derived and/or modified CDS sequence (opt4) from hemagglutinin__InfluenzaA__ADN89567

SEQ ID NO: 166054 - RNA, 1698 nt, Artificial Sequence
  derived and/or modified CDS sequence (opt4) from hemagglutinin__InfluenzaA__ADN89578
augaaggugaagcugcuggugcugcugugcacccugaccgccaccuacgccgacaccaucugcaucggcuaccacgccaacaacagcaccgacaccguggacaccgugcuggagaagaacgugaccgugacccacagcgugaaccugcuggagaacagccacaacggcaagcugugccugcugaagggcaucgccccccugcagcugggcaacugcagcguggccggcuggauccugggcaaccccgagugcgagcugcugaucagcaaggagagcuggagcuacaucguggagaagcccaaccccgagaacggcaccugcuaccccggccacuucgccgacuacgaggagcugagagagcagcugagcagcgugagcagcuucgagagauucgagaucuuccccaagggcagcagcuggcccaaccacaccgugaccggcgugagcgccagcugcagccacaacggcgagaacagcuucuacagaaaccugcuguggcugaccggcaagaacggccuguaccccaaccugagcaagagcuacgccaacaacaaggagaaggaggugcugcugcuguggggcgugcaccacccccccaacaucgccgaccagaagacccuguaccacaccgagaacgccuacgugagcguggugagcagccacuacagcagaaaguucacccccgagaucgccaagagacccaaggugagagaccaggagggcagaaucaacuacuacuggacccugcuggagcccggcgacaccaucaucuucgaggccaacggcaaccugaucgcccccagauacgccuucgcccugagcagaggcuucggcagcggcaucaucaacagcaacgcccccauggacaagugcgacgccaagugccagaccccccagggcgccaucaacagcagccugcccuuccagaacgugcaccccgugaccaucggcgagugccccaaguacgugagaagcgccaagcugagaauggugaccggccugagaaacauccccagcauccagagcagaggccuguucggcgccaucgccggcuucaucgagggcggcuggaccggcaugguggacggcugguacggcuaccaccaccagaacgagcagggcagcggcuacgccgccgaccagaagagcacccagaacgccaucaacggcaucaccaacaaggugaacagcgugaucgagaagaugaacacccaguucaccgccgugggcaaggaguucaacaagcuggagagaagaauggagaaccugaacaagaagguggacgacggcuucaucgacaucuggaccuacaacgccgagcugcuggugcugcuggagaacgagagaacccuggacuuccacgacagcaacgugaagaaccuguacgagaaggugaagagccagcugaagaacaacgccaaggagaucggcaacggcugcuucgaguucuaccacaagugcaacgacgagugcauggagagcgugaagaacggcaccuacgacuaccccaaguacagcgaggagagcaagcugaacagagagaagaucgacggcgugaagcuggagagcaugggcguguaccagauccuggccaucuacagcaccguggccagcagccuggugcugcuggugagccugggcgccaucagcuucuggaugugcagcaacggcagccugcagugcagaaucugcaucuga

SEQ ID NO: 166055 - RNA, 1698 nt, Artificial Sequence; identical to SEQ ID NO: 165573
  derived and/or modified CDS sequence (opt4) from hemagglutinin__InfluenzaA__ADN89589

SEQ ID NO: 166056 - RNA, 1698 nt, Artificial Sequence
  derived and/or modified CDS sequence (opt4) from hemagglutinin__InfluenzaA__ADN89600
augaaggugaagcugcuggugcugcugugcaccuucaccgccaccuacgccgacaccaucugcaucggcuaccacgccaacaacagcaccgacaccguggacaccgugcuggagaagaacgugaccgugacccacagcgugaaccugcuggagaacagccacaacggcaagcugugccugcugaagggcaucgccccccugcagcugggcaacugcagcguggccggcuggauccugggcaaccccgagugcgagcugcugaucagcaaggagagcuggagcuacaucguggagaagcccaaccccgagaacggcaccugcuaccccggccacuucgccgacuacgaggagcugagagagcagcugagcagcgugagcagcuucgagagauucgagaucuuccccaaggagagcagcuggcccaaccacaccgugaccggcgugagcgccagcugcagccacaacggcgagagcagcuucuacagaaaccugcuguggcugaccagaaagaacggccuguaccccaaccugagcaagagcuacgccaacaacaaggagaaggaggugcuggugcuguggggcgugcaccacccccccaacaugguggaccagaagacccuguacagaaccgagaacgccuacgugagcguggugagcagccacuacagcagaaaguucacccccgagaucgccaagagacccaaggugagagaccaggagggcagaaucaacuacuacuggacccugcuggagcccggcgacaccaucaucuucgaggccaacggcaaccugaucgcccccagauacgccuucgcccugagcagaggcuucggcagcggcaucaucaacagcaacgcccccaugggcaagugcgacgccaagugccagaccccccagggcgccaucaacagcagccugcccuuccagaacgugcaccccgugaccaucggcgagugccccaaguacgugagaagcgccaagcugagaauggugaccggccugagaaacauccccagcauccagagcagaggccuguucggcgccaucgccggcuucaucgagggcggcuggaccggcaugguggacggcugguacggcuaccaccaccagaacgagcagggcagcggcuacgccgccgaccagaagagcacccagaacgccaucaacggcaucaccaacaaggugaacagcgugaucgagaagaugaacacccaguucaccgccgugggcaaggaguucaacaagcuggagagaagaauggagaaccugaacaagaagguggacgacggcuucaucgacaucuggaccuacaacgccgagcugcuggugcugcuggagaacgagagaacccuggacuuccacgacagcaacgugaagaaccuguacgagaaggugaagagccagcugaagaacaacgccaaggagaucggcaacggcugcuucgaguucuaccacaagugcaacgacgagugcauggagagcgugaagaacggcaccuacgacuaccccaaguacagcgaggagagcaagcugaacagagagaagaucgacggcgugaagcuggagagcaugggcguguaccagauccuggccaucuacagcaccguggccagcagccuggugcugcuggugagccugggcgccaucagcuucuggaugugcagcaacggcagccugcagugcagaaucugcaucuga

SEQ ID NO: 166057 - RNA, 1698 nt, Artificial Sequence; identical to SEQ ID NO: 165573
  derived and/or modified CDS sequence (opt4) from hemagglutinin__InfluenzaA__ADN89611

SEQ ID NO: 166058 - RNA, 1698 nt, Artificial Sequence; identical to SEQ ID NO: 166000
  derived and/or modified CDS sequence (opt4) from hemagglutinin__InfluenzaA__ADN89622

SEQ ID NO: 166059 - RNA, 1698 nt, Artificial Sequence; identical to SEQ ID NO: 166041
  derived and/or modified CDS sequence (opt4) from hemagglutinin__InfluenzaA__ADN89633

SEQ ID NO: 166060 - RNA, 1698 nt, Artificial Sequence; identical to SEQ ID NO: 166025
  derived and/or modified CDS sequence (opt4) from hemagglutinin__InfluenzaA__ADN89644

SEQ ID NO: 166061 - RNA, 1698 nt, Artificial Sequence; identical to SEQ ID NO: 166041
  derived and/or modified CDS sequence (opt4) from hemagglutinin__InfluenzaA__ADN89655

SEQ ID NO: 166062 - RNA, 1698 nt, Artificial Sequence; identical to SEQ ID NO: 165573
  derived and/or modified CDS sequence (opt4) from hemagglutinin__InfluenzaA__ADN89666

SEQ ID NO: 166063 - RNA, 1698 nt, Artificial Sequence; identical to SEQ ID NO: 166013
  derived and/or modified CDS sequence (opt4) from hemagglutinin__InfluenzaA__ADN89677

SEQ ID NO: 166064 - RNA, 1698 nt, Artificial Sequence; identical to SEQ ID NO: 166013
  derived and/or modified CDS sequence (opt4) from hemagglutinin__InfluenzaA__ADN89688

SEQ ID NO: 166065 - RNA, 1698 nt, Artificial Sequence; identical to SEQ ID NO: 166000
  derived and/or modified CDS sequence (opt4) from hemagglutinin__InfluenzaA__ADN89699

SEQ ID NO: 166066 - RNA, 1698 nt, Artificial Sequence; identical to SEQ ID NO: 166002
  derived and/or modified CDS sequence (opt4) from hemagglutinin__InfluenzaA__ADN89710

SEQ ID NO: 166067 - RNA, 1698 nt, Artificial Sequence; identical to SEQ ID NO: 166025
  derived and/or modified CDS sequence (opt4) from hemagglutinin__InfluenzaA__ADN89721

SEQ ID NO: 166068 - RNA, 1698 nt, Artificial Sequence; identical to SEQ ID NO: 166002
  derived and/or modified CDS sequence (opt4) from hemagglutinin__InfluenzaA__ADN89732

SEQ ID NO: 166069 - RNA, 1698 nt, Artificial Sequence; identical to SEQ ID NO: 166002
  derived and/or modified CDS sequence (opt4) from hemagglutinin__InfluenzaA__ADN89743

SEQ ID NO: 166070 - RNA, 1698 nt, Artificial Sequence; identical to SEQ ID NO: 166027
  derived and/or modified CDS sequence (opt4) from hemagglutinin__InfluenzaA__ADN89765

SEQ ID NO: 166071 - RNA, 1698 nt, Artificial Sequence
  derived and/or modified CDS sequence (opt4) from hemagglutinin__InfluenzaA__ADN89776
augaaggugaagcugcuggugcugcugugcaccuucaccgccaccuacgccgacaccaucugcaucggcuaccacgccaacaacagcaccgacaccguggacaccgugcuggagaagaacgugaccgugacccacagcgugaaccugcuggagaacagccacaacggcaagcugugccugcugaagggcaucgccccccugcagcugggcaacugcagcguggccggcuggauccugggcaaccccgagugcgagcugcugaucagcaaggagagcuggagcuacaucguggagaagcccaaccccgagaacggcaccugcuaccccggccacuucgccgacuacgaggagcugagagagcagcugagcagcgugagcagcuucgagagauucgagaucuuccccaaggagagcagcuggcccaaccacaccgugaccggcgugagcgccagcugcagccacaacggcgagagcagcuucuacagaaaccugcuguggcugaccggcaagaacggccuguaccccaaccugagcaagagcuacgccaacaacaaggagaaggaggugcuggugcuguggggcgugcaccacccccccagcaucagcgaccagaagacccuguaccacaccgagaacgccuacgugagcguggugagcagccacuacagcagaaaguucacccccgagguggccaagagacccaaggugagagaccaggagggcagaaucaacuacuacuggacccugcuggagcccggcgacaccaucaucuucgaggccaacggcaaccugaucgcccccagauacgccuucgcccugagcagaggcuucggcagcggcaucaucaacagcaacgcccccauggacaagugcgacgccaagugccagaccccccagggcgccaucaacagcagccugcccuuccagaacgugcaccccgugaccaucggcgagugccccaaguacgugagaagcgccaagcugagaauggugaccggccugagaaacauccccagcauccagagcagaggccuguucggcgccaucgccggcuucaucgagggcggcuggaccggcaugguggacggcugguacggcuaccaccaccagaacgagcagggcagcggcuacgccgccgaccagaagagcacccagaacgccaucaacggcaucaccaacaaggugaacagcgugaucgagaagaugaacacccaguucaccgccgugggcaaggaguucaacaagcuggagagaagaauggagaaccugaacaagaagguggacgacggcuucaucgacaucuggaccuacaacgccgagcugcuggugcugcuggagaacgagagaacccuggacuuccacgacagcaacgugaagaaccuguacgagaaggugaagagccagcugaagaacaacgccaaggagaucggcaacggcugcuucgaguucuaccacaagugcaacgacgagugcauggagagcgugaagaacggcaccuacgacuaccccaaguacagcgaggagagcaagcugaacagagagaagaucgacggcgugaagcuggagagcaugggcguguaccagauccuggccaucuacagcaccguggccagcagccuggugcugcuggugagccugggcgccaucagcuucuggaugugcagcaacggcagccugcagugcagaaucugcaucuga

SEQ ID NO: 166072 - RNA, 1698 nt, Artificial Sequence; identical to SEQ ID NO: 166013
  derived and/or modified CDS sequence (opt4) from hemagglutinin__InfluenzaA__ADN89787

SEQ ID NO: 166073 - RNA, 1698 nt, Artificial Sequence; identical to SEQ ID NO: 166027
  derived and/or modified CDS sequence (opt4) from hemagglutinin__InfluenzaA__ADN89798

SEQ ID NO: 166074 - RNA, 1698 nt, Artificial Sequence; identical to SEQ ID NO: 165573
  derived and/or modified CDS sequence (opt4) from hemagglutinin__InfluenzaA__ADN89809

SEQ ID NO: 166075 - RNA, 1698 nt, Artificial Sequence; identical to SEQ ID NO: 165573
  derived and/or modified CDS sequence (opt4) from hemagglutinin__InfluenzaA__ADN89820

SEQ ID NO: 166076 - RNA, 1698 nt, Artificial Sequence; identical to SEQ ID NO: 165573
  derived and/or modified CDS sequence (opt4) from hemagglutinin__InfluenzaA__ADN89831

SEQ ID NO: 166077 - RNA, 1698 nt, Artificial Sequence
  derived and/or modified CDS sequence (opt4) from hemagglutinin__InfluenzaA__ADN89842
augaaggugaagcugcuggugcugcugugcaccuucaccgccaccuacgccgacaccaucugcaucggcuaccacgccaacaacagcaccgacaccguggacaccgugcuggagaagaacgugaccgugacccacagcgugaaccugcuggagaacagacacaacggcaagcugugccugcugaagggcaucgccccccugcagcugggcaacugcagcguggccggcuggauccugggcaaccccgagugcgagcugcugaucagcaaggagagcuggagcuacaucguggagaagcccaaccccgagaacggcaccugcuaccccggccacuucgccgacuacgaggagcugagagagcagcugagcagcgugagcagcuucgagagauucgagaucuuccccaaggagagcagcuggcccaaccacaccgugaccggcgugagcgccagcugcagccacaacggcgagagcagcuucuacagaaaccugcuguggcugaccggcaagaacggccuguaccccaaccugagcaagagcuacgccaacaacaaggagaaggaggugcuggugcuguggggcgugcaccacccccccaacaucguggaccagaagacccuguacagaaccgagaacgccuacgugagcguggugagcagccacuacagcagaaaguucacccccgagaucgccaagagacccaaggugagagaccaggagggcagaaucaacuacuacuggacccugcuggagcccggcgacaccaucaucuucgaggccaacggcaaccugaucgcccccagauacgccuucgcccugagcagaggcuucggcagcggcaucaucaacagcaacgcccccauggacaagugcgacgccaagugccagaccccccagggcgccaucaacagcagccugcccuuccagaacgugcaccccgugaccaucggcgagugccccaaguacgugagaagcgccaagcugagaauggugaccggccugagaaacauccccagcauccagagcagaggccuguucggcgccaucgccggcuucaucgagggcggcuggaccggcaugguggacggcugguacggcuaccaccaccagaacgagcagggcagcggcuacgccgccgaccagaagagcacccagaacgccaucaacggcaucaccaacaaggugaacagcgugaucgagaagaugaacacccaguucaccgccgugggcaaggaguucaacaagcuggagagaagaauggagaaccugaacaagaagguggacgacggcuucaucgacaucuggaccuacaacgccgagcugcuggugcugcuggagaacgagagaacccuggacuuccacgacagcaacgugaagaaccuguacgagaaggugaagagccagcugaagaacaacgccaaggagaucggcaacggcugcuucgaguucuaccacaagugcaacgacgagugcauggagagcgugaagaacggcaccuacgacuaccccaaguacagcgaggagagcaagcugaacagagagaagaucgacggcgugaagcuggagagcaugggcguguaccagauccuggccaucuacagcaccguggccagcagccuggugcugcuggugagccugggcgccaucagcuucuggaugugcagcaacggcagccugcagugcagaaucugcaucuga

SEQ ID NO: 166078 - RNA, 1701 nt, Artificial Sequence; identical to SEQ ID NO: 165593
  derived and/or modified CDS sequence (opt4) from hemagglutinin__InfluenzaA__ADN89864

SEQ ID NO: 166079 - RNA, 1701 nt, Artificial Sequence; identical to SEQ ID NO: 165593
  derived and/or modified CDS sequence (opt4) from hemagglutinin__InfluenzaA__ADN89875

SEQ ID NO: 166080 - RNA, 1701 nt, Artificial Sequence
  derived and/or modified CDS sequence (opt4) from hemagglutinin__InfluenzaA__ADN89886
augaagaccaucaucgcccugagcuacauccugugccugguguucgcccagaagcugcccggcaacgacaacagcaccgccacccugugccugggccaccacgccgugcccaacggcaccaucgugaagaccaucaccaacgaccagaucgaggugaccaacgccaccgagcuggugcagagcagcagcaccggcgagaucugcgacagcccccaccagauccuggacggcgagaacugcacccugaucgacgcccugcugggcgacccccagugcgacggcuuccagaacaagaagugggaccuguucguggagagaagcaaggccuacagcaacugcuaccccuacgacgugcccgacuacgccagccugagaagccugguggccagcagcggcacccuggaguucaacaacgagagcuucaacuggaccggcgugacccagaacggcaccagcagcgccugcaucagaagaagcaacaacagcuucuucagcagacugaacuggcugacccaccugaacuucaaguaccccgcccugaacgugaccaugcccaacaacgagcaguucgacaagcuguacaucuggggcgugcaccaccccggcaccgacaaggaccagaucuuccuguacgcccaggccagcggcagaaucaccgugagcaccaagagaagccagcaggccgugauccccaacaucggcagcagacccagagugagaaacauccccagcagaaucagcaucuacuggaccaucgugaagcccggcgacauccugcugaucaacagcaccggcaaccugaucgcccccagaggcuacuucaagaucagaagcggcaagagcagcaucaugagaagcgacgcccccaucggcaagugcaacagcgagugcaucacccccaacggcagcauccccaacgacaagcccuuccagaacgugaacagaaucaccuacggcgccugccccagauacgugaagcagagcacccugaagcuggccaccggcaugagaaacgugcccgagaagcagaccagaggcaucuucggcgccaucgccggcuucaucgagaacggcugggagggcaugguggacggcugguacggcuucagacaccagaacagcgagggcagaggccaggccgccgaccugaagagcacccaggccgccaucgaccagaucaacggcaagcugaacagacugaucggcaagaccaacgagaaguuccaccagaucgagaaggaguucagcgagguggagggcagaauccaggaccuggagaaguacguggaggacaccaagaucgaccuguggagcuacaacgccgagcugcugguggcccuggagaaccagcacaccaucgaccugaccgacagcgagaugaacaagcuguucgagaagaccagaaagcagcugagagagaacgccgaggacaugggcaacggcugcuucaccaucuaccacaagugcgacaacgccugcaucggcagcaucagaaacggcaccuacgaccacaacguguacagagacgaggcccugaacaacagauuccagaucaagggcguggagcugaagagcggcuacaaggacuggauccuguggaucagcuucgccaucagcugcuuccugcugugcguggcccugcugggcuucaucaugugggccugccagaagggcaacaucagaugcaacaucugcaucuga

SEQ ID NO: 166081 - RNA, 1701 nt, Artificial Sequence; identical to SEQ ID NO: 165593
  derived and/or modified CDS sequence (opt4) from hemagglutinin__InfluenzaA__ADN89897

SEQ ID NO: 166082 - RNA, 1701 nt, Artificial Sequence; identical to SEQ ID NO: 165593
  derived and/or modified CDS sequence (opt4) from hemagglutinin__InfluenzaA__ADN89908

SEQ ID NO: 166083 - RNA, 1701 nt, Artificial Sequence; identical to SEQ ID NO: 165593
  derived and/or modified CDS sequence (opt4) from hemagglutinin__InfluenzaA__ADN89919

SEQ ID NO: 166084 - RNA, 1701 nt, Artificial Sequence; identical to SEQ ID NO: 165593
  derived and/or modified CDS sequence (opt4) from hemagglutinin__InfluenzaA__ADN89930

SEQ ID NO: 166085 - RNA, 1701 nt, Artificial Sequence; identical to SEQ ID NO: 165593
  derived and/or modified CDS sequence (opt4) from hemagglutinin__InfluenzaA__ADN89941

SEQ ID NO: 166086 - RNA, 1701 nt, Artificial Sequence; identical to SEQ ID NO: 165593
  derived and/or modified CDS sequence (opt4) from hemagglutinin__InfluenzaA__ADN89952

SEQ ID NO: 166087 - RNA, 1701 nt, Artificial Sequence; identical to SEQ ID NO: 165593
  derived and/or modified CDS sequence (opt4) from hemagglutinin__InfluenzaA__ADN89963

SEQ ID NO: 166088 - RNA, 1701 nt, Artificial Sequence
  derived and/or modified CDS sequence (opt4) from hemagglutinin__InfluenzaA__ADN89974
augaagaccaucaucgcccugagcuacauccugugccugguguucgcccagaagcugcccggcaacgacaacagcaccgccacccugugccugggccaccacgccgugcccaacggcaccaucgugaagaccaucaccaacgaccagaucgaggugaccaacgccaccgagcuggugcagagcagcagcaccggcgagaucugcgacagcccccaccagauccuggacggcgagaacugcacccugaucgacgcccugcugggcgacccccagugcgacggcuuccagaacaagaagugggaccuguucguggagagaagcaaggccuacagcaacugcuaccccuacgacgugcccgacuacgccagccugagaagccugguggccagcagcggcacccuggaguucaacaacgagagcuucaacuggaccggcgugacccagaacggcaccagcagcgccugcaucagaagaagcaacaacagcuucuucagcagacugaacuggcugacccaccugaacuucaaguaccccgcccugaacgugaccaugcccaacaacgagcaguucgacaagcuguacaucuggggcgugcaccaccccggcaccgacaaggaccagaucuuccuguacgcccaggccagcggcagaaucaccgugagcaccaagagaagccagcaggccgugauccccaacaucggcagcagacccagagugagaaacauccccagcagaaucagcaucuacuggaccaucgugaagcccggcgacauccugcugaucaacagcaccggcaaccugaucgcccccagaggcuacuucaagauccagagcggcaagagcagcaucaugagaagcgacgcccccaucggcaagugcaacagcgagugcaucacccccaacggcagcauccccaacgacaagcccuuccagaacgugaacagaaucaccuacggcgccugccccagauacgugaagcagagcacccugaagcuggccaccggcaugagaaacgugcccgagaagcagaccagaggcaucuucggcgccaucgccggcuucaucgagaacggcugggagggcaugguggacggcugguacggcuucagacaccagaacagcgagggcagaggccaggccgccgaccugaagagcacccaggccgccaucgaccagaucaacggcaagcugaacagacugaucggcaagaccaacgagaaguuccaccagaucgagaaggaguucagcgagguggagggcagaauccaggaccuggagaaguacguggaggacaccaagaucgaccuguggagcuacaacgccgagcugcugguggcccuggagaaccagcacaccaucgaccugaccgacagcgagaugaacaagcuguucgagaagaccaagaagcagcugagagagaacgccgaggacaugggcaacggcugcuucaccaucuaccacaagugcgacaacgccugcaucggcagcaucagaaacggcaccuacgaccacaacguguacagagacgaggcccugaacaacagauuccagaucaagggcguggagcugaagagcggcuacaaggacuggauccuguggaucagcuucgccaucagcugcuuccugcugugcguggcccugcugggcuucaucaugugggccugccagaagggcaacaucagaugcaacaucugcaucuga

SEQ ID NO: 166089 - RNA, 1701 nt, Artificial Sequence; identical to SEQ ID NO: 165593
  derived and/or modified CDS sequence (opt4) from hemagglutinin__InfluenzaA__ADN89985

SEQ ID NO: 166090 - RNA, 1701 nt, Artificial Sequence; identical to SEQ ID NO: 165593
  derived and/or modified CDS sequence (opt4) from hemagglutinin__InfluenzaA__ADN89996

SEQ ID NO: 166091 - RNA, 1701 nt, Artificial Sequence; identical to SEQ ID NO: 165593
  derived and/or modified CDS sequence (opt4) from hemagglutinin__InfluenzaA__ADN90007

SEQ ID NO: 166092 - RNA, 1701 nt, Artificial Sequence; identical to SEQ ID NO: 165593
  derived and/or modified CDS sequence (opt4) from hemagglutinin__InfluenzaA__ADN90018

SEQ ID NO: 166093 - RNA, 1701 nt, Artificial Sequence; identical to SEQ ID NO: 165593
  derived and/or modified CDS sequence (opt4) from hemagglutinin__InfluenzaA__ADN90040

SEQ ID NO: 166094 - RNA, 1701 nt, Artificial Sequence; identical to SEQ ID NO: 165593
  derived and/or modified CDS sequence (opt4) from hemagglutinin__InfluenzaA__ADN90051

SEQ ID NO: 166095 - RNA, 1701 nt, Artificial Sequence; identical to SEQ ID NO: 165593
  derived and/or modified CDS sequence (opt4) from hemagglutinin__InfluenzaA__ADN90062

SEQ ID NO: 166096 - RNA, 1701 nt, Artificial Sequence; identical to SEQ ID NO: 165593
  derived and/or modified CDS sequence (opt4) from hemagglutinin__InfluenzaA__ADN90073

SEQ ID NO: 166097 - RNA, 1701 nt, Artificial Sequence; identical to SEQ ID NO: 165593
  derived and/or modified CDS sequence (opt4) from hemagglutinin__InfluenzaA__ADN90084

SEQ ID NO: 166098 - RNA, 1701 nt, Artificial Sequence; identical to SEQ ID NO: 165593
  derived and/or modified CDS sequence (opt4) from hemagglutinin__InfluenzaA__ADN90095

SEQ ID NO: 166099 - RNA, 1701 nt, Artificial Sequence; identical to SEQ ID NO: 165593
  derived and/or modified CDS sequence (opt4) from hemagglutinin__InfluenzaA__ADN90106

SEQ ID NO: 166100 - RNA, 1701 nt, Artificial Sequence; identical to SEQ ID NO: 165593
  derived and/or modified CDS sequence (opt4) from hemagglutinin__InfluenzaA__ADN90117

SEQ ID NO: 166101 - RNA, 1701 nt, Artificial Sequence; identical to SEQ ID NO: 165593
  derived and/or modified CDS sequence (opt4) from hemagglutinin__InfluenzaA__ADN90128

SEQ ID NO: 166102 - RNA, 1701 nt, Artificial Sequence; identical to SEQ ID NO: 165593
  derived and/or modified CDS sequence (opt4) from hemagglutinin__InfluenzaA__ADN90139

SEQ ID NO: 166103 - RNA, 1701 nt, Artificial Sequence; identical to SEQ ID NO: 165593
  derived and/or modified CDS sequence (opt4) from hemagglutinin__InfluenzaA__ADN90150

SEQ ID NO: 166104 - RNA, 1701 nt, Artificial Sequence; identical to SEQ ID NO: 165593
  derived and/or modified CDS sequence (opt4) from hemagglutinin__InfluenzaA__ADN90161

SEQ ID NO: 166105 - RNA, 1701 nt, Artificial Sequence; identical to SEQ ID NO: 165593
  derived and/or modified CDS sequence (opt4) from hemagglutinin__InfluenzaA__ADN90172

SEQ ID NO: 166106 - RNA, 1701 nt, Artificial Sequence; identical to SEQ ID NO: 165593
  derived and/or modified CDS sequence (opt4) from hemagglutinin__InfluenzaA__ADN90183

SEQ ID NO: 166107 - RNA, 1701 nt, Artificial Sequence; identical to SEQ ID NO: 165593
  derived and/or modified CDS sequence (opt4) from hemagglutinin__InfluenzaA__ADN90194

SEQ ID NO: 166108 - RNA, 1701 nt, Artificial Sequence; identical to SEQ ID NO: 165593
  derived and/or modified CDS sequence (opt4) from hemagglutinin__InfluenzaA__ADN90205

SEQ ID NO: 166109 - RNA, 1701 nt, Artificial Sequence; identical to SEQ ID NO: 165593
  derived and/or modified CDS sequence (opt4) from hemagglutinin__InfluenzaA__ADN90216

SEQ ID NO: 166110 - RNA, 1701 nt, Artificial Sequence; identical to SEQ ID NO: 163490
  derived and/or modified CDS sequence (opt4) from hemagglutinin__InfluenzaA__ADN92467

SEQ ID NO: 166111 - RNA, 1701 nt, Artificial Sequence
  derived and/or modified CDS sequence (opt4) from hemagglutinin__InfluenzaA__ADN92478
augaagaccaucaucgcccugagccacauccugugccugguguucgcccagaagcugcccggcaacgacaacagcaccgccacccugugccugggccaccacgccgugcccaacggcaccaucgugaagaccaucaccaacgaccagaucgaggugaccaacgccaccgagcuggugcagagcagcagcaccggcgagaucugcgacagcccccaccagauccuggacggcaagaacugcacccugaucgacgcccugcugggcgacccccagugcgacggcuuccagaacaagaagugggaccuguucguggagagaagcaaggccuacagcaacugcuaccccuacgacgugcccgacuacgccagccugagaagccugguggccagcagcggcacccuggaguucaacaacgagagcuucaacuggaccggcgugacccagaacggcaccagcagcgccugcaucagaagaagcaagaacagcuucuucagcagacugaacuggcugacccaccugaacuucaaguaccaggcccugaacgugaccaugcccaacaacgagcaguucgacaagcuguacaucuggggcgugcaccaccccggcaccgacaaggaccagaucuuccuguacgcccaggccagcggcagaaucaccgugagcaccaagagaagccagcagaccgugauccccaacaucggcagcagacccagagugagaaacauccccagcagaaucagcaucuacuggaccaucgugaagcccggcgacauccugcugaucaacagcaccggcaaccugaucgcccccagaggcuacuucaagauccagagcggcaagagcagcaucaugagaagcgacgcccccaucggcaagugcaacagcgagugcaucacccccaacggcagcauccccaacgacaagcccuuccagaacgugaacagaaucaccuacggcgccugccccagauacgugaagcagaacacccugaagcuggccaccggcaugagaaacgugcccgagaagcagaccagaggcaucuucggcgccaucgccggcuucaucgagaacggcugggagggcaugguggacggcugguacggcuucagacaccagaacagcgagggcagaggccaggccgccgaccugaagagcacccaggccgccaucgaccagaucaacggcaagcugaacagacugaucggcaagaccaacgagaaguuccaccagaucgagaaggaguucagcgagguggagggcagaauccaggaccuggagaaguacguggaggacaccaagaucgaccuguggagcuacaacgccgagcugcugguggcccuggagaaccagcacaccaucgaccugaccgacagcgagaugaacaagcuguucgagaagaccaagaagcagcugagagagaacgccgaggacaugggcaacggcugcuucaagaucuaccacaagugcgacaacgccugcaucggcagcaucagaaacggcaccuacgaccacgacguguacagagacgaggcccugaacaacagauuccagaucaagggcguggagcugaagagcggcuacaaggacuggauccuguggaucagcuucgccaucagcugcuuccugcugugcguggcccugcugggcuucaucaugugggccugccagaagggcaacaucagaugcaacaucugcaucuga

SEQ ID NO: 166112 - RNA, 1701 nt, Artificial Sequence
  derived and/or modified CDS sequence (opt4) from hemagglutinin__InfluenzaA__ADN92489
augaagaccaucaucgcccugagcuacauccugugccugguguucgcccagaagcugcccggcaacgacaacagcaccgccacccugugccugggccaccacgccgugcccaacggcaccaucgugaagaccaucaccaacgaccagaucgaggugaccaacgccaccgagcuggugcagagcagcagcaccggcgagaucugcgacagcccccaccagauccuggacggcaagaacugcacccugaucgacgcccugcugggcgacccccagugcgacggcuuccagaacaagaagugggaccuguucguggagagaagcaaggccuacagcaacugcuaccccuacgacgugcccgacuacgccagccugagaagccugguggccagcagcggcacccuggaguucaacaacgagaacuucaacuggaccggcgugacccagaacggcaccagcagcgccugcaucagaagaagcaagaacagcuucuucagcagacugaacuggcugacccaccugaacuucaaguaccaggcccugaacgugaccaugcccaacaacgagcaguucgacaagcuguacaucuggggcgugcaccaccccggcaccgacaaggaccagaucuuccuguacgcccaggccagcggcagaaucaccgugagcaccaagagaagccagcagaccgugauccccaacaucggcagcagacccagagugagaaacauccccagcagaaucagcaucuacuggaccaucgugaagcccggcgacauccugcugaucaacagcaccggcaaccugaucgcccccagaggcuacuucaagauccagagcggcaagagcagcaucaugagaagcgacgcccccaucggcaagugcaacagcgagugcaucacccccaacggcagcauccccaacgacaagcccuuccagaacgugaacagaaucaccuacggcgccugccccagauacgugaagcagaacacccugaagcuggccaccggcaugagaaacgugcccgagaagcagaccagaggcaucuucggcgccaucgccggcuucaucgagaacggcugggagggcaugguggacggcugguacggcuucagacaccagaacagcgagggcagaggccaggccgccgaccugaagagcacccaggccgccaucgaccagaucaacggcaagcugaacagacugaucggcaagaccaacgagaaguuccaccagaucgagaaggaguucagcgagguggagggcagaauccaggaccuggagaaguacguggaggacaccaagaucgaccuguggagcuacaacgccgagcugcugguggcccuggagaaccagcacaccaucgaccugaccgacagcgagaugaacaagcuguucgagaagaccaagaagcagcugagagagaacgccgaggacaugggcaacggcugcuucaagaucuaccacaagugcgacaacgccugcaucggcagcaucagaaacggcaccuacgaccacgacguguacagagacgaggcccugaacaacagauuccagaucaagggcguggagcugaagagcggcuacaaggacuggauccuguggaucagcuucgccaucagcugcuuccugcugugcguggcccugcugggcuucaucaugugggccugccagaagggcaacaucagaugcaacaucugcaucuga

SEQ ID NO: 166113 - RNA, 1701 nt, Artificial Sequence; identical to SEQ ID NO: 163490
  derived and/or modified CDS sequence (opt4) from hemagglutinin__InfluenzaA__ADN92500

SEQ ID NO: 166114 - RNA, 1701 nt, Artificial Sequence; identical to SEQ ID NO: 162729
  derived and/or modified CDS sequence (opt4) from hemagglutinin__InfluenzaA__ADN92510

SEQ ID NO: 166115 - RNA, 1701 nt, Artificial Sequence; identical to SEQ ID NO: 162729
  derived and/or modified CDS sequence (opt4) from hemagglutinin__InfluenzaA__ADN92520

SEQ ID NO: 166116 - RNA, 1701 nt, Artificial Sequence; identical to SEQ ID NO: 163831
  derived and/or modified CDS sequence (opt4) from hemagglutinin__InfluenzaA__ADN92530

SEQ ID NO: 166117 - RNA, 1701 nt, Artificial Sequence; identical to SEQ ID NO: 162971
  derived and/or modified CDS sequence (opt4) from hemagglutinin__InfluenzaA__ADN92540

SEQ ID NO: 166118 - RNA, 1701 nt, Artificial Sequence; identical to SEQ ID NO: 162729
  derived and/or modified CDS sequence (opt4) from hemagglutinin__InfluenzaA__ADN92550

SEQ ID NO: 166119 - RNA, 1701 nt, Artificial Sequence; identical to SEQ ID NO: 162729
  derived and/or modified CDS sequence (opt4) from hemagglutinin__InfluenzaA__ADN92560

SEQ ID NO: 166120 - RNA, 1701 nt, Artificial Sequence
  derived and/or modified CDS sequence (opt4) from hemagglutinin__InfluenzaA__ADO00730
augaaggccauccugguggugcugcuguacaccuucgccaccgccaacgccgacacccugugcaucggcuaccacgccaacaacagcaccgacaccguggacaccgugcuggagaagaacgugaccgugacccacagcgugaaccugcuggaggacaagcacaacggcaagcugugcaagcugagaggcguggccccccugcaccugggcaagugcaacaucgccggcuggauccugggcaaccccgagugcggcagccugagcaccgccagcagcuggagcuacaucguggagaccagcagcagcgacaacggcaccugcuaccccggcgacuucaucgacuacgaggagcugagagagcagcugagcagcgugagcagcuucgagagauucgagaucuuccccaagaccagcagcuggcccaaccacgacagcaacaagggcgugaccgccgccugcccccacgccggcgccaagagcuucuacaagaaccugaucuggcuggugaagaagggcaacagcuaccccaagcugagcaagagcuacaucaacgacaagggcaaggaggugcuggugcuguggggcauccaccaccccagcaccagcgccgaccagcagagccuguaccagaacgccgacgccuacguguucgugggcaccagcagauacagcaagaaguucaagcccgagaucgccaucagacccaaggugagagaccaggagggcagaaugaacuacuacuggacccugguggagcccggcgacaagaucaccuucgaggccaccggcaaccugguggugcccagauacgccuucgccauggagagaaacgccggcagcggcaucaucaucagcgacacccccgugcacgacugcaacaccaccugccagacccccaagggcgccaucaacaccagccugcccuuccagaacauccaccccaucaccaucggcaagugccccaaguacgugaagagcaccaagcugagacuggccaccggccugagaaacgugcccagcauccagagcagaggccuguucggcgccaucgccggcuucaucgagggcggcuggaccggcaugguggacggcugguacggcuaccaccaccagaacgagcagggcagcggcuacgccgccgaccugaagagcacccagaacgccaucgacggcaucaccaacaaggugaacagcgugaucgagaagaugaacacccaguucaccgccgugggcaaggaguucaaccaccuggagaagagaaucgagaaccugaacaagaagguggacgacggcuuccuggacaucuggaccuacaacgccgagcugcuggugcugcuggagaacgagagaacccuggacuaccacgacagcaacgugaagaaccuguacgagaaggugagaagccagcugaagaacaacgccaaggagaucggcaacggcugcuucgaguucuaccacaagugcgacaacaccugcauggagagcgugaagaacggcaccuacgacuaccccaaguacagcgaggaggccaagcugaacagagaggagaucgacggcgugaagcuggagagcaccagaaucuaccagauccuggccaucuacagcaccguggccagcagccuggugcugguggugagccugggcgccaucagcuucuggaugugcagcaacggcagccugcagugcagaaucugcaucuga

SEQ ID NO: 166121 - RNA, 1701 nt, Artificial Sequence; identical to SEQ ID NO: 164149
  derived and/or modified CDS sequence (opt4) from hemagglutinin__InfluenzaA__ADO00740

SEQ ID NO: 166122 - RNA, 1701 nt, Artificial Sequence; identical to SEQ ID NO: 163893
  derived and/or modified CDS sequence (opt4) from hemagglutinin__InfluenzaA__ADO00750

SEQ ID NO: 166123 - RNA, 1701 nt, Artificial Sequence; identical to SEQ ID NO: 162729
  derived and/or modified CDS sequence (opt4) from hemagglutinin__InfluenzaA__ADO12143

SEQ ID NO: 166124 - RNA, 1701 nt, Artificial Sequence; identical to SEQ ID NO: 162729
  derived and/or modified CDS sequence (opt4) from hemagglutinin__InfluenzaA__ADO12153

SEQ ID NO: 166125 - RNA, 1701 nt, Artificial Sequence; identical to SEQ ID NO: 162729
  derived and/or modified CDS sequence (opt4) from hemagglutinin__InfluenzaA__ADO12163

SEQ ID NO: 166126 - RNA, 1701 nt, Artificial Sequence; identical to SEQ ID NO: 162729
  derived and/or modified CDS sequence (opt4) from hemagglutinin__InfluenzaA__ADO12173

SEQ ID NO: 166127 - RNA, 1701 nt, Artificial Sequence; identical to SEQ ID NO: 162729
  derived and/or modified CDS sequence (opt4) from hemagglutinin__InfluenzaA__ADO12183

SEQ ID NO: 166128 - RNA, 1701 nt, Artificial Sequence; identical to SEQ ID NO: 162729
  derived and/or modified CDS sequence (opt4) from hemagglutinin__InfluenzaA__ADO12193

SEQ ID NO: 166129 - RNA, 1701 nt, Artificial Sequence; identical to SEQ ID NO: 162729
  derived and/or modified CDS sequence (opt4) from hemagglutinin__InfluenzaA__ADO12203

SEQ ID NO: 166130 - RNA, 1701 nt, Artificial Sequence; identical to SEQ ID NO: 162729
  derived and/or modified CDS sequence (opt4) from hemagglutinin__InfluenzaA__ADO12213

SEQ ID NO: 166131 - RNA, 1701 nt, Artificial Sequence; identical to SEQ ID NO: 162729
  derived and/or modified CDS sequence (opt4) from hemagglutinin__InfluenzaA__ADO12223

SEQ ID NO: 166132 - RNA, 1701 nt, Artificial Sequence; identical to SEQ ID NO: 162729
  derived and/or modified CDS sequence (opt4) from hemagglutinin__InfluenzaA__ADO12233

SEQ ID NO: 166133 - RNA, 1701 nt, Artificial Sequence; identical to SEQ ID NO: 162729
  derived and/or modified CDS sequence (opt4) from hemagglutinin__InfluenzaA__ADO12243

SEQ ID NO: 166134 - RNA, 1701 nt, Artificial Sequence; identical to SEQ ID NO: 162729
  derived and/or modified CDS sequence (opt4) from hemagglutinin__InfluenzaA__ADO12253

SEQ ID NO: 166135 - RNA, 1701 nt, Artificial Sequence; identical to SEQ ID NO: 162729
  derived and/or modified CDS sequence (opt4) from hemagglutinin__InfluenzaA__ADO12263

SEQ ID NO: 166136 - RNA, 1701 nt, Artificial Sequence; identical to SEQ ID NO: 162729
  derived and/or modified CDS sequence (opt4) from hemagglutinin__InfluenzaA__ADO12273

SEQ ID NO: 166137 - RNA, 1701 nt, Artificial Sequence; identical to SEQ ID NO: 162729
  derived and/or modified CDS sequence (opt4) from hemagglutinin__InfluenzaA__ADO12283

SEQ ID NO: 166138 - RNA, 1701 nt, Artificial Sequence; identical to SEQ ID NO: 162729
  derived and/or modified CDS sequence (opt4) from hemagglutinin__InfluenzaA__ADO12293

SEQ ID NO: 166139 - RNA, 1701 nt, Artificial Sequence; identical to SEQ ID NO: 162729
  derived and/or modified CDS sequence (opt4) from hemagglutinin__InfluenzaA__ADO12303

SEQ ID NO: 166140 - RNA, 1701 nt, Artificial Sequence; identical to SEQ ID NO: 162729
  derived and/or modified CDS sequence (opt4) from hemagglutinin__InfluenzaA__ADO12313

SEQ ID NO: 166141 - RNA, 1701 nt, Artificial Sequence; identical to SEQ ID NO: 162729
  derived and/or modified CDS sequence (opt4) from hemagglutinin__InfluenzaA__ADO12323

SEQ ID NO: 166142 - RNA, 1701 nt, Artificial Sequence; identical to SEQ ID NO: 162729
  derived and/or modified CDS sequence (opt4) from hemagglutinin__InfluenzaA__ADO12333

SEQ ID NO: 166143 - RNA, 1701 nt, Artificial Sequence; identical to SEQ ID NO: 162729
  derived and/or modified CDS sequence (opt4) from hemagglutinin__InfluenzaA__ADO12343

SEQ ID NO: 166144 - RNA, 1701 nt, Artificial Sequence; identical to SEQ ID NO: 162729
  derived and/or modified CDS sequence (opt4) from hemagglutinin__InfluenzaA__ADO12353

SEQ ID NO: 166145 - RNA, 1701 nt, Artificial Sequence; identical to SEQ ID NO: 162729
  derived and/or modified CDS sequence (opt4) from hemagglutinin__InfluenzaA__ADO12363

SEQ ID NO: 166146 - RNA, 1701 nt, Artificial Sequence
  derived and/or modified CDS sequence (opt4) from hemagglutinin__InfluenzaA__ADO12373
augaaggccauccugguggugcugcuguacaccuucgccaccgccaacgccgacacccugugcaucggcuaccacgccaacaacagcaccgacaccguggacaccgugcuggagaagaacgugaccgugacccacagcgugaaccugcuggaggacaagcacaacggcaagcugugcaagcugagaggcguggccccccugcaccugggcaagugcaacaucgccggcuggauccugggcaaccccgagugcgagagccugagcaccgccagcagcuggagcuacaucguggagaccagcagcagcgacaacggcaccugcuaccccggcgacuucaucgacuacgaggagcugagagagcagcugagcagcgugagcagcuucgagagauucgagaucuuccccaagaccagcagcuggcccaaccacgacagcaacaagggcgugaccgccgccugcccccacgccggcgccaagagcuucuacaagaaccugaucuggcuggugaagaagggcaacagcuaccccaagcugagcaagagcuacaucaacaacaagggcaaggaggugcuggugcuguggggcauccaccaccccagcaccagcgccgaccagcagagccuguaccagaacgccgacgccuacguguucgugggcaccagcagauacagcaagaaguucaagcccgagaucgccaucagacccaaggugagagaccaggagggcagaaugaacuacuacuggacccugguggagcccggcgacaagaucaccuucgaggccaccggcaaccugguggugcccagauacgccuucgccauggagagaaacgccggcagcggcaucaucaucagcgacacccccgugcacgacugcaacaccaccugccagacccccaagggcgccaucaacaccagccugcccuuccagaacauccaccccaucaccaucggcaagugccccaaguacgugaagagcaccaagcugagacuggccaccggccugagaaacgugcccagcauccagagcagaggccuguucggcgccaucgccggcuucaucgagggcggcuggaccggcaugguggacggcugguacggcuaccaccaccagaacgagcagggcagcggcuacgccgccgaccugaagagcacccagaacgccaucgacgagaucaccaacaaggugaacagcgugaucgagaagaugaacacccaguucaccgccgugggcaaggaguucaaccaccuggagaagagaaucgagaaccugaacaagaagguggacgacggcuuccuggacaucuggaccuacaacgccgagcugcuggugcugcuggagaacgagagaacccuggacuaccacgacagcaacgugaagaaccuguacgagaaggugagaagccagcugaagaacaacgccaaggagaucggcaacggcugcuucgaguucuaccacaagugcgacaacaccugcauggagagcgugaagaacggcaccuacgacuaccccaaguacagcgaggaggccaagcugaacagagaggagaucgacggcgugaagcuggagagcaccagaaucuaccagauccuggccaucuacagcaccguggccagcagccuggugcugguggugagccugggcgccaucagcuucuggaugugcagcaacggcagccugcagugcagaaucugcaucuga

SEQ ID NO: 166147 - RNA, 1701 nt, Artificial Sequence; identical to SEQ ID NO: 164214
  derived and/or modified CDS sequence (opt4) from hemagglutinin__InfluenzaA__ADO12383

SEQ ID NO: 166148 - RNA, 1701 nt, Artificial Sequence
  derived and/or modified CDS sequence (opt4) from hemagglutinin__InfluenzaA__ADO12403
augaaggccauccugguggugcugcuguacaccuucgccaccgccaacgccgacacccugugcaucggcuaccacgccaacaacagcaccgacaccguggacaccgugcuggagaagaacgugaccgugacccacagcgugaaccugcuggaggacaagcacaacggcaagcugugcaagcugagaggcguggccccccugcaccugggcaagugcaacaucgccggcuggauccugggcaaccccgagugcgagagccugagcaccgccagcagcuggagcuacaucguggagaccagcagcagcgacaacggcaccugcuaccccggcgacuucaucgacuacgaggagcugagagagcagcugagcagcgugagcagcuucgagagauucgagaucuuccccaagaccagcagcuggcccaaccacgacagcaacaagggcgugaccgccgccugcccccacgccggcgccaagagcuucuacaagaaccugaucuggcuggugaagaagggcaacagcuaccccaagcugagcaagagcuacaucaacgacaagggcaaggaggugcuggugcuguggggcauccaccaccccagcaccagcgccgaccagcagagccuguaccagaacgccgacgccuacguguucgugggcaccagcagauacagcaagaaguucaagcccgagaucgccaucagacccaaggugagagaccaggagggcagaaugaacuacuacuggacccugguggagcccggcgacaagaucaccuucgaggccaccggcaaccugguggugcccagauacgccuucgccauggagagaaacgccggcagcggcaucaucaucagcgacacccccgugcacgacugcaacaccaccugccagacccccaagggcgccaucaacaccagccugcccuuccagaacgugcaccccaucaccaucggcaagugccccaaguacgugaagagcaccaagcugagacuggccaccggccugagaaacgugcccagcauccagagcagaggccuguucggcgccaucgccggcuucaucgagggcggcuggaccggcaugguggacggcugguacggcuaccaccaccagaacgagcagggcagcggcuacgccgccgaccugaagagcacccagaacgccaucgacgagaucaccaacaaggugaacagcgugaucgagaagaugaacacccaguucaccgccgugggcaaggaguucaaccaccuggagaagagaaucgagaaccugaacaagaagguggacgacggcuuccuggacaucuggaccuacaacgccgagcugcuggugcugcuggagaacgagagaacccuggacuaccacgacagcaacgugaagaaccuguacgagaaggugagaagccagcugaagaacaacgccaaggagaucggcaacggcugcuucgaguucuaccacaagugcgacaacaccugcauggagagcgugaagaacggcaccuacgacuaccccaaguacagcgaggaggccaagcugaacagagaggagaucgacggcgugaagcuggagagcaccagaaucuaccagauccuggccaucuacagcaccguggccagcagccuggugcugguggugagccugggcgccaucagcuucuggaugugcagcaacggcagccugcagugcagaaucugcaucuga

SEQ ID NO: 166149 - RNA, 1701 nt, Artificial Sequence; identical to SEQ ID NO: 164365
  derived and/or modified CDS sequence (opt4) from hemagglutinin__InfluenzaA__ADO12413

SEQ ID NO: 166150 - RNA, 1701 nt, Artificial Sequence; identical to SEQ ID NO: 162729
  derived and/or modified CDS sequence (opt4) from hemagglutinin__InfluenzaA__ADO12423

SEQ ID NO: 166151 - RNA, 1701 nt, Artificial Sequence; identical to SEQ ID NO: 162729
  derived and/or modified CDS sequence (opt4) from hemagglutinin__InfluenzaA__ADO12433

SEQ ID NO: 166152 - RNA, 1701 nt, Artificial Sequence; identical to SEQ ID NO: 162729
  derived and/or modified CDS sequence (opt4) from hemagglutinin__InfluenzaA__ADO12443

SEQ ID NO: 166153 - RNA, 1701 nt, Artificial Sequence; identical to SEQ ID NO: 162729
  derived and/or modified CDS sequence (opt4) from hemagglutinin__InfluenzaA__ADO12453

SEQ ID NO: 166154 - RNA, 1701 nt, Artificial Sequence; identical to SEQ ID NO: 162729
  derived and/or modified CDS sequence (opt4) from hemagglutinin__InfluenzaA__ADO12463

SEQ ID NO: 166155 - RNA, 1701 nt, Artificial Sequence
  derived and/or modified CDS sequence (opt4) from hemagglutinin__InfluenzaA__ADO12473
augaaggccauccugguggugcugcuguacaccuucgccaccgccaacgccgacacccugugcaucggcuaccacgccaacaacagcaccgacaccguggacaccgugcuggagaagaacgugaccgugacccacagcgugaaccugcuggaggacaagcagaacggcaagcugugcaagcugagaggcguggccccccugcaccugggcaagugcaacaucgccggcuggauccugggcaaccccgagugcgagagccugagcaccgccagcagcuggagcuacaucguggagaccagcagcagcgacaacggcaccugcuaccccggcgacuucaucgacuacgaggagcugagagagcagcugagcagcgugagcagcuucgagagauucgagaucuuccccaagaccagcagcuggcccaaccacgacagcaacaagggcgugaccgccgccugcccccacgccggcgccaagagcuucuacaagaaccugaucuggcuggugaagaagggcaacagcuaccccaagcugagcaagagcuacaucaacgacaagggcaaggaggugcuggugcuguggggcauccaccaccccagcaccagcgccgaccagcagagccuguaccagaacgccgacgccuacguguucgugggcaccagcagauacagcaagaaguucaagcccgagaucgccaucagacccaaggugagagaccaggagggcagaaugaacuacuacuggacccugguggagcccggcgacaagaucaccuucgaggccaccggcaaccugguggugcccagauacgccuucgccauggagagaaacgccggcagcggcaucaucaucagcgacacccccgugcacgacugcaacaccaccugccagacccccaagggcgccaucaacaccagccugcccuuccagaacauccaccccaucaccaucggcaagugccccaaguacgugaagagcaccaagcugagacuggccaccggccugagaaacgugcccagcauccagagcagaggccuguucggcgccaucgccggcuucaucgagggcggcuggaccggcaugguggacggcugguacggcuaccaccaccagaacgagcagggcagcggcuacgccgccgaccugaagagcacccagaacgccaucgacgagaucaccaacaaggugaacagcgugaucgagaagaugaacacccaguucaccgccgugggcaaggaguucaaccaccuggagaagagaaucgagaaccugaacaagaagguggacgacggcuuccuggacaucuggaccuacaacgccgagcugcuggugcugcuggagaacgagagaacccuggacuaccacgacagcaacgugaagaaccuguacgagaaggugagaagccagcugaagaacaacgccaaggagaucggcaacggcugcuucgaguucuaccacaagugcgacaacaccugcauggagagcgugaagaacggcaccuacgacuaccccaaguacagcgaggaggccaagcugaacagagaggagaucgacggcgugaagcuggagagcaccagaaucuaccagauccuggccaucuacagcaccguggccagcagccuggugcugguggugagccugggcgccaucagcuucuggaugugcagcaacggcagccugcagugcagaaucugcaucuga

SEQ ID NO: 166156 - RNA, 1701 nt, Artificial Sequence; identical to SEQ ID NO: 162729
  derived and/or modified CDS sequence (opt4) from hemagglutinin__InfluenzaA__ADO12493

SEQ ID NO: 166157 - RNA, 1701 nt, Artificial Sequence
  derived and/or modified CDS sequence (opt4) from hemagglutinin__InfluenzaA__ADO12503
augaaggccauccugguggugcugcuguacaccuucgccaccgccaacgccgacacccugugcaucggcuaccacgccaacaacagcaccgacaccguggacaccgugcuggagaagaacgugaccgugacccacagcgugaaccugcuggaggacaagcacaacggcaagcugugcaagcugagaggcguggccccccugcaccugggcaagugcaacaucgccggcuggauccugggcaaccccgagugcgagagccugagcaccgccagcagcuggagcuacaucguggagaccagcagcagcgacaacggcaccugcuaccccggcgacuucaucgacuacgaggagcugagagagcagcugagcagcgugagcagcuucgagagauucgagaucuuccccaagaccagcagcuggcccaaccacgacagcaacaagggcgugaccgccgccugcccccacgccggcgccaagagcuucuacaagaaccugaucuggcuggugaagaagggcaacagcuaccccaagcugagcaagagcuacaucaacgacaagggcaaggaggugcuggugcuguggggcauccaccaccccagcaccagcgccgaccagcagagccuguaccagaacgccgacgccuacguguucgugggcaccagcagauacagcaagaaguucaagcccgagaucgccaucagacccaaggugagagaccaggagggcagaaugaacuacuacuggacccugguggagcccggcgacaagaucaccuucgaggccaccggcaaccugguggugcccagauacgccuucgccauggagagaaacgccggcagcggcaucaucaucagcgacacccccgugcacgacugcaacaccaccugccagacccccaagggcgccaucaacaccagccugcccuuccagaacauccaccccaucaccaucggcaagugccccaaguacgugaagagcaccaagcugagacuggccaccggccugagaaacgugcccagcauccagagcagaggccuguucggcgccaucgccggcuucaucgagggcggcuggaccggcaugguggacggcugguacggcuaccaccaccagaacgagcagggcagcggcuacgccgccgaccugaagagcacccagaacgccaucgacgagaucaccaacaaggugaacagcgugaucgagaagaugaacacccaguucaccgccgugggcaaggaguucaaccaccuggagaagagaaucgagaaccugaacaagaagguggacgacggcuuccuggacaucuggaccuacaacgccgagcugcuggugcugcuggagaacgagagaacccuggacuaccacgacagcaacgugaagaaccuguacgagaaggugagaagccagcugaagaacaacgccaaggagaucggcaacggcugcuucgaguucuaccacaagugcgacaacaccugcauggagagcgugaagaacggcaccuacgacuaccccaaguacagcgaggaggccaagcugaacagagaggagaucgacggcgugaagcuggagagcaccagaaucuaccagauccuggccaucuacagcaccguggccagcagccuggugcugguggugagccugggcgccaucaacuucuggaugugcagcaacggcagccugcagugcagaaucugcaucuga

SEQ ID NO: 166158 - RNA, 1701 nt, Artificial Sequence
  derived and/or modified CDS sequence (opt4) from hemagglutinin__InfluenzaA__ADO12513
augaaggccauccugguggugcugcuguacaccuucgccaccgccaacgccgacacccugugcaucggcuaccacgccaacaacagcaccgacaccguggacaccgugcuggagaagaacgugaccgugacccacagcgugaaccugcuggaggacaagcacaacggcaagcugugcaagcugagagagguggccccccugcaccugggcaagugcaacaucgccggcuggauccugggcaaccccgagugcgagagccugagcaccgccagcagcuggagcuacaucguggagaccagcagcagcgacaacggcaccugcuaccccggcgacuucaucgacuacgaggagcugagagagcagcugagcagcgugagcagcuucgagagauucgagaucuuccccaagaccagcagcuggcccaaccacgacagcaacaagggcgugaccgccgccugcccccacgccggcgccaagagcuucuacaagaaccugaucuggcuggugaagaagggcaacagcuaccccaagcugagcaagagcuacaucaacgacaagggcaaggaggugcuggugcuguggggcauccaccaccccagcaccagcgccgaccagcagagccuguaccagaacgccgacgccuacguguucgugggcaccagcagauacagcaagaaguucaagcccgagaucgccaucagacccaaggugagagaccaggagggcagaaugaacuacuacuggacccugguggagcccggcgacaagaucaccuucgaggccaccggcaaccugguggugcccagauacgccuucgccauggagagaaacgccggcagcggcaucaucaucagcgacacccccgugcacgacugcaacaccaccugccagacccccaagggcgccaucaacaccagccugcccuuccagaacauccaccccaucaccaucggcaagugccccaaguacgugaagagcaccaagcugagacuggccaccggccugagaaacgugcccagcauccagagcagaggccuguucggcgccaucgccggcuucaucgagggcggcuggaccggcaugguggacggcugguacggcuaccaccaccagaacgagcagggcagcggcuacgccgccgaccugaagagcacccagaacgccaucgacgagaucaccaacaaggugaacagcgugaucgagaagaugaacacccaguucaccgccgugggcaaggaguucaaccaccuggagaagagaaucgagaaccugaacaagaagguggacgacggcuuccuggacaucuggaccuacaacgccgagcugcuggugcugcuggagaacgagagaacccuggacuaccacgacagcaacgugaagaaccuguacgagaaggugagaagccagcugaagaacaacgccaaggagaucggcaacggcugcuucgaguucuaccacaagugcgacaacaccugcauggagagcgugaagaacggcaccuacgacuaccccaaguacagcgaggaggccaagcugaacagagaggagaucgacggcgugaagcuggagagcaccagaaucuaccagauccuggccaucuacagcaccguggccagcagccuggugcugguggugagccugggcgccaucagcuucuggaugugcagcaacggcagccugcagugcagaaucugcaucuga

SEQ ID NO: 166159 - RNA, 1701 nt, Artificial Sequence; identical to SEQ ID NO: 162729
  derived and/or modified CDS sequence (opt4) from hemagglutinin__InfluenzaA__ADO12523

SEQ ID NO: 166160 - RNA, 1701 nt, Artificial Sequence
  derived and/or modified CDS sequence (opt4) from hemagglutinin__InfluenzaA__ADO12533
augaaggccauccugguggugcugcuguacaccuucgccaccgccaacgccgacacccugugcaucggcuaccacgccaacaacagcaccgacaccguggacaccgugcuggagaagaacgugaccgugacccacagcgugaaccugcuggaggacaagcacaacggcaagcugugcaagcugagaggcguggccccccugcaccugggcaagugcaacaucgccggcuggauccugggcaaccccgagugcgagagccugagcaccgccagcagcuggagcuacaucguggagaccagcagcagcgacaacggcaccugcuaccccggcgacuucaucgacuacgaggagcugagagagcagcugagcagcgugagcagcuucgagagauucgagaucuuccccaagaccagcagcuggcccaaccacgacagcaacaagggcgugaccgccgccugcccccacgccggcgccaagagcuucuacaagaaccugaucuggcuggugaagaagggcaacagcuaccccaagcugagcaagagcuacaucaacgacaagggcaaggaggugcuggugcuguggggcauccaccaccccagcaccagcgccgaccagcagagccuguaccagaacgccgacgccuacguguucgugggcaccagcagauacagcaagaaguucaagcccgagaucgccaucagacccaaggugagagaccaggagggcagaaugaacuacuacuggacccugguggagcccggcgacaagaucaccuucgaggccaccggcaaccugguggugcccagauacgccuucgccauggagagaaacgccggcagcggcaucaucaucagcgacacccccgugcacgacugcaacaccaccugccagacccccaagggcgccaucaacaccagccugcccuuccagaacauccaccccaucaccaucggcaagugccccaaguacgugaagagcaccagacugagacuggccaccggccugagaaacgugcccagcauccagagcagaggccuguucggcgccaucgccggcuucaucgagggcggcuggaccggcaugguggacggcugguacggcuaccaccaccagaacgagcagggcagcggcuacgccgccgaccugaagagcacccagaacgccaucgacgagaucaccaacaaggugaacagcgugaucgagaagaugaacacccaguucaccgccgugggcaaggaguucaaccaccuggagaagagaaucgagaaccugaacaagaagguggacgacggcuuccuggacaucuggaccuacaacgccgagcugcuggugcugcuggagaacgagagaacccuggacuaccacgacagcaacgugaagaaccuguacgagaaggugagaagccagcugaagaacaacgccaaggagaucggcaacggcugcuucgaguucuaccacaagugcgacaacaccugcauggagagcgugaagaacggcaccuacgacuaccccaaguacagcgaggaggccaagcugaacagagaggagaucgacggcgugaagcuggagagcaccagaaucuaccagauccuggccaucuacagcaccguggccagcagccuggugcugguggugagccugggcgccaucagcuucuggaugugcagcaacggcagccugcagugcagaaucugcaucuga

SEQ ID NO: 166161 - RNA, 1701 nt, Artificial Sequence; identical to SEQ ID NO: 162729
  derived and/or modified CDS sequence (opt4) from hemagglutinin__InfluenzaA__ADO12543

SEQ ID NO: 166162 - RNA, 1701 nt, Artificial Sequence; identical to SEQ ID NO: 162729
  derived and/or modified CDS sequence (opt4) from hemagglutinin__InfluenzaA__ADO12553

SEQ ID NO: 166163 - RNA, 1701 nt, Artificial Sequence; identical to SEQ ID NO: 162729
  derived and/or modified CDS sequence (opt4) from hemagglutinin__InfluenzaA__ADO12563

SEQ ID NO: 166164 - RNA, 1701 nt, Artificial Sequence; identical to SEQ ID NO: 162729
  derived and/or modified CDS sequence (opt4) from hemagglutinin__InfluenzaA__ADO12573

SEQ ID NO: 166165 - RNA, 1701 nt, Artificial Sequence
  derived and/or modified CDS sequence (opt4) from hemagglutinin__InfluenzaA__ADO12593
augaaggccauccugguggugcugcuguacaccuucgccaccgccaacgccgacacccugugcaucggcuaccacgccaacaacagcaccgacaucguggacaccgugcuggagaagaacgugaccgugacccacagcgugaaccugcuggaggacaagcacaacggcaagcugugcaagcugagaggcguggccccccugcaccugggcaagugcaacaucgccggcuggauccugggcaaccccgagugcgagagccugagcaccgccagcagcuggagcuacaucguggagaccagcagcagcgacaacggcaccugcuaccccggcgacuucaucgacuacgaggagcugagagagcagcugagcagcgugagcagcuucgagagauucgagaucuuccccaagaccagcagcuggcccaaccacgacagcaacaagggcgugaccgccgccugcccccacgccggcgccaagagcuucuacaagaaccugaucuggcuggugaagaagggcaacagcuaccccaagcugagcaagagcuacaucaacgacaagggcaaggaggugcuggugcuguggggcauccaccaccccagcaccagcgccgaccagcagagccuguaccagaacgccgacgccuacguguucgugggcaccagcagauacagcaagaaguucaagcccgagaucgccaucagacccaaggugagagaccaggagggcagaaugaacuacuacuggacccugguggagcccggcgacaagaucaccuucgaggccaccggcaaccugguggugcccagauacgccuucgccauggagagaaacgccggcagcggcaucaucaucagcgacacccccgugcacgacugcaacaccaccugccagacccccaagggcgccaucaacaccagccugcccuuccagaacauccaccccaucaccaucggcaagugccccaaguacgugaagagcaccaagcugagacuggccaccggccugagaaacgugcccagcauccagagcagaggccuguucggcgccaucgccggcuucaucgagggcggcuggaccggcaugguggacggcugguacggcuaccaccaccagaacgagcagggcagcggcuacgccgccgaccugaagagcacccagaacgccaucgacgagaucaccaacaaggugaacagcgugaucgagaagaugaacacccaguucaccgccgugggcaaggaguucaaccaccuggagaagagaaucgagaaccugaacaagaagguggacgacggcuuccuggacaucuggaccuacaacgccgagcugcuggugcugcuggagaacgagagaacccuggacuaccacgacagcaacgugaagaaccuguacgagaaggugagaagccagcugaagaacaacgccaaggagaucggcaacggcugcuucgaguucuaccacaagugcgacaacaccugcauggagagcgugaagaacggcaccuacgacuaccccaaguacagcgaggaggccaagcugaacagagaggagaucgacggcgugaagcuggagagcaccagaaucuaccagauccuggccaucuacagcaccguggccagcagccuggugcugguggugagccugggcgccaucagcuucuggaugugcagcaacggcagccugcagugcagaaucugcaucuga

SEQ ID NO: 166166 - RNA, 1701 nt, Artificial Sequence; identical to SEQ ID NO: 162729
  derived and/or modified CDS sequence (opt4) from hemagglutinin__InfluenzaA__ADO12603

SEQ ID NO: 166167 - RNA, 1701 nt, Artificial Sequence; identical to SEQ ID NO: 162729
  derived and/or modified CDS sequence (opt4) from hemagglutinin__InfluenzaA__ADO12613

SEQ ID NO: 166168 - RNA, 1701 nt, Artificial Sequence; identical to SEQ ID NO: 162729
  derived and/or modified CDS sequence (opt4) from hemagglutinin__InfluenzaA__ADO12623

SEQ ID NO: 166169 - RNA, 1701 nt, Artificial Sequence
  derived and/or modified CDS sequence (opt4) from hemagglutinin__InfluenzaA__ADO14349
augaaggccauccugguggugcugcuguacaccuucgccaccgccaacgccgacacccugugcaucggcuaccacgccaacaacagcaccgacaccguggacaccgugcuggagaagaacgugaccgugacccacagcgugaaccugcuggaggacaagcacaagggcaagcugugcaagcugagaggcguggccccccugcaccugggcaagugcaacaucgccggcuggauccugggcaaccccgagugcgagagccugagcaccgccagcagcuggagcuacaucguggagaccagcagcagcgacaagggcaccugcuaccccggcgacuucaucgacuacgaggagcugagagagcagcugagcagcgugagcagcuucgagagauucgagaucuuccccaagaccagcagcuggcccaaccacgacagcaacaagggcgugaccgccgccugcccccacgccggcgccaagagcuucuacaagaaccugaucuggcuggugaagaagggcaacagcuaccccaagcugagcaagagcuacaucaacgacaagggcaaggaggugcuggugcuguggggcauccaccaccccagcaccagcgccgaccagcagagccuguaccagaacgccgacgccuacguguucgugggcaccagcagauacagcaagaaguucaagcccgagaucgccaucagacccaaggugagagaccaggagggcagaaugaacuacuacuggacccugguggagcccggcgacaagaucaccuucgaggccaccggcaaccugguggugcccagauacgccuucgccauggagagaaacgccggcagcggcaucaucaucagcgacacccccgugcacgacugcaacaccaccugccagacccccaagggcgccaucaacaccagccugcccuuccagaacauccaccccaucaccaucggcaagugccccaaguacgugaagagcaccaagcugagacuggccaccggccugagaaacauccccagcauccagagcagaggccuguucggcgccaucgccggcuucaucgagggcggcuggaccggcaugguggacggcugguacggcuaccaccaccagaacgagcagggcagcggcuacgccgccgaccugaagagcacccagaacgccaucgacgagaucaccaacaaggugaacagcgugaucgagaagaugaacacccaguucaccgccgugggcaaggaguucaaccaccuggagaagagaaucgagaaccugaacaagaagguggacgacggcuuccuggacaucuggaccuacaacgccgagcugcuggugcugcuggagaacgagagaacccuggacuaccacgacagcaacgugaagaaccuguacgagaaggugagaagccagcugaagaacaacgccaaggagaucggcaacggcugcuucgaguucuaccacaagugcgacaacaccugcauggagagcgugaagaacggcaccuacgacuaccccaaguacagcgaggaggccaagcugaacagagaggagaucgacggcgugaagcuggagagcaccagaaucuaccagauccuggccaucuacagcaccguggccagcagccuggugcugguggugagccugggcgccaucagcuucuggaugugcagcaacggcagccugcagugcagaaucugcaucuga

SEQ ID NO: 166170 - RNA, 1701 nt, Artificial Sequence; identical to SEQ ID NO: 164993
  derived and/or modified CDS sequence (opt4) from hemagglutinin__InfluenzaA__ADO14351

SEQ ID NO: 166171 - RNA, 1701 nt, Artificial Sequence
  derived and/or modified CDS sequence (opt4) from hemagglutinin__InfluenzaA__ADO14353
augaaggccauccugguggugcugcuguacaccuucgccaccgccaacgccgacacccugugcaucggcuaccacgccaacaacagcaccgacaccguggacaccgugcuggagaagaacgugaccgugacccacagcgugaaccugcuggaggacaagcacaacggcaagcugugcaagcugagaggcguggccccccugcaccugggcaagugcaacaucgccggcuggauccugggcaaccccgagugcgagagccugagcaccgccagcagcuggagcuacaucguggagaccagcagcagcgacaacggcaccugcuaccccggcgacuucaucgacuacgaggagcugagagagcagcugagcagcgugagcagcuucgagagauucgagaucuuccccaagaccagcagcuggcccaaccacgacagcaacaagggcgugaccgccgccugcccccacgccgaggccaagagcuucuacaagaaccugaucuggcuggugaagaagggcaacagcuaccccaagcugagcaagagcuacaucaacgacaagggcaaggaggugcuggugcuguggggcauccaccaccccagcaccagcgccgaccagcagagccuguaccagaacgccgacgccuacguguucgugggcaccagcagauacagcaagaaguucaagcccgagaucgccaucagacccaaggugagagaccaggagggcagaaugaacuacuacuggacccugguggagcccggcgacaagaucaccuucgaggccaccggcaaccugguggugcccagauacgccuucgccauggagagaaacgccggcagcggcaucaucaucagcgacacccccgugcacgacugcaacaccaccugccagacccccaagggcgccaucaacaccagccugcccuuccagaacauccaccccaucaccaucggcaagugccccaaguacgugaagagcaccaagcugagacuggccaccggccugagaaacauccccagcauccagagcagaggccuguucggcgccaucgccggcuucaucgagggcggcuggaccggcaugguggacggcugguacggcuaccaccaccagaacgagcagggcagcggcuacgccgccgaccugaagagcacccagaacgccaucgacgagaucaccaacaaggugaacagcgugaucgagaagaugaacacccaguucaccgccgugggcaaggaguucaaccaccuggagaagagaaucgagaaccugaacaagaagguggacgacggcuuccuggacaucuggaccuacaacgccgagcugcuggugcugcuggagaacgagagaacccuggacuaccacgacagcaacgugaagaaccuguacgagaaggugagaagccagcugaagaacaacgccaaggagaucggcaacggcugcuucgaguucuaccacaagugcgacaacaccugcauggagagcgugaagaacggcaccuacgacuaccccaaguacagcgaggaggccaagcugaacagagaggagaucgacggcgugaagcuggagagcaccagaaucuaccagauccuggccaucuacagcaccguggccagcagccuggugcugguggugagccugggcgccaucagcuucuggaugugcagcaacggcagccugcagugcagaaucugcaucuga

SEQ ID NO: 166172 - RNA, 1701 nt, Artificial Sequence
  derived and/or modified CDS sequence (opt4) from hemagglutinin__InfluenzaA__ADO14354
augaaggccauccugguggugcugcuguacaccuucgccaccgccaacgccgacacccugugcaugggcuaccacgccaacaacagcaccgacaccguggacaccgugcuggagaagaacgugaccgugacccacagcgugaaccugcuggaggacaagcacaacggcaagcugugcaagcugagaggcguggccccccugcaccugggcaagugcaacaucgccggcuggauccugggcaaccccgagugcgagagccugagcaccgccagcagcuggagcuacaucguggagaccagcagcagcgacaacggcaccugcuaccccggcgacuucaucgacuacgaggagcugagagagcagcugagcagcgugagcagcuucgagagauucgagaucuuccccaagaccagcagcuggcccaaccacgacagcaacaagggcgugaccgccgccugcccccacgccggcgccaagagcuucuacaagaaccugaucuggcuggugaagaagggcaacagcuaccccaagcugagcaagagcuacaucaacgacaagggcaaggaggugcuggugcuguggggcauccaccaccccagcaccagcgccgaccagcagagccuguaccagaacgccgacgccuacguguucgugggcaccagcagauacagcaagaaguucaagcccgagaucgccaucagacccaaggugagagagcaggagggcagaaugaacuacuacuggacccugguggagcccggcgacaagaucaccuucgaggccaccggcaaccugguggugcccagauacgccuucgccauggagagaaacgccggcagcggcaucaucaucagcgacacccccgugcacgacugcaacaccaccugccagacccccaagggcgccaucaacaccagccugcccuuccagaacauccaccccaucaccaucggcaagugccccaaguacgugaagagcaccaagcugagacuggccaccggccugagaaacgugcccagcauccagagcagaggccuguucggcgccaucgccggcuucaucgagggcggcuggaccggcaugguggacggcugguacggcuaccaccaccagaacgagcagggcagcggcuacgccgccgaccugaagagcacccagaacgccaucgacgagaucaccaacaaggugaacagcgugaucgagaagaugaacacccaguucaccgccgugggcaaggaguucaaccaccuggagaagagaaucgagaaccugaacaagaagguggacgacggcuuccuggacaucuggaccuacaacgccgagcugcuggugcugcuggagaacgagagaacccuggacuaccacgacagcaacgugaagaaccuguacgagaaggugagaagccagcugaagaacaacgccaaggagaucggcaacggcugcuucgaguucuaccacaagugcgacaacaccugcauggagagcgugaagaacggcaccuacgacuaccccaaguacagcgaggaggccaagcugaacagagaggagaucgacggcgugaagcuggagagcaccagaaucuaccagauccuggccaucuacagcaccguggccagcagccuggugcugguggugagccugggcgccaucagcuucuggaugugcagcaacggcagccugcagugcagaaucugcaucuga

SEQ ID NO: 166173 - RNA, 1701 nt, Artificial Sequence
  derived and/or modified CDS sequence (opt4) from hemagglutinin__InfluenzaA__ADO14356
augaaggccauccugguggugcugcuguacaccuucgccaccgccaacgccgacacccugugcaucggcuaccacgccaacaacagcaccgacaccguggacaccgugcuggagaagaacgugaccgugacccacagcgugaaccugcuggaggacaagcacaacggcaagcugugcaagcugagaggcguggccccccugcaccugggcaagugcaacaucgccggcuggauccugggcaaccccgagugcgagagccugagcaccgccagcagcuggagcuacaucguggagaccagcagcagcgacaacggcaccugcuaccccggcgacuucaucgacuacgaggagcugagagagcagcugagcagcgugagcagcuucgagagauucgagaucuuccccaagaccagcagcuggcccaaccacgacagcaacaagggcgugaccgccgccugcccccacgccggcgccaagagcuucuacaagaaccugaucuggcuggugaagaagggcaacagcuaccccaagcugagcaagagcuacaucaacgacaagggcaaggaggugcuggugcuguggggcauccaccaccccagcaccagcgccgaccagcagagccuguaccagaacgccgacgccuacguguucgugggcaccagcagauacagcaagaaguucaagcccgagaucgccaucagacccaaggugagaggccaggagggcagaaugaacuacuacuggacccugguggagcccggcgacaagaucaccuucgaggccaccggcaaccugguggugcccagauacgccuucgccauggagagaaacgccggcagcggcaucaucaucagcgacacccccgugcacgacugcaacaccaccugccagacccccaagggcgccaucaacaccagccugcccuuccagaacauccaccccaucaccaucggcaagugccccaaguacgugaagagcaccaagcugagacuggccaccggccugagaaacauccccagcauccagagcagaggccuguucggcgccaucgccggcuucaucgagggcggcuggaccggcaugguggacggcugguacggcuaccaccaccagaacgagcagggcagcggcuacgccgccgaccugaagagcacccagaacgccaucgacgagaucaccaacaaggugaacagcgugaucgagaagaugaacacccaguucaccgccgugggcaaggaguucaaccaccuggagaagagaaucgagaaccugaacaagaagguggacgacggcuuccuggacaucuggaccuacaacgccgagcugcuggugcugcuggagaacgagagaacccuggacuaccacgacagcaacgugaagaaccuguacgagaaggugagaagccagcugaagaacaacgccaaggagaucggcaacggcugcuucgaguucuaccacaagugcgacaacaccugcauggagagcgugaagaacggcaccuacgacuaccccgaguacagcgaggaggccaagcugaacagagaggagaucgacggcgugaagcuggagagcaccagaaucuaccagauccuggccaucuacagcaccguggccagcagccuggugcugguggugagccugggcgccaucagcuucuggaugugcagcaacggcagccugcagugcagaaucugcaucuga

SEQ ID NO: 166174 - RNA, 1701 nt, Artificial Sequence; identical to SEQ ID NO: 164993
  derived and/or modified CDS sequence (opt4) from hemagglutinin__InfluenzaA__ADO14357

SEQ ID NO: 166175 - RNA, 1701 nt, Artificial Sequence
  derived and/or modified CDS sequence (opt4) from hemagglutinin__InfluenzaA__ADO14359
augaaggccauccugguggugcugcuguacaccuucgccaccgccaacgccgacacccugugcaucggcuaccacgccaacaacagcaccgacaccguggacaccgugcuggagaagaacgugaccgugacccacagcgugaaccugcuggaggacaagcacaacggcaagcugugcaagcugagaggcguggccccccugcaccugggcaagugcaacaucgccggcuggauccugggcaaccccgagugcgagagccugagcaccgccagcagcuggagcuacaucguggagaccagcagcagcgacaacggcaccugcuaccccggcgacuucaucgacuacgaggagcugagagagcagcugagcagcgugagcagcuucgagagauucgagaucuuccccaagaccagcagcuggcccaaccacgacagcaacaagggcgugaccgccgccugcccccacgccggcgccaagagcuucuacaagaaccugaucuggcuggugaagaagggcaacagcuaccccaagcugagcaagagcuacaucaacgacaagggcaaggaggugcuggugcuguggggcauccaccacccccccaccagcgccgaccagcagagccuguaccagaacgccgacgccuacguguucgugggcaccagcagauacagcaagaaguucaagcccgagaucgccaucagacccaaggugagagaccaggagggcagaaugaacuacuacuggacccugguggagcccggcgacaagaucaccuucgaggccaccggcaaccugguggugcccagauacgccuucgccauggagagaaacgccggcagcggcaucaucaucagcgacacccccgugcacgacugcaacaccaccugccagacccccaagggcgccaucaacaccagccugcccuuccagaacauccaccccaucaccaucggcaagugccccaaguacgugaagagcaccaagcugagacuggccaccggccugagaaacgugcccagcauccagagcagaggccuguucggcgccaucgccggcuucaucgagggcggcuggaccggcaugguggacggcugguacggcuaccaccaccagaacgagcagggcagcggcuacgccgccgaccugaagagcacccagaacgccaucgacaagaucaccaacaaggugaacagcgugaucgagaagaugaacacccaguucaccgccgugggcaaggaguucaaccaccuggagaagagaaucgagaaccugaacaagaagguggacgacggcuuccuggacaucuggaccuacaacgccgagcugcuggugcugcuggagaacgagagaacccuggacuaccacgacagcaacgugaagaaccuguacgagaaggugagaagccagcugaagaacaacgccaaggagaucggcaacggcugcuucgaguucuaccacaagugcgacaacaccugcauggagagcgugaagaacggcaccuacgacuaccccaaguacagcgaggaggccaagcugaacagagaggagaucgacggcgugaagcuggagagcaccagaaucuaccagauccuggccaucuacagcaccguggccagcagccuggugcugguggugagccugggcgccaucagcuucuggaugugcagcaacggcagccugcagugcagaaucugcaucuga

SEQ ID NO: 166176 - RNA, 1701 nt, Artificial Sequence
  derived and/or modified CDS sequence (opt4) from hemagglutinin__InfluenzaA__ADO14361
augaaggccauccugguggugcugcuguacaccuucgccaccgccaacgccgacacccugugcaucggcuaccacgccaacaacagcaccgacaccguggacaccgugcuggagaagaacgugaccgugacccacagcgugaaccugcuggaggacaagcacaacggcaagcugugcaagcugagaggcguggccccccugcaccugggcaagugcaacaucgccggcuggauccugggcaaccccgagugcgagagccugagcaccgccagcagcuggagcuacaucguggagaccagcagcagcgacaagggcaccugcuaccccggcgacuucaucgacuacgaggagcugagagagcagcugagcagcgugagcagcuucgagagauucgagaucuuccccaagaccagcagcuggcccaaccacgacagcaacaagggcgugaccgccgccugcccccacgccggcgccaagagcuucuacaagaaccugaucuggcuggugaagaagggcaacagcuaccccaagcugagcaagagcuacaucaacgacaagggcaaggaggugcuggugcuguggggcauccaccaccccagcaccagcgccgaccagcagagccuguaccagaacgccgacgccuacguguucgugggcaccagcagauacagcaagaaguucaagcccgagaucgccaucagacccaaggugagagaccaggagggcagaaugaacuacuacuggacccugguggagcccggcgacaagaucaccuucgaggccaccggcaaccugguggugcccagauacgccuucgccauggagagaaacgccggcagcggcaucaucaucagcgacacccccgugcacgacugcaacaccaccugccagacccccaagggcgccaucaacaccagccugcccuuccagaacauccaccccaucaccaucggcaagugccccaaguacgugaagagcaccaagcugagacuggccaccggccugagaaacauccccagcauccagagcagaggccuguucggcgccaucgccggcuucaucgagggcggcuggaccggcaugguggacggcugguacggcuaccaccaccagaacgagcagggcagcggcuacgccgccgaccugaagagcacccagaacgccaucgacgagaucaccaacaaggugaacagcgugaucgagaagaugaacacccaguucaccgccgugggcaaggaguucaaccaccuggagaagagaaucgagaaccugaacaagaagguggacgacggcuuccuggacaucuggaccuacaacgccgagcugcuggugcugcuggagaacgagagaacccuggacuaccacgacagcaacgugaagaaccuguacgagaaggugagaagccagcugaagaacaacgccaaggagaucggcaacggcugcuucgaguucuaccacaagugcgacaacaccugcauggagagcgugaagaacggcaccuacgacuaccccaaguacagcgaggaggccaagcugaacagagaggagaucgacggcgugaagcuggagagcaccagaaucuaccagauccuggccaucuacagcaccguggccagcagccuggugcugguggugagccugggcgccaucagcuucuggaugugcagcaacggcagccugcagugcagaaucugcaucuga

SEQ ID NO: 166177 - RNA, 1701 nt, Artificial Sequence
  derived and/or modified CDS sequence (opt4) from hemagglutinin__InfluenzaA__ADO14362
augaaggccauccugguggugcugcuguacaccuucgccaccgccaacgccgacacccugugcaucggcuaccacgccaacaacagcaccgacaccguggacaccgugcuggagaagaacgugaccgugacccacagcgugaaccugcuggaggacaagcacaacggcaagcugugcaagcugagaggcguggccccccugcaccugggcaagugcaacaucgccggcuggauccugggcaaccccgagugcgagagccugagcaccgccagcagcuggagcuacaucguggagaccagcagcagcgacaacggcaccugcuaccccggcgacuucaucgacuacgaggagcugagagagcagcugagcagcgugagcagcuucgagagauucgagaucuuccccaagaccagcagcuggcccaaccacgacagcaacaagggcgugaccgccgccugcccccacgccggcgccaagagcuucuacaagaaccugaucuggcuggugaagaagggcaacagcuaccccaagcugagcaagagcuacaucaacgacaagggcaaggaggugcuggugcuguggggcauccaccaccccagcaacagcgccgaccagcagagccuguaccagaacgccgacgccuacguguucgugggcaccagcagauacagcaagaaguucaagcccgagaucgccaucagacccaaggugagagaccaggagggcagaaugaacuacuacuggacccugguggagcccggcgacaagaucaccuucgaggccaccggcaaccugguggugcccagauacgccuucgccauggagagaaacgccggcagcggcaucaucaucagcgacacccccgugcacgacugcaacaccaccugccagacccccaagggcgccaucaacaccagccugcccuuccagaacauccaccccaucaccaucggcaagugccccaaguacgugaagagcaccaagcugagacuggccaccggccugagaaacgugcccagcauccagagcagaggccuguucggcgccaucgccggcuucaucgagggcggcuggaccggcaugguggacggcugguacggcuaccaccaccagaacgagcagggcagcggcuacgccgccgaccugaagagcacccagaacgccaucgacgagaucaccaacaaggugaacagcgugaucgagaagaugaacacccaguucaccgccgugggcaaggaguucaaccaccuggagaagagaaucgagaaccugaacaagaagguggacgacggcuuccuggacaucuggaccuacaacgccgagcugcuggugcugcuggagaacgagagaacccuggacuaccacgacagcaacgugaagaaccuguacgagaaggugagaagccagcugaagaacaacgccaaggagaucggcaacggcugcuucgaguucuaccacaagugcgacaacaccugcauggagagcgugaagaacggcaccuacgacuaccccaaguacagcgaggaggccaagcugaacagagaggagaucgacggcgugaagcuggagagcaccagaaucuaccagauccuggccaucuacagcaccguggccagcagccuggugcugguggugagccugggcgccaucagcuucuggaugugcagcaacggcagccugcagugcagaaucugcaucuga

SEQ ID NO: 166178 - RNA, 1683 nt, Artificial Sequence
  derived and/or modified CDS sequence (opt4) from hemagglutinin__InfluenzaA__ADO21015
auggagguggugagccugaucaccauccugcugcuggugaccgugagcaacgccgacaagaucugcaucggcuaccagagcaccaacagcaccgagaccguggacacccugaccgagaacaacgugcccguggcccacgccaaggagcugcugcacaccgagcacaacggcaugcugugcgccaccaaccugggccacccccugauccuggacaccugcaccaucgagggccugaucuacggcaaccccagcugcgaccugcugcugggcggcagagaguggagcuacaucguggagagacccagcgccgugaacggccugugcuaccccggcaacguggagaaccuggaggagcugagaagccuguucagcagcgccagcagcuaccagagaauccagaucuuccccggcaccaucuggaacgugagcuacggcggcaccagcaaggccugcagcgacagcuucuacaagagcaugagauggcugacccagaagaacaacgccuaccccauccaggacgcccaguacaccaacaacagaggcaagaacauccuguucauguggggcaucaaccacccccccaccgacaccacccagaccaaccuguacaccagaaccgacaccaccaccagcguggccaccgaggacaucaacagaaccuucaagccccugaucggccccagaccccuggugaacggccagcagggcagaaucgacuacuacuggagcgugcugaagcccggccagacccugagagugagaagcaacggcaaccugaucgcccccugguacggccacauccugagcggcgagagccacggcagaauccugaagaccgaccugaacagcggcaacugcguggugcagugccagaccgagagaggcggccugaacaccacccugcccuuccacaacgugagcaaguacgccuucggcaacugccccaaguacgugggcgugaagagccugaagcuggccgugggccugagaaacgugcccgccagaagcagcagaggccuguucggcgccaucgccggcuucaucgagggcggcuggagcggccugguggccggcugguacggcuuccagcacagcaacgaccagggcgugggcauggccgccgacagagacagcacccagaaggccaucgacaagaucaccagcaaggugaacaacaucguggacaagaugaacaagcaguacgagaucaucgaccacgaguucagcgagguggagaccagacugaacaugaucaacaacaagaucgacgaccagauccaggacaucugggccuacaacgccgagcugcuggugcugcuggagaaccagaagacccuggacgagcacgacgccaacgugaacaaccuguacaacaaggugaagagagcccugggcagcaacgccguggaggacggcaagggcugcuucgagcuguaccacaagugcgacgaccagugcauggagaccaucagaaacggcaccuacaacagaagaaaguacaaggaggagagcagacuggagagacagaagaucgagggcgugaagcuggagagcgagggcaccuacaagauccugaccaucuacagcaccguggccagcagccuggugaucgccaugggcuucgccgccuuccuguucugggccaugagcaacggcagcugcagaugcaacaucugcaucuga

SEQ ID NO: 166179 - RNA, 1683 nt, Artificial Sequence
  derived and/or modified CDS sequence (opt4) from hemagglutinin__InfluenzaA__ADO21026
auggagguggugagccugaucaccauccugcugcuggugaccgugagcaacgccgacaagaucugcaucggcuaccagagcaccaacagcaccgagaccguggacacccugaccgagaacaacgugcccguggcccacgccaaggagcugcugcacaccgagcacaacggcaugcugugcgccaccaaccugggccacccccugauccuggacaccugcaccaucgagggccugaucuacggcaaccccagcugcgaccugcugcugggcggcagagaguggagcuacaucguggagagacccagcgccgugaacggccugugcuaccccggcaacguggagaaccuggaggagcugagaagccuguucagcagcgccagcagcuaccagagaauccagaucuuccccggcaccaucuggaacgugagcuacggcggcaccagcaaggccugcagcgacagcuucuacaagagcaugagauggcugacccagaagaacaacgccuaccccauccaggacgcccaguacaccaacaacagaggcaagaacauccuguucauguggggcaucaaccacccccccaccgacaccacccagaccaaccuguacaccagaaccgacaccaccaccagcguggccaccgaggacaucaacagaaccuucaacccccugaucggccccagaccccuggugaacggccagcagggcagaaucgacuacuacuggagcgugcugaagcccggccagacccugagagugagaagcaacggcaaccugaucgcccccugguacggccacauccugagcggcgagagccacggcagaauccugaagaccgaccugaacagcggcaacugcguggugcagugccagaccgagagaggcggccugaacaccacccugcccuuccacaacgugagcaaguacgccuucggcaacugccccaaguacgugggcgugaagagccugaagcuggccgugggccugagaaacgugcccgccagaagcagcagaggccuguucggcgccaucgccggcuucaucgagggcggcuggagcggccugguggccggcugguacggcuuccagcacagcaacgaccagggcgugggcauggccgccgacagagacagcacccagaaggccaucgacaagaucaccagcaaggugaacaacaucguggacaagaugaacaagcaguacgagaucaucgaccacgaguucagcgagguggagaccagacugaacaucaucaacaacaagaucgacgaccagauccaggacaucugggccuacaacgccgagcugcuggugcugcuggagaaccagaagacccuggacgagcacgacgccaacgugaacaaccuguacaacaaggugaagagagcccugggcagcaacgccguggaggacggcaagggcugcuucgagcuguaccacaagugcgacgaccagugcauggagaccaucagaaacggcaccuacaacagaagaaaguacaaggaggagagcagacuggagagacagaagaucgagggcgugaagcuggagagcgagggcaccuacaagauccugaccaucuacagcaccguggccagcagccuggugaucgccaugggcuucgccgccuuccuguucugggccaugagcaacggcagcugcagaugcaacaucugcaucuga

SEQ ID NO: 166180 - RNA, 1683 nt, Artificial Sequence
  derived and/or modified CDS sequence (opt4) from hemagglutinin__InfluenzaA__ADO21037
auggagguggugagccugaucaccauccugcugcuggugaccgugagcaacgccgacaagaucugcaucggcuaccagagcaccaacagcaccgagaccguggacacccugaccgagaacaacgugcccguggcccacgccaaggagcugcugcacaccgagcacaacggcaugcugugcgccaccaaccugggccacccccugauccuggacaccugcaccaucgagggccugaucuacggcaaccccagcugcgaccugcugcugggcggcagagaguggagcuacaucguggagagacccagcgccgugaacggccugugcuaccccggcaacguggagaaccuggaggagcugagaagccuguucagcagcgccagcagcuaccagagaauccagaucuuccccggcaccaucuggaacgugagcuacggcggcaccagcaaggccugcagcgacagcuucuacaagagcaugagauggcugacccagaagaacaacgccuaccccauccaggacgcccaguacaccaacaacagaggcaagaacauccuguucauguggggcaucaaccacccccccaccgacaccacccagaccaaccuguacaccagaaccgacaccaccaccagcguggccaccgaggacaucaacagaaccuucaagcccuacaucggccccagaccccuggugaacggccagcagggcagaaucgacuacuacuggagcgugcugaagcccggccagacccugagagugagaagcaacggcaaccugaucgcccccugguacggccacauccugagcggcgagagccacggcagaauccugaagaccgaccugaacagcggcaacugcguggugcagugccagaccgagagaggcggccugaacaccacccugcccuuccacaacgugagcaaguacgccuucggcaacugccccaaguacgugggcgugaagagccugaagcuggccgugggccugagaaacgugcccgccagaagcagcagaggccuguucggcgccaucgccggcuucaucgagggcggcuggagcggccugguggccggcugguacggcuuccagcacagcaacgaccagggcgugggcauggccgccgacagagaccugacccagaaggccaucgacaagaucaccagcaaggugaacaacaucguggacaagaugaacaagcaguacgagaucaucgaccacgaguucagcgagguggagaccagacugaacaugaucaacaacaagaucgacgaccagauccaggacaucugggccuacaacgccgagcugcuggugcugcuggagaaccagaagacccuggacgagcacgacgccaacgugaacaaccuguacaacaaggugaagagagcccugggcagcaacgccguggaggacggcaagggcugcuucgagcuguaccacaagugcgacgaccagugcauggagaccaucagaaacggcaccuacaacagaagaaaguacaaggaggagagcagacuggagagacagaagaucgagggcgugaagcuggagagcgagggcaccuacaagauccugaccaucuacagcaccguggccagcagccuggugaucgccaugggcuucgccgccuuccuguucugggccaugagcaacggcagcugcagaugcaacaucugcaucuga

SEQ ID NO: 166181 - RNA, 1683 nt, Artificial Sequence
  derived and/or modified CDS sequence (opt4) from hemagglutinin__InfluenzaA__ADO21048
auggagguggugagccugaucaccauccugcugcuggugaccgugagcaacgccgacaagaucugcaucggcuaccagagcaccaacagcaccgagaccguggacacccugaccgagaacaacgugcccguggcccacgccaaggagcugcugcacaccgagcacaacggcaugcugugcgccaccaaccugggccacccccugauccuggacaccugcaccaucgagggccugaucuacggcaaccccagcugcgaccugcugcugggcggcagagaguggagcuacaucguggagagacccagcgccgugaacggccugugcuaccccggcaacguggagaaccuggaggagcugagaagccuguucagcagcgccagcagcuaccagagaauccagaucuuccccggcaccaucuggaacgugagcuacggcggcaccagcaaggccugcagcgacagcuucuacaagagcaugagauggcugacccagaagaacaacgccuaccccauccaggacgcccaguacaccaacaacagaggcaagaacauccacuucauguggggcaucaaccacccccccaccgacaccacccagaccaaccuguacaccagaaccgacaccaccaccagcguggccaccgaggacaucaacagaaccuucaagccccugaucggccccagaccccuggugaacggccagcagggcagaaucgacuacuacuggagcgugcugaagcccggccagacccugagagugagaagcaacggcaaccugaucgcccccugguacggccacauccugagcggcgagagccacggcagaauccugaagaccgaccugaacagcggcaacugcguggugcagugccagaccgagagaggcggccugaacaccacccugcccuuccacaacgugagcaaguacgccuucggcaacugccccaaguacgugggcgugaagagccugaagcuggccgugggccugagaaacgugcccgccagaagcagcagaggccuguucggcgccaucgccggcuucaucgagggcggcuggagcggccugguggccggcugguacggcuuccagcacagcaacgaccagggcgugggcauggccgccgacagagugagcacccagaaggccaucgacaagaucaccagcaaggugaacaacaucguggacaagaugaacaagcaguacgagaucaucgaccacgaguucagcgagguggagaccagacugaacaugaucaacaacaagaucgacgaccagauccaggacaucugggccuacaacgccgagcugcuggugcugcuggagaaccagaagacccuggacgagcacgacgccaacgugaacaaccuguacaacaaggugaagagagcccugggcagcaacgccguggaggacggcaagggcugcuucgagcuguaccacaagugcgacgaccagugcauggagaccaucagaaacggcaccuacaacagaagaaaguacaaggaggagagcagacuggagagacagaagaucgagggcgugaagcuggagagcgagggcaccuacaagauccugaccaucuacagcaccguggccagcagccuggugaucgccaugggcuucgccgccuuccuguucugggccaugagcaacggcagcugcagaugcaacaucugcaucuga

SEQ ID NO: 166182 - RNA, 1701 nt, Artificial Sequence
  derived and/or modified CDS sequence (opt4) from hemagglutinin__InfluenzaA__ADO25092
augaaggccauccugguggugcugcuguacaccuucgccaccgccaacgccgacacccugugcaucggcuaccacgccaacaacagcaccgacaccguggacaccgugcuggagaagaacgugaccgugacccacagcgugaaccugcuggaggacaagcacaacggcaagcugugcaagcugagaggcguggccccccugcaccugggcaagugcaacaucgccggcuggauccugggcaaccccgagugcgagagccugagcaccgccagcagcuggagcuacaucguggagaccagcagcagcgacaacggcaccugcuaccccggcgacuucaucgacuacgaggagcugagagagcagcugagcagcgugagcagcuucgagagauucgagaucuuccccaagaccagcagcuggcccaaccacgacagcaacaagggcgugaccgccgccugcccccacgccggcgccaagagcuucuacaagaaccugaucuggcuggugaagaagggcaacagcuaccccaagcugagcaacagcuacaucaacgacaagggcaaggaggugcuggugcuguggggcauccaccaccccagcaccagcgccgaccagcagagccuguaccagaacgccgacgccuacguguucgugggcaccagcagauacagcaagaaguucaagcccgagaucgccaucagacccaaggugagagaccaggagggcagaaugaacuacuacuggacccugguggagcccggcgacaagaucaccuucgaggccaccggcaaccugguggugcccagauacgccuucgccauggagagaaacgccggcagcggcaucaucaucagcgacacccccgcccacgacugcaacaccaccugccagacccccaagggcgccaucaacaccagccugcccuuccagaacauccaccccaucaccaucggcaagugccccaaguacgugaagagcaccaagcugagacuggccaccggccugagaaacgugcccagcauccagagcagaggccuguucggcgccaucgccggcuucaucgagggcggcuggaccggcaugguggacggcugguacggcuaccaccaccagaacgagcagggcagcggcuacgccgccgaccugaagagcacccagaacgccaucgacgagaucaccaacaaggugaacagcgugaucgagaagaugaacacccaguucaccgccgugggcaaggaguucaaccaccuggagaagagaaucgagaaccugaacaagaagguggacgacggcuuccuggacaucuggaccuacaacgccgagcugcuggugcugcuggagaacgagagaacccuggacuaccacgacagcaacgugaagaaccuguacgagaaggugagaagccagcugaagaacaacgccaaggagaucggcaacggcugcuucgaguucuaccacaagugcgacaacaccugcauggagagcgugaagaacggcaccuacgacuaccccaaguacagcgaggaggccaagcugaacagagaggagaucgacggcgugaagcuggagagcaccagaaucuaccagauccuggccaucuacagcaccguggccagcagccuggugcugguggugagccugggcgccaucagcuucuggaugugcagcaacggcagccugcagugcagaaucugcaucuga

SEQ ID NO: 166183 - RNA, 1701 nt, Artificial Sequence; identical to SEQ ID NO: 164601
  derived and/or modified CDS sequence (opt4) from hemagglutinin__InfluenzaA__ADO25112

SEQ ID NO: 166184 - RNA, 1701 nt, Artificial Sequence; identical to SEQ ID NO: 164601
  derived and/or modified CDS sequence (opt4) from hemagglutinin__InfluenzaA__ADO25122

SEQ ID NO: 166185 - RNA, 1701 nt, Artificial Sequence
  derived and/or modified CDS sequence (opt4) from hemagglutinin__InfluenzaA__ADO25132
augaacgccauccugguggugcugcuguacaccuucgccaccgccaacgccgacacccugugcaucggcuaccacgccaacaacagcaccgacaccguggacacccugcuggagaagaacgugaccgugacccacagcgugaaccugcuggaggacaagcacaacggcaagcugugcaagcugagaggcguggccccccugcaccugggcaagugcaacaucgccggcuggauccugggcaaccccgagugcgagagccugagcaccgccagcagcuggagcuacaucguggagaccagcagcagcgacaacggcaccugcuaccccggcgacuucaucgacuacgaggagcugagagagcagcugagcagcgugagcagcuucgagagauucgagaucuuccccaagaccagcagcuggcccaaccacgacagcaacaagggcgugaccgccgccugcccccacgccggcgccaagagcuucuacaagaaccugaucuggcuggugaagaagggcaacagcuaccccaagcugagcaagagcuacaucaacgacaagggcaaggaggugcuggugcuguggggcauccaccaccccagcaccagcgccgaccagcagagccuguaccagaacgccgacgccuacguguucgugggcaccagcagauacagcaagaaguucaagcccgagaucgccaucagacccaaggugagagaccaggagggcagaaugaacuacuacuggacccugguggagcccggcgacaagaucaccuucgaggccaccggcaaccugguggugcccagauacgccuucgccauggagagaaacgccggcagcgacaucaucaucagcgacacccccgugcacgacugcaacaccaccugccagacccccaagggcgccaucaacaccagccugcccuuccagaacauccaccccaucaccaucggcaagugccccaaguacgugaagagcaccaagcugagacuggccaccggccugagaaacgugcccagcauccagagcagaggccuguucggcgccaucgccggcuucaucgagggcggcuggaccggcaugguggacggcugguacggcuaccaccaccagaacgagcagggcagcggcuacgccgccgaccugaagagcacccagaacgccaucgacgagaucaccaacaagaucaacagcgugaucgagaagaugaacacccaguucaccgccgugggcaaggaguucaaccaccuggagaagagaaucgagaaccugaacaagaagguggacgacggcuuccuggacaucuggaccuacaacgccgagcugcuggugcugcuggagaacgagagaacccuggacuaccacgacagcaacgugaagaaccuguacgagaaggugagaagccagcugaagaacaacgccaaggagaucggcaacggcugcuucgaguucuaccacaagugcgacaacaccugcauggagagcgugaagaacggcaccuacgacuaccccaaguacagcgaggaggccaagcugaacagagaggagaucgacggcgugaagcuggagagcaccagaaucuaccagauccuggccaucuacagcaccguggccagcagccuggugcugguggugagccugggcgccaucagcuucuggaugugcagcaacggcagccugcagugcagaaucugcaucuga

SEQ ID NO: 166186 - RNA, 1701 nt, Artificial Sequence; identical to SEQ ID NO: 164342
  derived and/or modified CDS sequence (opt4) from hemagglutinin__InfluenzaA__ADO25142

SEQ ID NO: 166187 - RNA, 1701 nt, Artificial Sequence
  derived and/or modified CDS sequence (opt4) from hemagglutinin__InfluenzaA__ADO25152
augaaggccauccugguggugcugcuguacaccuucgccgccgccaacgccgacacccugugcaucggcuaccacgccaacaacagcaccgacaccguggacaccgugcuggagaagaacgugaccgugacccacagcgugaaccugcuggaggacaagcacaacggcaagcugugcaagcugagaggcguggccccccugcaccugggcaagugcaacaucgccggcuggauccugggcaaccccgagugcgagagccugagcaccgccagcagcuggagcuacaucguggagaccagcagcagcgacaacggcaccugcuaccccggcgacuucaucaacuacgaggagcugagagagcagcugagcagcgugagccuguucgagagauucgagaucuuccccaagaccagcagcuggcccaaccacgacagcaacaagggcgugaccgccgccugcccccacgccggcgccaagagcuucuacaagaaccugaucuggcuggugaagaagggcaacagcuaccccaagcugagcaagagcuacaucaacgacaagggcaaggaggugcuggugcuguggggcauccaccaccccagcaccagcgccgaccagcagagccuguaccagaacgccgacgccuacguguucgugggcaccagcagauacagcaagaaguucaagcccgagaucgccaucagacccaaggugagagaccaggagggcagaaugaacuacuacuggacccugguggagcccggcgacaagaucaccuucgaggccaccggcaaccugguggugcccagauacgccuucgccauggagagaaacgccggcagcggcaucaucaucagcgacacccccgugcacgacugcaacaccaccugccagacccccaagggcgccaucaacaccagccugcccuuccagaacauccaccccaucaccaucggcaagugccccaaguacgugaagagcaccaagcugagacuggccaccggccugagaaacgugcccagcauccagagcagaggccuguucggcgccaucgccggcuucaucgagggcggcuggaccggcaugguggacggcugguacggcuaccaccaccagaacgagcagggcagcggcuacgccgccgaccugaagagcacccagaacgccaucgacaagaucaccaacaaggugaacagcgugaucgagaagaugaacacccaguucaccgccgugggcaaggaguucaaccaccuggagaagagaaucgagaaccugaacaagaagguggacgacggcuuccuggacaucuggaccuacaacgccgagcugcuggugcugcuggagaacgagagaacccuggacuaccacgacagcaacgugaagaaccuguacgagaaggugagaagccagcugaagaacaacgccaaggagaucggcaacggcugcuucgaguucuaccacaagugcgacaacaccugcauggagagcgugaagaacggcaccuacgacuaccccaaguacagcgaggaggccaagcugaacagagaggagaucgacggcgugaagcuggagagcaccagaaucuaccagauccuggccaucuacagcaccguggccagcagccuggugcugguggugagccugggcgccaucagcuucuggaugugcagcaacggcagccugcagugcagaaucugcaucuga

SEQ ID NO: 166188 - RNA, 1701 nt, Artificial Sequence; identical to SEQ ID NO: 164281
  derived and/or modified CDS sequence (opt4) from hemagglutinin__InfluenzaA__ADO25162

SEQ ID NO: 166189 - RNA, 1701 nt, Artificial Sequence; identical to SEQ ID NO: 164281
  derived and/or modified CDS sequence (opt4) from hemagglutinin__InfluenzaA__ADO25172

SEQ ID NO: 166190 - RNA, 1701 nt, Artificial Sequence; identical to SEQ ID NO: 164281
  derived and/or modified CDS sequence (opt4) from hemagglutinin__InfluenzaA__ADO25182

SEQ ID NO: 166191 - RNA, 1701 nt, Artificial Sequence; identical to SEQ ID NO: 162729
  derived and/or modified CDS sequence (opt4) from hemagglutinin__InfluenzaA__ADO25192

SEQ ID NO: 166192 - RNA, 1701 nt, Artificial Sequence; identical to SEQ ID NO: 162729
  derived and/or modified CDS sequence (opt4) from hemagglutinin__InfluenzaA__ADO25202

SEQ ID NO: 166193 - RNA, 1701 nt, Artificial Sequence
  derived and/or modified CDS sequence (opt4) from hemagglutinin__InfluenzaA__ADO25212
augaaggccauccugguggugcugcuguacaccuucgccaccgccaacgccgacacccugugcaucggcuaccacgccaacaacagcaccgacaccguggacaccgugcuggagaagaacgugaccgugacccacagcgugaaccugcuggaggacaagcacaacggcaagcugugcaagcugagaggcguggccccccugcaccugggcaagugcaacaucgccggcuggauccugggcaaccccgagugcgagagccugagcaccgccagcagcuggagcuacaucguggagaccagcagcagcgacaacggcaccugcuaccccggcgacuucaucgacuacgaggagcugagagagcagcugagcagcgugagcagcuucgagagauucgagaucuuccccaagaccagcagcuggcccaaccacgacagcaacaagggcgugaccgccgccugcccccacgccggcgccaagagcuucuacaagaaccugaucuggcuggugaagaagggcaacagcuaccccaagcugagcaagagcuacaucaacgacaagagaaaggaggugcuggugcuguggggcauccaccaccccagcaccagcgccgaccagcagagccuguaccagaacgccgacagcuacguguucgugggcaccagcagauacagcaagaaguucaagcccgagaucgccaucagacccaaggugagagaccaggagggcagaaugaacuacuacuggacccugguggagcccggcgacaagaucaccuucgaggccaccggcaaccugguggugcccagauacgccuucgccauggagagaaacgccggcagcggcaucaucaucagcgacacccccgugcacgacugcaacaccaccugccagacccccgagggcgccaucaacaccagccugcccuuccagaacauccaccccaucaccaucggcaagugccccaaguacgugaagagcaccaagcugagacuggccaccggccugagaaacgugcccagcauccagagcagaggccuguucggcgccaucgccggcuucaucgagggcggcuggaccggcaugguggacggcugguacggcuaccaccaccagaacgagcagggcagcggcuacgccgccgaccugaagagcacccagaacgccaucgacgagaucaccaacaaggugaacagcgugaucgagaagaugaacacccaguucaccgccgugggcaaggaguucaaccaccuggagaagagaaucgagaaccugaacaagaagguggacgacggcuuccuggacaucuggaccuacaacgccgagcugcuggugcugcuggagaacgagagaacccuggacuaccacgacagcaacgugaagaaccuguacgagaaggugagaagccagcugaagaacaacgccaaggagaucggcaacggcugcuucgaguucuaccacaagugcgacaacaccugcauggagagcgugaagaacggcaccuacgacuaccccaaguacagcgaggaggccaagcugaacagagaggagaucgacggcgugaagcuggagagcaccagaaucuaccagauccuggccaucuacagcaccguggccagcagccuggugcugguggugagccugggcgccaucagcuucuggaugugcagcaacggcagccugcagugcagaaucugcaucuga

SEQ ID NO: 166194 - RNA, 1701 nt, Artificial Sequence
  derived and/or modified CDS sequence (opt4) from hemagglutinin__InfluenzaA__ADO25222
augaaggccauccugguggugcugcuguacaccuucgccaccgccaacgccgacacccugugcaucggcuaccacgccaacaacagcaccgacaccguggacaccgugcuggagaagaacgugaccgugacccacagcgugaaccugcuggaggacaagcacaacggcaagcugugcaagcugagaggcguggccccccugcaccugggcaagugcaacaucgccggcuggauccugggcaaccccgagugcgagagccugagcaccgccagcagcuggagcuacaucguggagaccagcagcagcgacaacggcaccugcuaccccggcgacuucaucgacuacgaggagcugagagagcagcugagcagcgugagcagcuucgagagauucgagaucuuccccaagaccagcagcuggcccaaccacgacagcaacaagggcgugaccgccgccugcccccacgccggcgccaagagcuucuacaagaaccugaucuggcuggugaagaagggcaacagcuaccccaagcugaacaagagcuacaucaacgacaagggcaaggaggugcuggugcuguggggcauccaccaccccagcaccagcgccgaccagcagagccuguaccagaacgccgacgccuacguguucgugggcaccagcagauacagcaagaaguucaagcccgagaucgccaucagacccaaggugagagaccaggagggcagaaugaacuacuacuggacccugguggagcccggcgacaagaucaccuucgaggccaccggcaaccugguggugcccagauacgccuucgccauggagagaaacgccggcagcggcaucaucaucagcgacacccccgugcacgacugcaacaccaccugccagacccccaagggcgccaucaacaccagccugcccuuccagaacauccaccccaucaccaucggcaagugccccaaguacgugaagagcaccaagcugagacuggccaccggccugagaaacgugcccagcauccagagcagaggccuguucggcgccaucgccggcuucaucgagggcggcuggaccggcaugguggacggcugguacggcuaccaccaccagaacgagcagggcagcggcuacgccgccgaccugaagagcacccagaacgccaucgacaagaucaccaacaaggugaacagcgugaucgagaagaugaacacccaguucaccgccgugggcaaggaguucaaccaccuggagaagagaaucgagaaccugaacaagaagguggacgacggcuuccuggacaucuggaccuacaacgccgagcugcuggugcugcuggagaacgagagaacccuggacuaccacgacagcaacgugaagaaccuguacgagaaggugagaagccagcugaagaacaacgccaaggagaucggcaacggcugcuucgaguucuaccacaagugcgacaacaccugcauggagagcgugaagaacggcaccuacgacuaccccaaguacagcgaggaggccaagcugaacagagaggagaucgacggcgugaagcuggagagcaccagaaucuaccagauccuggccaucuacagcaccguggccagcagccuggugcugguggugagccugggcgccaucagcuucuggaugugcagcaacggcagccugcagugcagaaucugcaucuga

SEQ ID NO: 166195 - RNA, 1701 nt, Artificial Sequence; identical to SEQ ID NO: 164342
  derived and/or modified CDS sequence (opt4) from hemagglutinin__InfluenzaA__ADO25232

SEQ ID NO: 166196 - RNA, 1701 nt, Artificial Sequence; identical to SEQ ID NO: 164281
  derived and/or modified CDS sequence (opt4) from hemagglutinin__InfluenzaA__ADO25242

SEQ ID NO: 166197 - RNA, 1701 nt, Artificial Sequence; identical to SEQ ID NO: 164359
  derived and/or modified CDS sequence (opt4) from hemagglutinin__InfluenzaA__ADO25252

SEQ ID NO: 166198 - RNA, 1701 nt, Artificial Sequence; identical to SEQ ID NO: 164601
  derived and/or modified CDS sequence (opt4) from hemagglutinin__InfluenzaA__ADO25262

SEQ ID NO: 166199 - RNA, 1701 nt, Artificial Sequence
  derived and/or modified CDS sequence (opt4) from hemagglutinin__InfluenzaA__ADO25272
augaaggccauccugguggugcugcuguacaccuucgccaccgccaacgccgacacccugugcaucggcuaccacgccaacaacagcaccgacaccguggacaccgugcuggagaagaacgugaccgugacccacagcgugaaccugcuggaggacaagcacaacggcaagcugugcaagcugagaggcguggccccccugcaccugggcaagugcaacaucgccggcuggauccugggcaaccccgagugcgagagccugagcaccgccagcagcuggagcuacaucguggagaccagcagcagcgacaacggcaccugcuaccccggcgacuucaucgacuacgaggagcugagagagcagcugagcagcgugagcagcuucgagagauucgagauguuccccaagaccagcagcuggcccaaccacgacagcaacaagggcgugaccgccgccugcccccacgccggcgugaagagcuucuacaagaaccugaucuggcuggugaagaagggcaacagcuaccccaagcugagcaagagcuacaucaacgacaagggcaaggaggugcuggugcuguggggcauccaccaccccagcaccagcgccgaccagcagagccuguaccagaacgccgacgccuacguguucgugggcaccagcagauacagcaagaaguucaagcccgagaucgccaucagacccaaggugagagaccaggagggcagaaugaacuacuacuggacccugguggagcccggcgacaagaucaccuucgaggccaccggcaaccugguggugcccagauacgccuucgccauggagagaaacgccggcagcggcaucaucaucagcgacacccccgugcacgacugcaacaccaccugccagacccccaagggcgccaucaacaccagccugcccuuccagaacauccaccccaucaccaucggcaagugccccaaguacgugaagagcaccaagcugagacuggccaccggccugagaaacgugcccagcauccagagcagaggccuguucggcgccaucgccggcuucaucgagggcggcuggaccggcaugguggacggcugguacggcuaccaccaccagaacgagcagggcagcggcuacgccgccgaccugaagagcacccagaacgccaucgacgagaucaccaacaaggugaacagcgugaucgagaagaugaacacccaguucaccgccgugggcaaggaguucaaccaccuggagaagagaaucgagaaccugaacaagaagguggacgacggcuuccuggacaucuggaccuacaacgccgagcugcuggugcugcuggagaacgagagaacccuggacuaccacgacagcaacgugaagaaccuguacgagaaggugagaagccagcugaagaacaacgccaaggagaucggcaacggcugcuucgaguucuaccacaagugcgacaacaccugcauggagagcgugaagaacggcaccuacgacuaccccaaguacagcgaggaggccaagcugaacagagaggagaucgacggcgugaagcuggagagcaccagaaucuaccagauccuggccaucuacagcaccguggccagcagccuggugcugguggugagccugggcgccaucagcuucuggaugugcagcaacggcagccugcagugcagaaucugcaucuga

SEQ ID NO: 166200 - RNA, 1701 nt, Artificial Sequence; identical to SEQ ID NO: 164342
  derived and/or modified CDS sequence (opt4) from hemagglutinin__InfluenzaA__ADO25282

SEQ ID NO: 166201 - RNA, 1698 nt, Artificial Sequence; identical to SEQ ID NO: 162548
  derived and/or modified CDS sequence (opt4) from hemagglutinin__InfluenzaA__ADO27622

SEQ ID NO: 166202 - RNA, 1701 nt, Artificial Sequence; identical to SEQ ID NO: 162729
  derived and/or modified CDS sequence (opt4) from hemagglutinin__InfluenzaA__ADO29887

SEQ ID NO: 166203 - RNA, 1701 nt, Artificial Sequence
  derived and/or modified CDS sequence (opt4) from hemagglutinin__InfluenzaA__ADO29888
augaaggccauccugguggugcugcuguacaccuucgccaccgccaacgccgacacccugugcaucggcuaccacgccaacaacagcaccgacaccguggacaccgugcuggagaagaacgugaccgugacccacagcgugaaccugcuggaggacaagcacaacggcaagcugugcagacugagaggcguggccccccugcaccugggcaagugcaacaucgccggcuggauccugggcaaccccgagugcgagagccugagcaccgccagcagcuggagcuacaucguggagaccagcagcagcgacaacggcaccugcuaccccggcgacuucaucgacuacgaggagcugagagagcagcugagcagcgugagcagcuucgagagauucgagaucuuccccaagaccagcagcuggcccaaccacgaccccaacaagggcgugaccgccgccugcccccacgccggcgccaagagcuucuacaagaaccugaucuggcuggugaagaagggcaacagcuaccccaagcugagcaagagcuacaucaacgacaagggcaaggaggugcuggugcuguggggcauccaccaccccagcaccagcgccgaccagcagagccuguaccagaacgccgacgccuacguguucgugggcaccagcagauacagcaagaaguucaagcccgagaucgccaucagacccaaggugagagaccaggagggcagaaugaacuacuacuggacccugguggagcccggcgacaagaucaccuucgaggccaccggcaaccugguggugcccagauacgccuucgccauggagagaaacgccggcagcggcaucaucaucagcgacacccccgugcacgacugcaacaccaccugccagacccccaagggcgccaucaacaccagccugcccuuccagaacauccaccccaucaccaucggcaagugccccaaguacgugaagagcaccaagcugagacuggccaccggccugagaaacgugcccagcauccagagcagaggccuguucggcgccaucgccggcuucaucgagggcggcuggaccggcaugguggacggcugguacggcuaccaccaccagaacgagcagggcagcggcuacgccgccgaccugaagagcacccagaacgccaucgacgagaucaccaacaaggugaacagcgugaucgagaagaugaacacccaguucaccgccgugggcaaggaguucaaccaccuggagaagagaaucgagaaccugaacaagaagguggacgacggcuuccuggacaucuggaccuacaacgccgagcugcuggugcugcuggagaacgagagaacccuggacuaccacgacagcaacgugaagaaccuguacgagaaggugagaagccagcugaagaacaacgccaaggagaucggcaacggcugcuucgaguucuaccacaagugcgacaacaccugcauggagagcgugaagaacggcaccuacgacuaccccaaguacagcgaggaggccaagcugaacagagaggagaucgacggcgugaagcuggagagcaccagaaucuaccagauccuggccaucuacagcaccguggccagcagccuggugcugguggugagccugggcgccaucagcuucuggaugugcagcaacggcagccugcagugcagaaucugcaucuga

SEQ ID NO: 166204 - RNA, 1701 nt, Artificial Sequence
  derived and/or modified CDS sequence (opt4) from hemagglutinin__InfluenzaA__ADO29889
augaaggccauccugguggugcugcuguacaccuucgccaccgccaacgccgacauccugugcaucggcuaccacgccaacaacagcaccgacaccguggacaccgugcuggagaagaacgugaccgugacccacagcgugaaccugcuggaggacaagcacaacggcaagcugugcaagcugagaggcguggccccccugcaccugggcaagugcaacaucgccggcuggauccugggcaaccccgagugcgagagcuucagcaccagcagcagcuggagcuacaucguggagaccagcagcagcgacaacggcaccugcuaccccggcgacuucaucgacuacgaggagcugagagagcagcugagcagcgugagcagcuucgagagauucgagaucuuccccaagaccagcagcuggcccaaccacgacagcaacaagggcgugaccgccgccugcccccacgccggcgccaagagcuucuacaagaaccugaucuggcuggugaagaagggcaacagcuaccccaagcugagcaagagcuacaucaacgacaagggcaaggaggugcuggugcuguggggcauccaccaccccagcaccagcgccgaccagcagagccuguaccagaacgccgacgccuacguguucgugggcaccagcagauacagcaagaaguucaagcccgagaucgccaucagacccaaggugagagaccaggagggcagaaugaacuacuacuggacccugguggagcccggcgacaagaucaccuucgaggccaccggcaaccugguggugcccagauacgccuucgccauggagagaaacgccggcagcggcaucaucaucagcgacacccccgugcacgacugcaacaccaccugccagacccccaagggcgccaucaacaccagccugcccuuccagaacauccaccccaucaccaucggcaagugccccaaguacgugaagagcaccaagcugagacuggccaccggccugagaaacgugcccagcauccagagcagaggccuguucggcgccaucgccggcuucaucgagggcggcuggaccggcaugguggacggcugguacggcuaccaccaccagaacgagcagggcagcggcuacgccgccgaccugaagagcacccagaacgccaucgacgagaucaccaacaaggugaacagcgugaucgagaagaugaacacccaguucaccgccgugggcaaggaguucaaccaccuggagaagagaaucgagaaccugaacaagaagguggacgacggcuuccuggacaucuggaccuacaacgccgagcugcuggugcugcuggagaacgagagaacccuggacuaccacgacagcaacgugaagaaccuguacgagaaggugagaagccagcugaagaacaacgccaaggagaucggcaacggcugcuucgaguucuaccacaagugcgacaacaccugcauggagagcgugaagaacggcaccuacgacuaccccaaguacagcgaggaggccaagcugaacagagaggagaucgacggcgugaagcuggagagcaccagaaucuaccagauccuggccaucuacagcaccguggccagcagccuggugcugguggugagccugggcgccaucagcuucuggaugugcagcaacggcagccugcagugcagaaucugcaucuga

SEQ ID NO: 166205 - RNA, 1701 nt, Artificial Sequence
  derived and/or modified CDS sequence (opt4) from hemagglutinin__InfluenzaA__ADO29890
augaaggccauccugguggugcugcuguacaccuucgccaccgccaaggccgacacccugugcaucggcuaccacgccaacaacagcgccgacaccguggacaccgugcuggagaagaacgugaccgugacccacagcgugaaccugcuggaggacaagcacaacggcaagcugugcaagcugagaggcguggccccccugcaccugggcaagugcaacaucgccggcuggauccugggcaaccccgagugcgagagccugagcaccgccagcagcuggagcuacaucguggagaccagcagcagcgacaacggcaccugcuaccccggcgacuucaucgacuacgaggagcugagagagcagcugagcagcgugagcagcuucgagagauucgagaucuuccccaagaccagcagcuggcccaaccacgaccccaacaagggcgugaccgccgccugcccccacgccggcgccaagagcuucuacaagaaccugaucuggcuggugaagaagggcaacagcuaccccaagcugagcaagagcuacaucaacgacaagggcaaggaggugcuggugcuguggggcauccaccaccccagcaccagcguggaccagcagagccuguaccagaacgccgacgccuacguguucgugggcaccagcagauacagcaagaaguucaagcccgagaucgccaucagacccaaggugagagaccaggagggcagaaugaacuacuacuggacccugguggagcccggcgacaagaucaccuucgaggccaccggcaaccugguggugcccagauacgccuucgccauggagagaaacgccggcagcggcaucaucaucagcgacacccccgugcacgacugcaacaccaccugccagacccccaagggcgccaucaacaccagccugcccuuccagaacauccaccccaucaccaucggcaagugccccaaguacgugaagagcaccaagcugagacuggccaccggccugagaaacgugcccagcauccagagcagaggccuguucggcgccaucgccggcuucaucgagggcggcuggaccggcaugguggacggcugguacggcuaccaccaccagaacgagcagggcagcggcuacgccgccgaccugaagagcacccagaacgccaucgacgagaucaccaacaaggugaacagcgugaucgagaagaugaacacccaguucaccgccgugggcaaggaguucaaccaccuggagaagagaaucgagaaccugaacaagaagguggacgacggcuuccuggacaucuggaccuacaacgccgagcugcuggugcugcuggagaacgagagaacccuggacuaccacgacagcaacgugaagaaccuguacgagaaggugagaagccagcugaagaacaacgccaaggagaucggcaacggcugcuucgaguucuaccacaagugcgacaacaccugcauggagagcgugaagaacggcaccuacgacuaccccaaguacagcgaggaggccaagcugaacagagaggagaucgacggcgugaagcuggagagcaccagaaucuaccagauccuggccaucuacagcaccguggccagcagccuggugcugguggugagccugggcgccaucagcuucuggaugugcagcaacggcagccugcagugcagaaucugcaucuga

SEQ ID NO: 166206 - RNA, 1701 nt, Artificial Sequence
  derived and/or modified CDS sequence (opt4) from hemagglutinin__InfluenzaA__ADO29891
augaaggccauccugguggugcugcuguacaccuucgccaccgccaacgccgacacccugugcaucggcuaccacgccaacaacagcaccgacaccguggacaccgugcuggagaagaacgugaccgugacccacagcgugaaccugcuggaggacaagcacaacggcaagcugugcaagcugagaggcguggccccccugcaccugggcaagugcaacaucgccggcuggauccugggcaaccccgagugcgagagccugagcaccgccagcagcuggagcuacaucguggagaccagcagcagcgacaacggcaccugcuaccccggcgacuucaucgacuacgaggagcugagagagcagcugagcagcgugagcagcuucgagagauucgagaucuuccccaagaccagcagcuggcccaaccacgacagcaacaagggcgugaccgccgccugcccccacgccggcgccaagagcuucuacaagaaccugaucuggcuggugaagaagggcaacagcuaccccaagcugagcaagagcuacaucaacgacaagggcaaggaggugcuggugcuguggggcauccaccaccccagcaccagcgccgaccagcagagccuguaccagaacgccgacgccuacguguucgugggcaccagcagauacagcaagaaguucaagcccgagaucgccaucagacccaaggugagagaccaggagggcagaaugaacuacuacuggacccugguggagcccggcgacaagaccaccuucgaggccaccggcaaccugguggugcccagauacgccuucgccauggagagaaacgccggcagcggcaucaucaucagcgacacccccgugcacgacugcaacaccaccugccagacccccaagggcgccaucaacaccagccugcccuuccagaacauccaccccaucaccaucggcaagugccccaaguacgugaagagcaccaagcugagacuggccaccggccugagaaacgugcccagcauccagagcagaggccuguucggcgccaucgccggcuucaucgagggcggcuggaccggcaugguggacggcugguacggcuaccaccaccagaacgagcagggcagcggcuacgccgccgaccugaagagcacccagaacgccaucgacaagaucaccaacaaggugaacagcgugaucgagaagaugaacacccaguucaccgccgugggcaaggaguucaaccaccuggagaagagaaucgagaaccugaacaagaagguggacgacggcuuccuggacaucuggaccuacaacgccgagcugcuggugcugagcgagaacgagagaacccuggacuaccacgacagcaacgugaagaaccuguacgagaaggugagaagccagcugaagaacaacgccaaggagaucggcaacggcugcuucgaguucuaccacaagugcgacaacaccugcauggagagcgugaagaacggcaccuacgacuaccccaaguacagcgaggaggccaagcugaacagagaggagaucgacggcgugaagcuggagagcaccagaaucuaccagauccuggccaucuacagcaccguggccagcagccuggugcugguggugagccugggcgccaucagcuucuggaugugcagcaacggcagccugcagugcagaaucugcaucuga

SEQ ID NO: 166207 - RNA, 1701 nt, Artificial Sequence
  derived and/or modified CDS sequence (opt4) from hemagglutinin__InfluenzaA__ADO29892
augaaggccauccugguggugcugcuguacaccuucgccaccgccaaggccgacacccugugcaucggcuaccacgccaacaacagcaccgacaccguggacaccgugcuggagaagaacgugaccgugacccacagcgugaaccugcuggaggacaagcacaacggcaagcugugcaagcugagaggcguggccccccugcaccugggcaagugcaacaucgccggcagaauccugggcaaccccgagugcgagagccugagcaccgccagcagcuggagcuacaucguggagaccagcagcagcgacaacggcaccugcuaccccggcgacuucaucgacuacgaggagcugagagagcagcugagcagcgugagcagcuucgagagauucgagaucuuccccaagaccagcagcuggcccaaccacgaccccaacaagggcgugaccgccgccugcccccacgccggcgccaagagcuucuacaagaaccugaucuggcuggugaagaagggcaacagcuaccccaagcugagcaagagcuacaucaacgacaagggcaaggaggugcuggugcuguggggcauccaccaccccagcaccagcguggaccagcagagccuguaccagaacgccgacgccuacguguucgugggcaccagcagauacagcaagaaguucaagcccgagaucgccaucagacccaaggugagagaccaggagggcagaaugaacuacuacuggacccugguggagcccggcgacaagaucaccuucgaggccaccggcaaccugguggugcccagauacgccuucgccauggagagaaacgccggcagcggcaucaucaucagcgacacccccgugcacgacugcaacaccaccugccagacccccaagggcgccaucaacaccagccugcccuuccagaacauccaccccaucaccaucggcaagugccccaaguacgugaagagcaccaagcugagacuggccaccggccugagaaacgugcccagcauccagagcagaggccuguucggcgccaucgccggcuucaucgagggcggcuggaccggcaugguggacggcugguacggcuaccaccaccagaacgagcagggcagcggcuacgccgccgaccugaagagcacccagaacgccaucgacgagaucaccaacaaggugaacagcgugaucgagaagaugaacacccaguucaccgccgugggcaaggaguucaaccaccuggagaagagaaucgagaaccugaacaagaagguggacgacggcuuccuggacaucuggaccuacaacgccgagcugcuggugcugcuggagaacgagagaacccuggacuaccacgacagcaacgugaagaaccuguacgagaaggugagaagccagcugaagaacaacgccaaggagaucggcaacggcugcuucgaguucuaccacaagugcgacaacaccugcauggagagcgugaagaacggcaccuacgacuaccccaaguacagcgaggaggccaagcugaacagagaggagaucgacggcgugaagcuggagagcaccagaaucuaccagauccuggccaucuacagcaccguggccagcagccuggugcugguggugagccugggcgccaucagcuucuggaugugcagcaacggcagccugcagugcagaaucugcaucuga

SEQ ID NO: 166208 - RNA, 1701 nt, Artificial Sequence; identical to SEQ ID NO: 163527
  derived and/or modified CDS sequence (opt4) from hemagglutinin__InfluenzaA__ADO29893

SEQ ID NO: 166209 - RNA, 1701 nt, Artificial Sequence
  derived and/or modified CDS sequence (opt4) from hemagglutinin__InfluenzaA__ADO29894
augaaggccauccugguggugcugcuguacaccuucgccaccgccaacgccgacacccugugcaucggcuaccacgccaacaacagcaccgacaccguggacaccgugcuggagaugaacgugaccgugacccacagcgugaaccugcuggaggacaagcacaacggcaagcugugcaagcugagaggcguggccccccugcaccugggcaagugcaacaucgccggcuggauccugggcaaccccgagugcgagagcuucagcaccagcagcagcuggagcuacaucguggagaccagcagcagcgacaacggcaccugcuaccccggcgacuucaucgacuacgaggagcugagagagcagcugagcagcgugagcagcuucgagagauucgagaucuuccccaagaccagcagcuggcccaaccacgacagcaacaagggcgugaccgccgccugcccccacgccggcgccaagagcuucuacaagaaccugaucuggcuggugaagaagggcagcagcuaccccaagcugagcaagagcuacaucaacgacaagggcaaggaggugcuggugcuguggggcauccaccaccccagcaccagcgccgaccagcagagccuguaccagaacgccgacgccuacguguucgugggcaccagcagauacagcaagaaguucaagcccgagaucgccaucagacccaaggugagagaccaggagggcagaaugaacuacuacuggacccugguggagcccggcgacaagaucaccuucgaggccaccggcaaccugguggugcccagauacgccuucgccauggagagaaacgccggcagcggcaucaucaucagcgacacccccgugcacgacugcaacaccaccugccagacccccaagggcgccaucaacaccagccugcccuuccagaacauccaccccaucaccaucggcaagugccccaaguacgugaagagcaccaagcugagacuggccaccggccugagaaacgugcccagcauccagagcagaggccuguucggcgccaucgccggcuucaucgagggcggcuggaccggcaugguggacggcugguacggcuaccaccaccagaacgagcagggcagcggcuacgccgccgaccugaagagcacccagaacgccaucgacgagaucaccaacaaggugaacagcgugaucgagaagaugaacacccaguucaccgccgugggcaaggaguucaaccaccuggagaagagaaucgagaaccugaacaagaagguggacgacggcuuccuggacaucuggaccuacaacgccgagcugcuggugcugcuggagaacgagagaacccuggacuaccacgacagcaacgugaagaaccuguacgagaaggugagaagccagcugaagaacaacgccaaggagaucggcaacggcugcuucgaguucuaccacaagugcgacaacaccugcauggagagcgugaagaacggcaccuacgacuaccccaaguacagcgaggaggccaagcugaacagagaggagaucgacggcgugaagcuggagagcaccagaaucuaccagauccuggccaucuacagcaccguggccagcagccuggugcugguggugagccugggcgccaucagcuucuggaugugcagcaacggcagccugcagugcagaaucugcaucuga

SEQ ID NO: 166210 - RNA, 1701 nt, Artificial Sequence
  derived and/or modified CDS sequence (opt4) from hemagglutinin__InfluenzaA__ADO29895
augaaggccauccugguggcccugcuguacaccuucgccaccgccaacgccgacacccugugcaucggcuaccacgccaacaacagcaccgacaccguggacaccgugcuggagaagaacgugaccgugacccacagcgugaaccugcuggaggacaagcacaacggcaagcugugcaagcugagaggcguggccccccugcaccugggcaagugcaacaucgccggcuggauccugggcaaccccgagugcgagagcuucagcaccagcagcagcuggagcuacaucguggagaccagcagcagcgacaacggcaccugcuaccccggcgacuucaucgacuacgaggagcugagagagcagcugagcagcgugagcagcuucgagagauucgagaucuuccccaagaccagcagcuggcccaaccacgacagcaacaagggcgugaccgccgccugcccccacgccggcgccaagagcuucuacaagaaccugaucuggcuggugaagaagggcagcagcuaccccaagcugagcaagagcuacaucaacgacaagggcaaggaggugcuggugcuguggggcauccaccaccccagcaccagcgccgaccagcagagccuguaccagaacgccgacgccuacguguucgugggcaccagcagauacagcaagaaguucaagcccgagaucgccaucagacccaaggugagagaccaggagggcagaaugaacuacuacuggacccugguggagcccggcgacaagaucaccuucgaggccaccggcaaccugguggugcccagauacgccuucgccauggagagaaacgccggcagcggcaucaucaucagcgacacccccgugcacgacugcaacaccaccugccagacccccaagggcgccaucaacaccagccugcccuuccagaacauccaccccaucaccaucggcaagugccccaaguacgugaagggcaccaagcugagacuggccaccggccugagaaacgugcccagcauccagagcagaggccuguucggcgccaucgccggcuucaucgagggcggcuggaccggcaugguggacggcugguacggcuaccaccaccagaacgagcagggcagcggcuacgccgccgaccugaagagcacccagaacgccaucgacgagaucaccaacaaggugaacagcgugaucgagaagaugaacacccaguucaccgccgugggcaaggaguucaaccaccuggagaagagaaucgagaaccugaacaagaagguggacgacggcuuccuggacaucuggaccuacaacgccgagcugcuggugcugcuggagaacgagagaacccuggacuaccacgacagcaacgugaagaaccuguacgagaaggugagaagccagcugaagaacaacgccaaggagaucggcaacggcugcuucgaguucuaccacaagugcgacaacaccugcauggagagagugaagaacggcaccuacgacuaccccaaguacagcgaggaggccaagcugaacagagaggagaucgacggcgugaagcuggagagcaccagaaucuaccagauccuggccaucuacagcaccguggccagcagccuggugcugguggugagccugggcgccaucagcuucuggaugugcagcaacggcagccugcagugcagaaucugcaucuga

SEQ ID NO: 166211 - RNA, 1701 nt, Artificial Sequence
  derived and/or modified CDS sequence (opt4) from hemagglutinin__InfluenzaA__ADO29897
augaaggccauccugguggugcugcuguacaccuucgccaccgccaacgccgacauccugugcaucggcuaccacgccaacaacagcaccgacaccguggacaccgugcuggagaagaacgugaccgugacccacagcgugaaccugcuggaggacaagcacaacggcaagcugugcaagcugagaggcguggccccccugcaccugggcaagugcaacaucgccggcuggauccugggcaaccccgagugcgagagcuucagcaccagcagcagcuggagcuacaucguggagaccagcagcagcgacaacggcaagugcuaccccggcgacuucaucgacuacgaggagcugagagagcagcugagcagcgugagcagcuucgagagauucgagaucuuccccaagaccagcagcuggcccaaccacgacagcaacaagggcgugaccaccgccugcccccacgccggcgccaagagcuucuacaagaaccugaucuggcuggugaagaagggcaacagcuaccccagacugagcaagagcuacaucaacgacaagggcaaggaggugcuggugcuguggggcauccaccaccccagcaccagcgccgaccagcagagccuguaccagaacgccgacgccuacguguucgugggcaccagcagauacagcaagaaguucaagcccgagaucgccaucagacccaaggugagagaccaggagggcagaaugaacuacuacuggacccugguggagcccggcgacaagaucaccuucgaggccaccggcaaccugguggugcccagauacgccuucgccauggagagaaacgccggcagcggcaucaucaucagcgacacccccgugcacggcugcaacaccaccugccagacccccaagggcgccaucaacaccagccugcccuuccagaacauccaccccaucaccaucggcaagugccccaaguacgugaagagcaccaagcugagacuggccaccggccugagaaacgugcccagcauccagagcagaggccuguucggcgccguggccggcuucaucgagggcggcuggaccggcaugguggacggcugguacggcuaccaccaccagaacgagcagggcagcggcuacgccgccgaccugaagagcacccagaacgccaucgacgagaucaccaacaaggugaacagcgugaucgagaagaugaacacccaguucaccgccgugggcaaggaguucaaccaccuggagaagagaaucgagaaccugaacaagaagguggacgacggcuuccuggacaucuggaccuacaacgccgagcugcuggugcugcuggagaacgagagaacccuggacuaccacgacagcaacgugaagaaccuguacgagaaggugagaagccagcugaagaacaacgccaaggagaucggcaacggcugcuucgaguucuaccacaagugcgacaacaccugcauggagagcgugaagaacggcaccuacgacuaccccaaguacagcgaggaggccaagcugaacagagaggagaucgacggcgugaagcuggagagcaccagaaucuaccagauccuggccaucuacagcaccguggccagcagccuggugcugguggugagccugggcgccaucagcuucuggaugugcagcaacggcagccugcagugcagaaucugcaucuga

SEQ ID NO: 166212 - RNA, 1701 nt, Artificial Sequence; identical to SEQ ID NO: 163527
  derived and/or modified CDS sequence (opt4) from hemagglutinin__InfluenzaA__ADO29898

SEQ ID NO: 166213 - RNA, 1701 nt, Artificial Sequence
  derived and/or modified CDS sequence (opt4) from hemagglutinin__InfluenzaA__ADO29899
augaaggccauccugguggugcugcuguacaccuucgccaccgccaacgccgacacccugugcaucggcuaccacgccaacaacagcaccgacaccguggacaccgugcuggagaagaacgugaccgugacccacagcgugaaccugcuggaggacaagcacaacggcaagcugugcaagcugagaggcguggccccccugcaccugggcaagugcaacaucgccggcuggauccugggcaaccccgagugcgagagccugagcaccgccagcagcuggagcuacaucguggagaccagcagcagcgacaacggcaccugcuaccccggcgacuucaucgacuacgaggagcugagagagcagcugagcagcgugagcagcuucgagagauucgagaucuuccccaagaccagcagcuggcccaaccacgacagcaacaagggcgugaccgccgccugcccccacgccggcgccaagagcuucuacaagaaccugaucuggcuggugaagaagggcaacagcuaccccaagcugagcaagagcuacaucaacgacaagggcaaggaggugcuggugcuguggggcauccaccaccccagcaccagcgccgaccagcagagccuguaccagaacgccgacgccuacguguucgugggcaccagcagauacagcaagaaguucaagcccgagaucgccaucagacccaaggugagagaccaggagggcagaaugaacuacuacuggacccugguggagcccggcgacaagaucaccuucgaggccaccggcaaccugguggugcccagauacgccuucgccauggagagaaacgccggcagcggcaucaucaucagcgacacccccgugcacgacugcaacaccaccugccagacccccaagggcgccaucaacaccagccugcccuuccagaacauccaccccaucaccaucggcaagugccccaaguacgugaagagcaccaagcugagacuggccaccggccugagaaacgugcccagcauccagagcagaggccuguucggcgccaucgccggcuucaucgagggcggcuggaccggcaugguggacggcugguacggcuaccaccaccagaacgagcagggcagcggcuacgccgccgaccugaagagcacccagaacgccaucgacaagaucaccaacaaggugaacagcgugaucgagaagaugaacacccaguucaccgccgugggcaaggaguucaaccaccuggagaagagaaucgagaaccugaacaagaagguggacgacggcuuccuggacaucuggaccuacaacgccgagcugcuggugcugcuggagaacgagagaacccuggacuaccacgacagcaacgugaagaaccuguacgagaaggugagaagccagcugaagaacaacgccaaggagaucggcaacggcugcuucgaguucuaccacaagugcgacaacaccugcauggagagcgugaagaacggcaccuacgacuaccccaaguacagcgaggaggccaagcugaacagagaggagaucgacggcgugaagcuggagagcaccagaaucuaccagauccuggccaucuacagcaccguggccagcagccuggugcugguggugagccugggcgccaucagcuucuggaugugcagcaacggcagccugcagugcagaaccugcaucuga

SEQ ID NO: 166214 - RNA, 1701 nt, Artificial Sequence
  derived and/or modified CDS sequence (opt4) from hemagglutinin__InfluenzaA__ADO29900
augaaggccauccugguggugcugcuguacaccuucgccaccgccaacgccgacacccugugcaucggcuaccacgccaacaacagcaccgacaccguggacaccgugcuggagaagaacgugaccgugacccacagcgugaaccugcuggaggacaagcacaacggcaagcugugcaagcugagaggcguggccccccugcaccugggcaagugcaacaucgccggcuggauccugggcaaccccgagugcgagagccugagcaccgccagcagcuggagcuacaucguggagaccagcagcagcgacaacggcaccugcuaccccggcgaccugaucgacuacgaggagcugagagagcagcugagcagcgugagcagcuucgagagauucgagaucuuccccaagaccagcagcuggcccaaccacgaccugaacaagggcgugaccgccgccugcccccacgccggcgccaagagcuucuacaagaaccugaucuggcuggugaagaagggcaacagcuaccccaagcugagcaagagcuacaucaacgacaagggcaaggaggugcuggugcuguggggcauccaccaccccagcaccagcgccgaccagcagagccuguaccagaacgccgacgccuacguguucgugggcaccagcagauacagcaagaagagcaagcccgagaucgccaucagacccaaggugagagaccaggagggcagaaugaacuacuacuggacccugguggagcccggcgacaagaucaccuucgaggccaccggcaaccugguggugcccagauacgccuucgccauggagagaaacgccggcagcggcaucaucaucagcgacacccccgugcacgacugcaacaccaccugccagacccccaagggcgccaucaacaccagccugcccuuccagaacauccaccccaucaccaucggcaagugccccaaguacgugagaagcaccaagcugagacuggccaccggccugagaaacgugcccagcauccagagcagaggccuguucggcgccaucgccggcuucaucgagggcggcuggaccggcaugguggacggcugguacggcuaccaccaccagaacgagcagggcagcggcuacgccgccgaccugaagagcacccagaacgccaucgacgagaucaccaacaaggugaacagcgugaucgagaagaugaacacccaguucaccgccgugggcaaggaguucaaccaccuggagaagagaaucgagaaccugaacaagaagguggacgacggcuuccuggacaucugggccuacaacgccgagcugcuggugcugcuggagaacgagagaacccuggacuaccacgacagcaacgugaagaaccuguacgagaaggugagaagccagcugaagaacaacgccaaggagaucggcaacggcugcuucgaguucuaccacaagugcgacaacaccugcauggagagcgugaagaacggcaccuacgacuaccccaaguacagcgaggaggccaagcugaacagagaggagaucgacggcgugaagcuggagagcaccagaaucuaccagauccuggccaucuacagcaccguggccagcagccuggugcugguggugagccugggcgccaucagcuucuggaugugcagcaacggcagccugcagugcagaaucugcaucuga

SEQ ID NO: 166215 - RNA, 1701 nt, Artificial Sequence
  derived and/or modified CDS sequence (opt4) from hemagglutinin__InfluenzaA__ADO29901
augaaggccauccugguggugcugcuguacaccuucgccaccgccaacgccgacacccugugcaucggcuaccacgccaacaacagcaccgacaccguggacaccgugcuggagaagaacgugaccgugacccacagcgugaaccugcuggaggacaagcacaacgagaagcugugcaagcugagaggcguggccccccugcaccugggcaagugcaacaucgccggcuggauccugggcaaccccgagugcgagagccugagcaccgccagcagcuggagcuacaucguggagaccagcagcagcgacaacggcaccugcuaccccggcgacuucaucgacuacgaggagcugagagagcagcugagcagcgugagcagcuucgagagauucgagaucuuccccaagaccagcagcuggcccaaccacgacagcaacaagggcgugaccgccgccugcccccacgccggcgccaagagcuucuacaagaaccugaucuggcuggccaagaagggcaacagcuaccccaaggugagcaagagcuacaucaacgacaagggcaaggaggugcuggugcuguggggcauccaccaccccagcaccagcgccgaccagcagagccuguaccagaacgccgacgccuacguguucgugggcaccagcagauacagcaagaaguucaagcccgagaucgccaucagacccaaggugagagaccaggagggcagaaugaacuacuacuggacccugguggagcccggcgacaagaucaccuucgaggccaccggcaaccugguggugcccagauacgccuucgccauggagagaaacgccggcagcggcaucaucaucagcgacacccccgugcacgacugcaacaccaccugccagacccccaagggcgccaucaacaccagccugcccuuccagaacauccaccccaucaccaucggcaagugccccaaguacgugaagagcaccaagcugagacuggccaccggccugagaaacgugcccagcauccagagcagaggccuguucggcgccaucgccggcuucaucgagggcggcuggaccggcaugguggacggcugguacggcuaccaccaccagaacgagcagggcagcggcuacgccgccgaccugaagagcacccagaacgccaucgacgagaucaccaacaaggugaacagcgugaucgagaagaugaacacccaguucaccgccgugggcaaggaguucaaccaccuggagaagagaaucgagaaccugaacaagaagguggacgacggcuuccuggacaucuggaccuacaacgccgagcugcuggugcugcuggagaacgagagaacccuggacuaccacgacagcaacgugaagaaccuguacgagaaggugagaagccagcugaagaacaacgccaaggagaucggcaacggcugcuucgaguucuaccacaagugcgacaacaccugcauggagagcgugaagaacggcaccuacgacuaccccaaguacagcgaggaggccaagcugaacagagaggagaucgacggcgugaagcuggagagcaccagaaucuaccagauccuggccaucuacagcaccguggccagcagccuggugcugguggugagccugggcgccaucagcuucuggaugugcuucaacggcagccugcagugcagaaucugcaucuga

SEQ ID NO: 166216 - RNA, 1701 nt, Artificial Sequence
  derived and/or modified CDS sequence (opt4) from hemagglutinin__InfluenzaA__ADO29902
augaaggccauccugguggugcugcuguacaccuucgccaccgccaacgccgacacccugugcaucggcuaccacgccaacaacagcaccgacaccguggacaccgugcuggagaagaacgugaccgugacccacagcgugaaccugcuggaggacaagcacaacggcaagcugugcaagcugagaggcguggccccccugcaccugggcaagugcaacaucgccggcuggauccugggcaaccccgagugcgagagccugagcaccgccagcagcuggagcuacaucguggagaccagcagcagcgacaacggcaccugcuaccccggcgacuucaucgacuacgaggagcugagagagcagcugagcagcgugagcagcuucgagagauucgagaucuuccccaagaccagcagcuggcccaaccacgacagcaacaagggcgugaccgccgccugcccccacgccggcgccaagagcuucuacaagaaccugaucuggcuggugaagaagggcaacagcuaccccaagcugagcaagagcuacaucaacgacaagggcaaggaggugcuggugcuguggggcauccaccaccccagcaccagcgccgaccagcagagccuguaccagaacgccgacgccuacguguucgugggcaccagcagauacagcaagaaguucaagcccgagaucgccaucagacccaaggugagagaccaggagggcagaaugaacuacuacuggacccugguggagcccggcgacaagaucaccuucgaggccaccggcaaccugguggugcccagauacgccuucgccauggagagaaacgccggcagcggcaucaucaucagcgacacccccgugcacgacugcaacaccaccugccagacccccaagggcgccaucaacaccagccugcccuuccagaacauccaccccaucaccaucggcaagugccccaaguacgugaagagcaccaagcugagacuggccaccggccugagaaacgugcccagcauccagagcagaggccuguucggcgccaucgccggcuucaucgagggcggcuggaccggcaugguggacggcugguacggcuaccaccaccagaacgagcagggcagcggcuacgccgccgaccugaagagcacccagaacgccaucgacaagaucaccaacaaggugaacagcgugaucgagaagaugaacacccaguucaccgccgugggcaaggaguucaaccaccuggagaagagaaucgagaaccugaacaagaagguggacgacggcuuccuggacaucuggaccuacaacgccgagcugcuggugcugcuggagaacgagagaacccuggacuaccacgacagcaacgugaagaaccuguacgagaaggugagaagccagcugaagaacaacgccaaggagaucggcaacggcugcuucgaguucuaccacaagugcgacaacaccugcauggagggcgugaagaacggcaccuacgacuaccccaaguacagcgaggaggccaagcugaacagagaggagaucgacggcgugaagcuggagagcaccagaaucuaccagauccuggccaucuacagcaccguggccagcagccuggugcugguggugagccugggcgccaucagcuucuggaugugcagcaacggcagccugcagugcagaaucugcaucuga

SEQ ID NO: 166217 - RNA, 1701 nt, Artificial Sequence
  derived and/or modified CDS sequence (opt4) from hemagglutinin__InfluenzaA__ADO29903
augaaggccauccugguggugcugcuguacaccuucgccaccgccaacgccgacacccugugcaucggcuaccacgccaacaacagcaccgacaccguggacaccgugcuggagaagaacgugaccgugacccacagcgugaaccugcuggaggacaagcacaacggcaagcugugcaagcugagaggcguggccccccugcaccugggcaagugcaacaccgccggcuggauccugggcaaccccgagugcgagagccugagcaccgccagcagcuggagcuacaucguggagaccagcagcagcgacaacggcaccugcuaccccggcgacuucaucgacuacgaggagcugagagagcagcugagcagcgugagcagcuucgagagauucgagaucuuccccaagaccagcagcuggcccaaccacgaccccaacaagggcgugaccgccgccugcccccacgccggcgccaagagcuucuacaagaaccugaucuggcuggugaagaagggcaacagcuaccccaagcugagcaagagcuacaucaacgacaagggcaaggaggugcuggugcuguggggcauccaccaccccagcaccagcgccgaccagcagagccuguaccagaacgccgacgccuacguguucgugggcaccagcagauacagcaagaaguucaagcccgagaucgccaucagacccaaggugagagaccaggagggcagaaugaacuacuacuggacccugguggagcccggcgacaagaucaccuucgaggccaccggcaaccugguggugcccagauacgccuucgccauggagagaaacgccggcagcggcaucaucaucagcgacacccccgugcacgacugcaacaccaccugccagacccccaagggcgccaucaacaccagccugcccuuccagaacauccaccccaucaccaucggcaagugccccaaguacgugaagagcaccaagcugagacuggccaccggccugagaaacgugcccagcauccagagcagaggccuguucggcgccaucgccggcuucaucgagggcggcuggaccggcaugguggacggcugguacggcuaccaccaccagaacgagcagggcagcggcuacgccgccgaccugaagagcacccagaacgccaucgacgagaucaccaacaaggugaacagcgugaucgagaagaugaacacccaguucaccgccgugggcaaggaguucaaccaccuggagaagagaaucgagaaccugaacaagaagguggacgacggcuuccuggacaucuggaccuacaacgccgagcugcuggugcugcuggagaacgagagaacccuggacuaccacgacagcaacgugaagaaccuguacgagaaggugagaagccagcugaagaacaacgccaaggagaucggcaacggcugcuucgaguucuaccacaagugcgacaacaccugcauggagagcgugaagaacggcaccuacgacuaccccaaguacagcgaggaggccaagcugaacagagaggagaucgacggcgugaagcuggagagcaccagaaucuaccagauccuggccaucuacagcaccguggccagcagccuggugcugguggugagccugggcgccaucagcuucuggaugugcagcaacggcagccugcagugcagaaucugcaucuga

SEQ ID NO: 166218 - RNA, 1701 nt, Artificial Sequence
  derived and/or modified CDS sequence (opt4) from hemagglutinin__InfluenzaA__ADO29904
augaaggccauccugguggugcugcuguacaccuucgccaccgccaacgccgacacccugugcaucggcuaccacgccaacaacagcaccgacaccguggacaccgugcuggagaagaacgugaccgugacccacagcgugaaccugcuggaggacaagcacaacggcaagcugugcaagcugagaggcguggccccccugcaccugggcagaugcaacaucgccggcuggauccugggcaaccccgagugcgagagccugagcaccgccagcagcuggagcuacaucguggagaccagcagcagcgacaacggcaccugcuaccccggcgacuucaucgacuacgaggagcugagagagcagcugagcagcgugagcagcuucgagagauucgagaucuuccccaagaccagcagcuggcccaaccacgaccccaacaagggcgugaccgccgccugcccccacgccggcgccaagagcuucuacaagaaccugaucuggcuggugaagaagggcaacagcuaccccaagcugagcaagagcuacaucaacgacaagggcaaggaggugcuggugcuguggggcauccacagacccagcaccagcgccgaccagcagagccuguaccagaacgccgacgccuacguguucgugggcaccagcagauacagcaagaaguucaagcccgagaucgccaucagacccaaggugggcgaccaggagggcagaaugaacuacuacuggacccugguggagcccggcgacaagaucaccuucgaggccaccggcaaccugguggugcccagauacgccuucgccauggagagaaacgccggcagcggcaucaucaucagcaacacccccgugcacgacugcaacaccaccugccagacccccaagggcgccaucaacaccagccugcccuuccagaacauccaccccaucaccaucggcaagugccccaaguacgugaagagcaccaagcugagacuggccaccggccugagaaacgugcccagcauccagagcagaggccuguucggcgccaucgccggcuucaucgagggcggcuggaccggcaugguggacggcugguacggcuaccaccaccagaacgagcagggcagcggcuacgccgccgaccugaagagcacccagaacgccaucgacgagaucaccaacaaggugaacagcgugaucgagaagaugaacacccaguucaccgccgugggcaaggaguucaaccaccuggagaagagaaucgagaaccugaacaagaagguggacgacggcuuccuggacaucuggaccuacaacgccgagcugcuggugcugcuggagaacgagagaacccuggacuaccacgacagcaacgugaagaaccuguacgagaaggugagaagccagcugaagaacaacgccaaggagaucggcaacggcugcuucgaguucuaccacaagugcgacaacaccugcauggagagcgugaagaacggcaccuacgacuaccccaaguacagcgaggaggccaagcugaacagagaggagaucgacggcgugaagcuggagagcaccagaaucuaccagauccuggccaucuacagcaccguggccagcagccuggugcugguggugagccugggcgccaucagcuucuggaugugcagcaacggcagccugcagugcagaaucugcaucuga

SEQ ID NO: 166219 - RNA, 1701 nt, Artificial Sequence
  derived and/or modified CDS sequence (opt4) from hemagglutinin__InfluenzaA__ADO29905
augaaggccauccugguggugcugcuguacaccuucgccaccgccaacgccgacacccugugcaucggcuaccacgccaacaacagcaccgacaccguggacaccgugcuggagaagaacgugaccgugaccagaagcgugaaccugcuggaggacaagcacaacggcaagcugugcaagcugagaggcguggccccccugcaccugggcaagugcaacaucgccggcuggauccugggcaaccccgagugcgagagccugagcaccgccagcagcuggagcuacaucguggagaccagcagcagcgacaacggcaccugcuaccccggcgacuucaucgacuacgaggagcugagagagcagcugagcagcgugagcagcuucgagagauucgagaucuuccccaagaccagcagcuggcccaaccacgaccccaacaagggcgugaccgccgccugcccccacgccggcgccaagagcuucuacaagaaccugaucuggcuggugaagaagggcaacagcuaccccaagcugagcaagagcuacaucaacgacaagggcaaggaggugcuggugcuguggggcauccaccaccccagcaccagcgccgaccagcagagccuguaccagaacgccgacgccuacguguucgugggcaccagcagauacagcaagaaguucaagcccgagaucgccaucagacccaaggugagagaccaggagggcagaaugaacuacuacuggacccugguggagcccggcgacaagaucaccuucgaggccaccggcaaccugguggugcccagauacgccuucgccauggagagaaacgccggcagcggcaucaucaucagcaacacccccgugcacgacugcaacaccaccugccagacccccaagggcgccaucaacaccagccugcccuuccagaacauccaccccaucaccaucggcaagugccccaaguacgugaagagcaccaagcugagacuggccaccggccugagaaacgugcccagcauccagagcagaggccuguucggcgccaucgccggcuucaucgagggcggcuggaccggcaugguggacggcugguacggcuaccaccaccagaacgagcagggcagcggcuacgccgccgaccugaagagcacccagaacgccaucgacgagaucaccaacaaggugaacagcgugaucgagaagaugaacacccaguucaccgccgugggcaaggaguucaaccaccuggagaagagaaucgagaaccugaacaagaagguggacgacggcuuccuggacaucuggaccuacaacgccgagcugcuggugcugcuggagaacgagagaacccuggacuaccacgacagcaacgugaagaaccuguacgagaaggugagaagccagcugaagaacaacgccaaggagaucggcaacggcugcuucgaguucuaccacaagugcgacaacaccugcauggagagcgugaagaacggcaccuacgacuaccccaaguacagcgaggaggccaagcugaacagagaggagaucgacggcgugaagcuggagagcaccagaaucuaccagauccuggccaucuacagcaccguggccagcagccuggugcugguggugagccugggcgccaucagcuucuggaugugcagcaacggcagccugcagugcagaaucugcaucuga

SEQ ID NO: 166220 - RNA, 1701 nt, Artificial Sequence
  derived and/or modified CDS sequence (opt4) from hemagglutinin__InfluenzaA__ADO29906
augaaggccauccugguggugcugcuguacaccuucgccaccgccaacgccgacacccugugcaucggcuaccacgccaacaacagcaccgacaccguggacaccgugcuggagaagaacgugaccgugacccacagcgugaaccugcuggaggacaagcacaacagaaagcugugcaagcugagaggcguggccccccugcaccugggcaagugcaacaucgccggcuggauccugggcaaccccgagugcgagagccugagcaccgccagcagcuggagcuacaucguggagaccagcagcagcgacaacggcaccugcuaccccggcgacuucaucgacuacgaggagcugagagagcagcugagcagcgugagcagcuucgagagauucgagaucuuccccaagaccagcagcuggcccaaccacgaccccaacaagggcgugaccgccgccugcccccacgccggcgccaagagcuucuacaagaaccugaucuggcuggugaagaagggcaacagcuaccccaagcugagcaagagcuacaucaacgacaagggcaaggaggugcuggugcuguggggcauccaccaccccagcaccagcgccgaccagcagagccuguaccagaacgccgacgccuacguguucgugggcaccagcagauacagcaagaaguucaagcccgagaucgccaucagacccaaggugagagaccaggagggcagaaugaacuacuacuggacccugguggagcccggcgacaagaucaccuucgaggccaccggcaaccugguggugcccagauacgccuucgccauggagagaaacgccggcagcggcaucaucaucagcgacacccccgugcacgacugcaacaccaccugccagacccccaagggcgccaucaacaccagccugcccuuccagaacauccaccccaucaccaucggcaagugccccaaguacgugaagagcaccaagcugagacuggccaccggccugagaaacgugcccagcauccagagcagaggccuguucggcgccaucgccggcuucaucgagggcggcuggaccggcaugguggacggcugguacggcuaccaccaccagaacgagcagggcagcggcuacgccgccgaccugaagagcacccagaacgccaucgacgagaucaccaacaaggugaacagcgugaucgagaagaugaacacccaguucaccgccgugggcaaggaguucaaccaccuggagaagagaaucgagaaccugaacaagaagguggacgacggcuuccuggacaucuggaccuacaacgccgagcugcuggugcugcuggagaacgagagaacccuggacuaccacgacagcaacgugaagaaccuguacgagaaggugagaagccagcugaagaacaacgccaaggagaucggcaacggcugcuucgaguucuaccacaagugcgacaacaccugcauggagagcgugaagaacggcaccuacgacuaccccaaguacagcgaggaggccaagcugaacagagaggagaucgacggcgugaagcuggagagcaccagaaucuaccagauccuggccaucuacagcaccguggccagcagccuggugcugguggugagccugggcgccaucagcuucuggaugugcagcaacggcagccugcagugcagaaucugcaucuga

SEQ ID NO: 166221 - RNA, 1701 nt, Artificial Sequence
  derived and/or modified CDS sequence (opt4) from hemagglutinin__InfluenzaA__ADO29907
augaaggccauccugguggugcugcuguacaccuucgccaccgccaacgccgacacccugugcaucggcuaccacgccaacaacagcaccgacaccguggacaccgugcuggagaagaacgugaccgugacccacagcgugaaccugcuggaggacaagcacaacggcaagcugugcaagcugagaggcguggccccccugcaccugggcaagugcaacaucgccggcuggauccugggcaaccccgagugcgagagccugagcaccgccagcagcuggagcuacaucguggagaccagcagcagcgacaacggcaccugcuaccccggcgacuucaucgacuacgaggagcugagagagcagcugagcagcgugagcagcuucgagagauucgagaucuuccccaagaccagcagcuggcccaaccacgaccccaacaagggcgugaccgccgccugcccccacgccggcgccaagagcuucuacaagaaccugaucuggcuggugaagaagggcaacagcuaccccaagcugagcaagagcuacaucaacgacaagggcaaggaggugcuggugcuguggggcauccaccaccccagcaccagcgccgaccagcagagccuguaccagaacgccgacgccuacguguucgugggcaccagcagauacagcaagaagcugaagcccgagaucgccaucagacccaaggugagagaccaggagggcagaaugaacuaccacuggacccugguggagcccggcgacaagaucaccuucgaggccaccggcaaccugguggugcccagauacgccuucgccauggagagaaacgccggcagcggcaucaucaucagcgacacccccgugcacgacugcaacaccaccugccagacccccaagggcgccaucaacaccagccugcccuuccagaacauccaccccaucaccaucggcaagugccccaaguacgugaagagcaccaagcugagacuggccaccggccugagaaacgugcccagcauccagagcagaggccuguucggcgccaucgccggcuucaucgagggcggcuggaccggcaugguggacggcugguacggcuaccaccaccagaacgagcagggcagcggcuacgccgccgaccugaagagcacccagaacgccaucgacgagaucaccaacaaggugaacagcgugaucgagaagaugaacacccaguucaccgccgugggcaaggaguucaaccaccuggagaagagaaucgagaaccugaacaagaagguggacgacggcuuccuggacaucuggaccuacaacgccgagcugcuggugcugcuggagaacgagagaacccuggacuaccacgacagcaacgugaagaaccuguacgagaaggugagaagccagcugaagaacaacgccaaggagaucggcaacggcugcuucgaguucuaccacaagugcgacaacaccugcauggagagcgugaagaacggcaccuacgacuaccccaaguacagcgaggaggccaagcugaacagagaggagaucgacggcgugaagcuggagagcaccagaaucuaccagauccuggccaucuacagcaccguggccagcagccuggugcugguggugagccugggcgccaucagcuucuggaugugcagcaacggcagccugcagugcagaaucugcaucuga

SEQ ID NO: 166222 - RNA, 1701 nt, Artificial Sequence
  derived and/or modified CDS sequence (opt4) from hemagglutinin__InfluenzaA__ADO29908
augaaggccauccugguggugcugcuguacaccuucgccaccgccaacgccgacacccugugcaucggcuaccacgccaacaacagcaccgacaccguggacaccgugcuggagaagaacgugaccgugacccacagcgugaaccugcuggaggacaagcacaacggcaagcugugcaagcugagaggcguggccccccugcaccugggcaagugcaacaucgccggcuggauccugggcaaccccgagugcgagagccugagcaccgccagcagcuggagcuacaucguggagaccagcagcagcgacaacggcaccugcuaccccggcgacuucaucgacuacgaggagcugagagagcagcugagcagcgugagcagcuucgagagauucgagaucuuccccaagaccagcagcuggcccaaccacgaccccaacaagggcgugaccgccgccugcccccacgccggcgccaagagcuucuacaagaaccugaucuggcuggugaagaagggcaacagcuaccccaagcugagcaagagcuacaucaacgacaagggcaaggaggugcuggugcuguggggcauccaccaccccagcaccagcgccgaccagcagagccuguaccagaacgccgacgccuacguguucgugggcaccagcagauacagcaagaaguucaagcccgagaucgccaucagacccaaggugagagaccaggaguggagaaugaacuacuacuggacccugguggagcccggcgacaagaucaccuucgaggccaccggcaaccugguggugcccagauacgccuucgccauggagagaaacgccggcagcggcaucaucaucagcgacacccccgugcacgacugcaacaccaccugccagacccccaagggcgccaucaacaccagccugcccuuccagaacauccaccccaucaccaucggcaagugccccaaguacgugaagagcaccaagcugagacuggccaccggccugagaaacgugcccagcauccagagcagaggccuguucggcgccaucgccggcuucaucgagggcggcuggaccggcaugguggacggcugguacggcuaccaccaccagaacgagcagggcagcggcuacgccgccgaccugaagagcacccagaacgccaucgacgagaucaccaacaaggugaacagcgugaucgagaagaugaacacccaguucaccgccgugggcaaggaguucaaccaccuggagaagagaaucgagaaccugaacaagaagguggacgacggcuuccuggacaucuggaccuacaacgccgagcugcuggugcugcuggagaacgagagaacccuggacuaccacgacagcaacgugaagaaccuguacgagaaggugagaagccagcugaagaacaacgccaaggagaucggcaacggcugcuucgaguucuaccacaagugcgacaacaccugcauggagagcgugaagaacggcaccuacgacuaccccaaguacagcgaggaggccaagcugaacagagaggagaucgacggcgugaagcuggagagcaccagaguguaccagauccuggccaccuacagcaccguggccagcagccuggugcugguggugagccugggcgccaucagcuucuggaugugcagcaacggcagccugcagugcagaaucugcaucuga

SEQ ID NO: 166223 - RNA, 1701 nt, Artificial Sequence
  derived and/or modified CDS sequence (opt4) from hemagglutinin__InfluenzaA__ADO29909
augaaggccauccugguggugcugcuguacaccuucgccaccgccaacgccgacacccugagaaucggcuaccacgccaacaacagcaccgacaccguggacaccgugcuggagaagaacgugaccgugacccacagcgugaaccugcuggaggacaagcacaacggcaagcugugcaagcugagaggcguggccccccugcaccugggcaagugcaacaucgccggcuggauccugggcaaccccgagugcgagagccugagcaccgccagcagcuggagcuacaucguggagaccagcagcagcgacaacggcaccugcuaccccggcgacuucaucgacuacgaggagcugagagagcagcugagcagcgugagcagcuucgagagauucgagaucuuccccaagaccagcagcuggcccaaccacgaccccaacaagggcgugaccgccgccugcccccacgccggcgccaagagcuucuacaagaaccugaucuggcuggugaagaagggcaacagcuaccccaagcugagcaagagcuacaucaacgacaagggcaaggaggugcuggugcuguggggcauccaccaccccagcaccagcgccgaccagcagagccuguaccagaacgccgacgccuacguguucgugggcaccagcagauacagcaagaaguucaagcccgagaucgccaucagacccaaggugagagaccaggagggcagaaugaacuacuacuggacccugguggagcccggcgacaagaucaccuucgaggccaccggcaaccugguggugcccagauacgccuucgccauggagagaaacgccggcagcggcaucaucaucagcgacacccccgugcacgacugcaacaccaccugccagacccccaagggcgccaucaacaccagccugcccuuccagaacauccaccccaucaccaucggcaagugccccaaguacgugaagagcaccaagcugagacuggccaccggccugagaaacgugcccagcauccagagcagaggccuguucggcgccaucgccggcuucaucgagggcggcuggaccggcaugguggacggcugguacggcuaccaccaccagaacgagcagggcagcggcuacgccgccgaccugaagagcauccagaacgccaucgacgagaucaccaacaaggugaacagcgugaucgagaagaugaacacccaguucaccgccgugggcaaggaguucaaccaccuggagaagagaaucgagaaccugaacaagaagguggacgacggcuuccuggacaucuggaccuacaacgccgagcugcuggugcugcuggagaacgagagaacccuggacuaccacgacagcaacgugaagaaccuguacgagaaggugagaagccagcugaagaacaacgccaaggagaucggcaacggcugcuucgaguucuaccacaagugcgacaacaccugcauggagagcgugaagaacggcaccuacgacuaccccaaguacagcgaggaggccaagcugaacagagaggagaucgacggcgugaagcuggagagcaccagaaucuaccagauccuggccaucuacagcaccguggccagcagccugauccugguggugagccugggcgccaucagcuucuggaugugcagcaacggcagccugcagugcagaaucugcaucuga

SEQ ID NO: 166224 - RNA, 1701 nt, Artificial Sequence
  derived and/or modified CDS sequence (opt4) from hemagglutinin__InfluenzaA__ADO29910
augaaggccauccugguggugcugcuguacaccuucgccaccgccaacgccgacacccugugcaucggcuaccacgccaacaacagcaccgacaccguggacaccgugcuggagaagaacgugaccgugacccacagcgugaaccugcuggaggacaagcacaacggcaagcugugcaagcccagaggcguggccccccugcaccugggcaagugcaacaucgccggcuggauccugggcaaccccgagugcgagagccugagcaccgccagcagcuggagcuacaucguggagaccagcagcagcgacaacggcaccugcuaccccggcgacuucaucgacuacgaggagcugagagagcagcugagcagcgugagcagcuucgagagauucgagaucuuccccaagaccagcagcuggcccaaccacgaccccaacaagggcgugaccgccgccugcccccacgccggcgccaagagcuucuacaagaaccugaucuggcuggugaagaagggcaacagcuaccccaagcugagcaagagcuacaucaacgacaagggcaaggaggugcuggugcuguggggcauccaccaccccagcaccagcgccgaccagcagagccuguaccagaacgccgacgccuacguguucgugggcaccagcagauacagcaagaaguucaagcccgagaucgccaucagacccaaggugagagaccaggagggcagaaugaacuacuacuggacccugguggagcccggcgacaagaucaccuucgaggccaucggcaaccugguggugcccagauacgccuucgccauggagagaaacgccggcagcggcaucaucaucagcgacacccccgugcacgacugcaacaccaccugccagacccccaagggcgccaucaacaccagccugcccuuccagaacauccaccccaucaccaucggcaagugccccaaguacgugaagagcaccaagcugagacuggccaccggccugagaaacgugcccagcauccagagcagaggccuguucggcgccaucgccggcuucaucgagggcggcuggaccggcaugguggacggcugguacggcuaccaccaccagaacgagcagggcagcggcuacgccgccgaccugaagagcacccagaacgccaucgacgagaucaccaacaaggugaacagcgugaucgagaagaugaacacccaguucaccgccgugggcaaggaguucaaccaccuggagaagagaaucgagaaccugaacaagaagguggacgacggcuuccuggacaucuggaccuacaacgccgagcugcuggugcugcuggagaacgagagaacccuggacuaccacgacagcaacgugaagaaccuguacgagaaggugagaagccagcugaagaacaacgccaaggagaucggcaacggcugcuucgaguucuaccacaagugcgacaacaccugcauggagagcgugaagaacggcaccuacgacuaccccaaguacagcgaggaggccaagcugaacagaggcgagaucgacggcgugaagcuggagagcaccagaaucuaccagauccuggccaucuacagcaccguggccagcagccuggugcugguggugagccugggcgccaucagcuucuggaugugcagcaacggcagccugcagugcagaaucugcaucuga

SEQ ID NO: 166225 - RNA, 1701 nt, Artificial Sequence; identical to SEQ ID NO: 164451
  derived and/or modified CDS sequence (opt4) from hemagglutinin__InfluenzaA__ADO30407

SEQ ID NO: 166226 - RNA, 1701 nt, Artificial Sequence; identical to SEQ ID NO: 164342
  derived and/or modified CDS sequence (opt4) from hemagglutinin__InfluenzaA__ADO30417

SEQ ID NO: 166227 - RNA, 1701 nt, Artificial Sequence; identical to SEQ ID NO: 164064
  derived and/or modified CDS sequence (opt4) from hemagglutinin__InfluenzaA__ADO33202

SEQ ID NO: 166228 - RNA, 1701 nt, Artificial Sequence; identical to SEQ ID NO: 163572
  derived and/or modified CDS sequence (opt4) from hemagglutinin__InfluenzaA__ADO33240

SEQ ID NO: 166229 - RNA, 1701 nt, Artificial Sequence; identical to SEQ ID NO: 162729
  derived and/or modified CDS sequence (opt4) from hemagglutinin__InfluenzaA__ADO33247

SEQ ID NO: 166230 - RNA, 1701 nt, Artificial Sequence; identical to SEQ ID NO: 163572
  derived and/or modified CDS sequence (opt4) from hemagglutinin__InfluenzaA__ADO33254

SEQ ID NO: 166231 - RNA, 1701 nt, Artificial Sequence; identical to SEQ ID NO: 163572
  derived and/or modified CDS sequence (opt4) from hemagglutinin__InfluenzaA__ADO33261

SEQ ID NO: 166232 - RNA, 1701 nt, Artificial Sequence; identical to SEQ ID NO: 163572
  derived and/or modified CDS sequence (opt4) from hemagglutinin__InfluenzaA__ADO33269

SEQ ID NO: 166233 - RNA, 1701 nt, Artificial Sequence; identical to SEQ ID NO: 164064
  derived and/or modified CDS sequence (opt4) from hemagglutinin__InfluenzaA__ADO33277

SEQ ID NO: 166234 - RNA, 1701 nt, Artificial Sequence; identical to SEQ ID NO: 163572
  derived and/or modified CDS sequence (opt4) from hemagglutinin__InfluenzaA__ADO33285

SEQ ID NO: 166235 - RNA, 1701 nt, Artificial Sequence; identical to SEQ ID NO: 164064
  derived and/or modified CDS sequence (opt4) from hemagglutinin__InfluenzaA__ADO33293

SEQ ID NO: 166236 - RNA, 1701 nt, Artificial Sequence; identical to SEQ ID NO: 164064
  derived and/or modified CDS sequence (opt4) from hemagglutinin__InfluenzaA__ADO33307

SEQ ID NO: 166237 - RNA, 1701 nt, Artificial Sequence; identical to SEQ ID NO: 163572
  derived and/or modified CDS sequence (opt4) from hemagglutinin__InfluenzaA__ADO33313

SEQ ID NO: 166238 - RNA, 1701 nt, Artificial Sequence; identical to SEQ ID NO: 165822
  derived and/or modified CDS sequence (opt4) from hemagglutinin__InfluenzaA__ADO33329

SEQ ID NO: 166239 - RNA, 1701 nt, Artificial Sequence; identical to SEQ ID NO: 163572
  derived and/or modified CDS sequence (opt4) from hemagglutinin__InfluenzaA__ADO33337

SEQ ID NO: 166240 - RNA, 1701 nt, Artificial Sequence; identical to SEQ ID NO: 163572
  derived and/or modified CDS sequence (opt4) from hemagglutinin__InfluenzaA__ADO33345

SEQ ID NO: 166241 - RNA, 1701 nt, Artificial Sequence; identical to SEQ ID NO: 164064
  derived and/or modified CDS sequence (opt4) from hemagglutinin__InfluenzaA__ADO33352

SEQ ID NO: 166242 - RNA, 1701 nt, Artificial Sequence; identical to SEQ ID NO: 162729
  derived and/or modified CDS sequence (opt4) from hemagglutinin__InfluenzaA__ADO33360

SEQ ID NO: 166243 - RNA, 1701 nt, Artificial Sequence; identical to SEQ ID NO: 163572
  derived and/or modified CDS sequence (opt4) from hemagglutinin__InfluenzaA__ADO33368

SEQ ID NO: 166244 - RNA, 1701 nt, Artificial Sequence; identical to SEQ ID NO: 163572
  derived and/or modified CDS sequence (opt4) from hemagglutinin__InfluenzaA__ADO33376

SEQ ID NO: 166245 - RNA, 1701 nt, Artificial Sequence; identical to SEQ ID NO: 162716
  derived and/or modified CDS sequence (opt4) from hemagglutinin__InfluenzaA__ADO33384

SEQ ID NO: 166246 - RNA, 1701 nt, Artificial Sequence; identical to SEQ ID NO: 162729
  derived and/or modified CDS sequence (opt4) from hemagglutinin__InfluenzaA__ADO33391

SEQ ID NO: 166247 - RNA, 1701 nt, Artificial Sequence
  derived and/or modified CDS sequence (opt4) from hemagglutinin__InfluenzaA__ADO79917
augaaggccauccugguggugcugcuguacaccuucgccaccgccaacgccgacacccugugcaucggcuaccacgccaacaacagcaccgacaccguggacaccgugcuggagaagaacgugaccgugacccacagcgugaaccugcuggaggacaagcacaacggcaagcugugcaagcugagaggcguggccccccugcaccugggcaagugcaacaucgccggcuggauccugggcaaccccgagugcgagagccugagcaccgccagcagcuggagcuacaucguggagaccagcagcagcgacaacggcaccugcuaccccggcgacuucaucgacuacgaggagcugagagagcagcugagcagcgugagcagcuucgagagauucgagaucuuccccaagaccagcagcuggcccaaccacgacagcaacaagggcgugaccgccgccugcccccacgccggcgccaagagcuucuacaagaaccugaucuggcuggugaagaagggcaacagcuaccccaagcugagcaagagcuacaucaacgacaagggcaaggaggugcuggugcuguggggcauccaccaccccagcaccagcgccgaccagcagagccuguaccagaacgccgacgccuacguguucgugggcaccagcagauacagcaagaaguucaagcccgagaucgccaucagacccaaggugagagacagagagggcagaaugaacuacuacuggacccugguggagcccggcgacaagaucaccuucgaggccaccggcaaccugguggugcccagauacgccuucgccauggagagaaacgccggcagcggcaucaucaucagcgacacccccgugcacaacugcaacaccaccugccagacccccaagggcgccaucaacaccagccugcccuuccagaacauccaccccaucaccaucggcaagugccccaaguacgugaagagcaccaagcugagacuggccaccggccugagaaacgugcccagcauccagagcagaggccuguucggcgccaucgccggcuucaucgagggcggcuggaccggcaugguggacggcugguacggcuaccaccaccagaacgagcagggcagcggcuacgccgccgaccugaagagcacccagaacgccaucgacgagaucaccaacaaggugaacagcgugaucgagaagaugaacacccaguucaccgccgugggcaaggaguucaaccaccuggagaagagaaucgagaaccugaacaagaagguggacgacggcuuccuggacaucuggaccuacaacgccgagcugcuggugcugcuggagaacgagagaacccuggacuaccacgacagcaacgugaagaaccuguacgagaaggugagaagccagcugaagaacaacgccaaggagaucggcaacggcugcuucgaguucuaccacaagugcgacaacaccugcauggagagcgugaagaacggcaccuacgacuaccccaaguacagcgaggaggccaagcugaacagagaggagaucgacggcgugaagcuggagagcaccagaaucuaccagauccuggccaucuacagcaccguggccagcagccuggugcugguggugagccugggcgccaucagcuucuggaugugcagcaacggcagccugcagugcagaaucugcaucuga

SEQ ID NO: 166248 - RNA, 1701 nt, Artificial Sequence
  derived and/or modified CDS sequence (opt4) from hemagglutinin__InfluenzaA__ADO79923
augaaggccauccugguggugcugcuguacaccuucgccaccgccaacgccgacacccugugcaucggcuaccacgccaacaacagcaccgacaccguggacaccgugcuggagaagaacgugaccgugacccacagcgugaaccugcuggaggacaagcacaacggcaagcugugcaagcugagaggcguggccccccugcaccugggcaagugcaacaucgccggcuggauccugggcaaccccgagugcgagagccugagcaccgccagcagcuggagcuacaucguggagaccagcagcaccgacaaguggaccugcuaccccggcgacuucaucgacuacgaggagcugagagagcagcugagcagcgugagcagcuucgagagauucgagaucuuccccaagaccagcagcuggcccaaccacgacagcaacaagggcgugaccgccgccugcccccacgccggcgccaagagcuucuacaagaaccugaucuggcuggugaagaagggcaacagcuaccccaagcugagcaagagcuacaucaacgacaagggcaaggaggugcuggugcuguggggcauccaccaccccagcaccagcgccgaccagcagagccuguaccagaacgccgacgccuacguguucgugggcaccagcagauacagcaagaaguucaagcccgagaucgccaucagacccaaggugagagaccaggagagaagaaugaacuacuacuggacccuggugcagcccggcgacaagaucaccuuccaggccaccggcaaccugguggugcccagauacgccuucgccauggagagaaacgccggcagcggcaucaucaucagcgacacccccgugcacaacugcaacaccaccugccagacccccaagggcgccaucaacaccagccugcccuuccagaacauccaccccaucaccaucggcaagugccccaaguacgugaagagcaccaagcugagacuggccaccggccugagaaacgugcccagcauccagagcagaggccuguucggcgccaucgccggcuucaucgagggcggcuggaccggcaugguggacggcugguacggcuaccaccaccagaacgagcagggcagcggcuacgccgccgaccugaagagcacccagaacgccaucgacgagaucaccaacaaggugaacagcgugaucgagaagaugaacacccaguucaccgccgugggcaaggaguucaaccaccuggagaagagaaucgagaaccugaacaagaagguggacgacggcuuccuggacaucuggaccuacaacgccgagcugcuggugcugcuggagaacgagagaacccuggacuaccacgacagcaacgugaagaaccuguacgagaaggugagaagccagcugaagaacaacgccaaggagaucggcaacggcugcuucgaguucuaccacaagugcgacaacaccugcauggagagcgugaagaacggcaccuacgacuaccccaaguacagcgaggaggccaagcugaacagagaggagaucgacggcgugaagcuggagagcaccagaaucuaccagauccuggccaucuacagcaccguggccagcagccuggugcugguggugagccugggcgccaucagcuucuggaugugcagcaacggcagccugcagugcagaaucugcaucuga

SEQ ID NO: 166249 - RNA, 1701 nt, Artificial Sequence
  derived and/or modified CDS sequence (opt4) from hemagglutinin__InfluenzaA__ADO79924
augaaggccauccugguggugcugcuguacaccuucgccaccgccaacgccgacacccugugcaucggcuaccacgccaacaacagcaccgacaccguggacaccgugcuggagaagaacgugaccgugacccacagcgugaaccugcuggaggacaagcacaacggcaagcugugcaagcugagaggcguggccccccugcaccugggcaagugcaacaucgccggcuggauccugggcaaccccgagugcgagagccugagcaccgccagcagcuggagcuacaucguggagaccagcagcaccgacaaguggaccugcuaccccggcgacuucaucgacuacgaggagcugagagagcagcugagcagcgugagcagcuucgagagauucgagaucuuccccaagaccagcagcuggcccaaccacgacagcaacaagggcgugaccgccgccugcccccacgccggcgccaagagcuucuacaagaaccugaucuggcuggugaagaagggcaacagcuaccccaagcugagcaagagcuacaucaacgacaagggcaaggaggugcuggugcuguggggcauccaccaccccagcaccagcgccgaccagcagagccuguaccagaacgccgacgccuacguguucgugggcaccagcagauacagcaagaaguucaagcccgagaucgccaucagacccaaggugagagacagagagggcagaaugaacuacuacuggacccugaucgagcccggcgacaagaucaccuucgagcccaccggcaaccugguggugcccagauacgccuucgccauggagagaaacgccggcagcggcaucaucaucagcgacacccccgugcacaacugcaacaccaccugccagacccccaagggcgccaucaacaccagccugcccuuccagaacauccaccccaucaccaucggcaagugccccaaguacgugaagagcaccaagcugagacuggccaccggccugagaaacgugcccagcauccagagcagaggccuguucggcgccaucgccggcuucaucgagggcggcuggaccggcaugguggacggcugguacggcuaccaccaccagaacgagcagggcagcggcuacgccgccgaccugaagagcacccagaacgccaucgacgagaucaccaacaaggugaacagcgugaucgagaagaugaacacccaguucaccgccgugggcaaggaguucaaccaccuggagaagagaaucgagaaccugaacaagaagguggacgacggcuuccuggacaucuggaccuacaacgccgagcugcuggugcugcuggagaacgagagaacccuggacuaccacgacagcaacgugaagaaccuguacgagaaggugagaagccagcugaagaacaacgccaaggagaucggcaacggcugcuucgaguucuaccacaagugcgacaacaccugcauggagagcgugaagaacggcaccuacgacuaccccaaguacagcgaggaggccaagcugaacagagaggagaucgacggcgugaagcuggagagcaccagaaucuaccagauccuggccaucuacagcaccguggccagcagccuggugcugguggugagccugggcgccaucagcuucuggaugugcagcaacggcagccugcagugcagaaucugcaucuga

SEQ ID NO: 166250 - RNA, 1701 nt, Artificial Sequence
  derived and/or modified CDS sequence (opt4) from hemagglutinin__InfluenzaA__ADO79925
augaaggccauccugguggugcugcuguacaccuucgccaccgccaacgccgacacccugugcaucggcuaccacgccaacaacagcaccgacaccguggacaccgugcuggagaagaacgugaccgugacccacagcgugaaccugcuggaggacaagcacaacggcaagcugugcaagcugagaggcguggccccccugcaccugggcaagugcaacaucgccggcuggauccugggcaaccccgagugcgagagccugagcaccgccagcagcuggagcuacaucguggagaccagcagcacccacgaguggaccugcuaccccggcgacuucaucgacuacgaggagcugagagagcagcugagcagcgugagcagcuucgagagauucgagaucuuccccaagaccagcagcuggcccaaccacgacagcaacaagggcgugaccgccgccugcccccacgccggcgccaagagcuucuacaagaaccugaucuggcuggugaagaagggcaacagcuaccccaagcugagcaagagcuacaucaacgacaagggcaaggaggugcuggugcuguggggcauccaccaccccagcaccagcgccgaccagcagagccuguaccagaacgccgacgccuacguguucgugggcaccagcagauacagcaagaaguucaagcccgagaucgccaucagacccaaggugagagacagagagggcagaaugaacuacuacuggacccugguggagcccggcgacaagaucaccuucgaggcccccggcaaccugguggugcccagauacgccuucgccauggagagaaacgccggcagcggcaucaucaucagcgacacccccgugcacaacugcaacaccaccugccagacccccaagggcgccaucaacaccagccugcccuuccagaacauccaccccaucaagaucggcaagugcagcaaguacgugaagagcaccaagcugagacuggccaccggccugagaaacgugcccagcauccagagcagaggccuguucggcgccaucgccggcuucaucgagggcggcuggaccggcaugguggacggcugguacggcuaccaccaccagaacgagcagggcagcggcuacgccgccgaccugaagagcacccagaacgccaucgacgagaucaccaacaaggugaacagcgugaucgagaagaugaacacccaguucaccgccgugggcaaggaguucaaccaccuggagaagagaaucgagaaccugaacaagaagguggacgacggcuuccuggacaucuggaccuacaacgccgagcugcuggugcugcuggagaacgagagaacccuggacuaccacgacagcaacgugaagaaccuguacgagaaggugagaagccagcugaagaacaacgccaaggagaucggcaacggcugcuucgaguucuaccacaagugcgacaacaccugcauggagagcgugaagaacggcaccuacgacuaccccaaguacagcgaggaggccaagcugaacagagaggagaucgacggcgugaagcuggagagcaccagaaucuaccagauccuggccaucuacagcaccguggccagcagccuggugcugguggugagccugggcgccaucagcuucuggaugugcagcaacggcagccugcagugcagaaucugcaucuga

SEQ ID NO: 166251 - RNA, 1701 nt, Artificial Sequence
  derived and/or modified CDS sequence (opt4) from hemagglutinin__InfluenzaA__ADO79926
augaaggccauccugguggugcugcuguacaccuucgccaccgccaacgccgacacccugugcaucggcuaccacgccaacaacagcaccgacaccguggacaccgugcuggagaagaacgugaccgugacccacagcgugaaccugcuggaggacaagcacaacggcaagcugugcaagcugagaggcguggccccccugcaccugggcaagugcaacaucgccggcuggauccugggcaaccccgagugcgagagccugagcaccgccagcagcuggagcuacaucguggagaccagcagcaccgacaaguggaccugcuaccccggcgacuucaucgacuacgaggagcugagagagcagcugagcagcgugagcagcuucgagagauucgagaucuuccccaagaccagcagcuggcccaaccacgacagcaacaagggcgugaccgccgccugcccccacgccggcgccaagagcuucuacaagaaccugaucuggcuggugaagaagggcaacagcuucagcaagcugagcaagaccuaccugaacgacaagggcaaggaggugcuggugcuguggggcauccaccaccccagcaccagcgccgaccagcagagccuguaccagaacgccgacgccuacguguucgugggcaccagcagauacagcaagaaguucaagcccgagaucgccaucagacccaaggugagagaccaggagggcagaaugaacuacuacuggacccugguggagcccggcgacaagaucaccuucgaggccaccggcaaccugguggugcccagauacgccuucgccauggagagaaacgugggcagcggcaucaucaucagcgacacccccgugcacgacugcaacaccaccugccagacccccaagggcgccaucaacaccagccugcccuuccagaacauccaccccaucaccaucggcaagugccccaaguacgugaagagcaccaagcugagacuggccaccggccugagaaacgugcccagcauccagagcagaggccuguucggcgccaucgccggcuucaucgagggcggcuggaccggcaugguggacggcugguacggcuaccaccaccagaacgagcagggcagcggcuacgccgccgaccugaagagcacccagaacgccaucgacaagaucaccaacaaggugaacagcgugaucgagaagaugaacacccaguucaccgccgugggcaaggaguucaaccaccuggagaagagaaucgagaaccugaacaagaagguggacgacggcuuccuggacaucuggaccuacaacgccgagcugcuggugcugcuggagaacgagagaacccuggacuaccacgacagcaacgugaagaaccuguacgagaaggugagaagccagcugaagaacaacgccaaggagaugaagaacggcugcuucgaguucuaccacaagugcgacaacaccugcauggagagcgugaagaacggcaccuacgacuaccccaaguacagcgaggaggccaagcugaacagagaggagaucgacggcgugaagcuggagagcaccagaaucuaccagauccuggccaucuacagcaccguggccagcagccuggugcugguggugagccugggcgccaucagcuucuggaugugcagcaacggcagccugcagugcagaaucugcaucuga

SEQ ID NO: 166252 - RNA, 1701 nt, Artificial Sequence
  derived and/or modified CDS sequence (opt4) from hemagglutinin__InfluenzaA__ADO79927
augaaggccauccugguggugcugcuguacaccuucgccaccgccaacgccgacacccugugcaucggcuaccacgccaacaacagcaccgacaccguggacaccgugcuggagaagaacgugaccgugacccacagcgugaaccugcuggaggacaagcacaacggcaagcugugcaagcugagaggcguggccccccugcaccugggcaagugcaacaucgccggcuggauccugggcaaccccgagugcgagagccugagcaccgccagcagcuggagcuacaucguggagaccagcagcaccgacaaguggaccugcuaccccggcgacuucaucgacuacgaggagcugagagagcagcugagcagcgugagcagcuucgagagauucgagaucuuccccaagaccagcagcuggcccaaccacgacagcaacaagggcgugaccgccgccugcccccacgccgccgccaagagcuucuacaagaaccugaucuggcuggugaagaagggcaacagcuaccccaagcugagcaagagcuacaucaacgacaagggcaaggaggugcuggugcuguggggcauccaccaccccagcaccagcgccgaccagcagagccuguaccagaacgccgacgccuacguguucgugggcaccagcagauacagcaagaaguucaagcccgagaucgccaucagacccaaggugagagaccaggagggcagaaugaacuacuacuggacccugguggagcccggcgacaagaucaccuucgaggccaccggcaaccugguggugcccagauacgccuucgccauggagagaaacgccggcagcggcaucaucaucagcgacacccccgugcacgacugcaacaccaccugccagacccccaagggcgccaucaacaccagccugcccuuccagaacauccaccccaucaccaucggcaagugccccaaguacgugaagagcaccaagcugagacuggccaccggccugagaaacauccccagcgugcagagcagaggccuguucggcgccaucgccggcuucaucgagggcggcuggaccggcaugguggacggcugguacggcuaccaccaccagaacgagcagggcagcggcuacgccgccgaccugaagagcacccagaacgccaucgacaagaucaccaacaaggugaacagcgugaucgagaagaugaacacccaguucaccgccgugggcaaggaguucaaccaccuggagaagagaaucgagaaccugaacaagaagguggacgacggcuuccuggacaucuggaccuacaacgccgagcugcuggugcugcuggagaacgagagaacccuggacuaccacgacagcaacgugaagaaccuguacgagaaggugagaagccagcugaagaacaacgccaaggagaugaagaacggcugcuucgaguucuaccacaagugcgacaacaccugcauggagagcgugaagaacggcaccuacgacuaccccaaguacagcgaggaggccaagcugaacagagaggagaucgacggcgugaagcuggagagcaccagaaucuaccagauccuggccaucuacagcaccguggccagcagccuggugcugguggugagccugggcgccaucagcuucuggaugugcagcaacggcagccugcagugcagaaucugcaucuga

SEQ ID NO: 166253 - RNA, 1701 nt, Artificial Sequence
  derived and/or modified CDS sequence (opt4) from hemagglutinin__InfluenzaA__ADO79928
augaaggccauccugguggugcugcuguacaccuucgccaccgccaacgccgacacccugugcaucggcuaccacgccaacaacagcaccgacaccguggacaccgugcuggagaagaacgugaccgugacccacagcgugaaccugcuggaggacaagcacaacggcaagcugugcaagcugagaggcguggccccccugcaccugggcaagugcaacaucgccggcuggauccugggcaaccccgagugcgagagccugagcaccgccagcagcuggagcuacaucguggagaccagcagcaccgacaaguggaccugcuaccccggcgacuucaucgacuacgaggagcugagagagcagcugagcagcgugagcagcuucgagagauucgagaucuuccccaagaccaacagcuggcccaaccacgacagcaacaagggcgugaccgccgccugcccccacgccggcgccaagagcuucuacaagaaccugaucuggcuggugaagaagggcaacagcuaccccaagcugagcaagagcuacaucaacgacaagggcaaggaggugcuggugcuguggggcauccaccaccccagcaccagcgccgaccagcagagccuguaccagaacgccgacgccuacguguucgugggcaccagcaaguacagcaagaaguucaagcccgagaucgccaucagacccaaggugagagaccaggagggcagaaugaacuacuacuggacccugguggagcccggcgacaagaucaccuucgaggccaccggcaaccugguggugcccagauacgccuucgccauggagagaaacgccggcagcggcaucaucaucagcgacacccccgugcacgacugcaacaccaccugccagacccccaagggcgccaucaacaccagccugcccuuccagaacauccaccccaucaccaucggcaagugccccaaguacgugaagagcaccaagcugagacuggccaccggccugagaaacgugcccagcauccagagcagaggccuguucggcgccaucgccggcuucaucgagggcggcuggaccggcaugguggacggcugguacggcuaccaccaccagaacgagcagggcagcggcuacgccgccgaccugaagagcacccagaacgccaucgacgagaucaccaacaaggugaacagcgugaucgagaagaugaacacccaguucaccgccgugggcaaggaguucaaccaccuggagaagagaaucgagaaccugaacaagaagguggacgacggcuuccuggacaucuggaccuacaacgccgagcugcuggugcugcuggagaacgagagaacccuggacuaccacgacagcaacgugaagaaccuguacgagaaggugagaagccagcugaagaacaacgccaaggagaucggcaacggcugcuucgaguucuaccacaagugcgacaacaccugcauggagagcgugaagaacggcaccuacgacuaccccaaguacagcgaggaggccaagcugaacagagaggagaucgacggcgugaagcuggagagcaccagaaucuaccagauccuggccaucuacagcaccguggccagcagccuggugcugguggugagccugggcgccaucagcuucuggaugugcagcaacggcagccugcagugcagaaucugcaucuga

SEQ ID NO: 166254 - RNA, 1701 nt, Artificial Sequence
  derived and/or modified CDS sequence (opt4) from hemagglutinin__InfluenzaA__ADO79929
augaaggccauccugguggugcugcuguacaccuucgccaccgccaacgccgacacccugugcaucggcuaccacgccaacaacagcaccgacaccguggacaccgugcuggagaagaacgugaccgugacccacagcgugaaccugcuggaggacaagcacaacggcaagcugugcaagcugagaggcguggccccccugcaccugggcaagugcaacaucgccggcuggauccugggcaaccccgagugcgagagccugagcaccgccagcagcuggagcuacaucguggagaccagcagcaccgacaaguggaccugcuaccccggcgacuucaucgacuacgaggagcugagagagcagcugagcagcgugagcagcuucgagagauucgagaucuuccccaagaccagcagcuggcccaaccacgacagcaacaagggcgugaccgccgccugcccccacgccggcgccaagagcuucuacaagaaccugaucuggcuggugaagaagggcaacagcuaccccaagcugagcaagagcuacaucaacgacaagggcaaggaggugcuggugcuguggggcauccaccaccccagcaccagcgccgaccagcagagccuguaccagaacgccgacgccuacguguucgugggcaccagcagauacagcaagaaguucaagcccgagaucgccaucagacccaaggugagaggccaggagggcagaaugaacuacuacuggacccugguggagcccggcgacaagaucaccuucgaggccaccggcaaccugguggugcccagauacgccuucgccauggagagaaacgccggcagcggcaucaucaucagcgacacccccgugcacgacugcaacaccaccugccagacccccaagggcgccaucaacaccagccugcccuuccagaacauccaccccaucaccaucggcaagugccccaaguacgugaagagcaccaagcugagacuggccaccggccugagaaacauccccagcauccagagcagaggccuguucggcgccaucgccggcuucaucgagggcggcuggaccggcaugguggacggcugguacggcuaccaccaccagaacgagcagggcagcggcuacgccgccgaccugaagagcacccagaacgccaucgacgagaucaccaacaaggugaacagcgugaucgagaagaugaacacccaguucaccgccgugggcaaggaguucaaccaccuggagaagagaaucgagaaccugaacaagaagguggacgacggcuuccuggacaucuggaccuacaacgccgagcugcuggugcugcuggagaacgagagaacccuggacuaccacgacagcaacgugaagaaccuguacgagaaggugagaagccagcugaagaacaacgccaaggagaucggcaacggcugcuucgaguucuaccacaagugcgacaacaccugcauggagagcgugaagaacggcaccuacgacuaccccaaguacagcgaggaggccaagcugaacagagaggagaucgacggcgugaagcuggagagcaccagaaucuaccagauccuggccaucuacagcaccguggccagcagccuggugcugguggugagccugggcgccaucagcuucuggaugugcagcaacggcagccugcagugcagaaucugcaucuga

SEQ ID NO: 166255 - RNA, 1701 nt, Artificial Sequence
  derived and/or modified CDS sequence (opt4) from hemagglutinin__InfluenzaA__ADO79930
augaaggccauccugguggugcugcuguacaccuucgccaccgccaacgccgacacccugugcaucggcuaccacgccaacaacagcaccgacaccguggacaccgugcuggagaagaacgugaccgugacccacagcgugaaccugcuggaggacaagcacaacggcaagcugugcaagcugagaggcguggccccccugcaccugggcaagugcaacaucgccggcuggauccugggcaaccccgagugcgagagccugagcaccgccagcagcuggagcuacaucguggagaccagcagcaccgacaaguggaccugcuaccccggcgacuucaucgacuacgaggagcugagagagcagcugagcagcgugagcagcuucgagagauucgagaucuuccccaagaccagcagcuggcccaaccacgacagcaacaagggcgugaccgccgccugcccccacgccggcgccaagagcuucuacaagaaccugaucuggcuggugaagaagggcaacagcuaccccaagcugagcaagagcuacaucaacgacaagggcaaggaggugcuggugcuguggggcauccaccaccccagcaccagcgccgaccagcagagccuguaccagaacgccgacgccuacguguucgugggcaccagcagauacagcaagaaguucaagcccgagaucgccaucagacccaaggugagagacagagagggcagaaugaacuacuacuggacccugguggagcccggcgacaagaucaccuucgaggccaccggcaaccugguggugcccagauacgccuucgccauggagagaaacgccggcagcggcaucaucaucagcgacacccccgugcacaacugcaacaccaccugccagacccccaagggcgccaucaacaccagccugcccuuccagaacauccaccccaucaccaucggcaagugccccaaguacgugaagagcaccaagcugagacuggccaccggccugagaaacgugcccagcauccagagcagaggccuguucggcgccaucgccggcuucaucgagggcggcuggaccggcaugguggacggcugguacggcuaccaccaccagaacgagcagggcagcggcuacgccgccgaccugaagagcacccagaacgccaucgacgagaucaccaacaaggugaacagcgugaucgagaagaugaacacccaguucaccgccgugggcaaggaguucaaccaccuggagaagagaaucgagaaccugaacaagaagguggacgacggcuuccuggacaucuggaccuacaacgccgagcugcuggugcugcuggagaacgagagaacccuggacuaccacgacagcaacgugaagaaccuguacgagaaggugagaagccagcugaagaacaacgccaaggagaucggcaacggcugcuucgaguucuaccacaagugcgacaacaccugcauggagagcgugaagaacggcaccuacgacuaccccaaguacagcgaggaggccaagcugaacagagaggagaucgacggcgugaagcuggagagcaccagaaucuaccagauccuggccaucuacagcaccguggccagcagccuggugcugguggugagccugggcgccaucagcuucuggaugugcagcaacggcagccugcagugcagaaucugcaucuga

SEQ ID NO: 166256 - RNA, 1701 nt, Artificial Sequence
  derived and/or modified CDS sequence (opt4) from hemagglutinin__InfluenzaA__ADO84715
augaaggccauccugguggugcugcuguacaccuucgccaccgccaacgccggcacccugugcaucggcuaccacgccaacaacagcaccgacaccguggacaccgugcuggagaagaacgugaccgugacccacagcgugaaccugcuggaggacaagcacaacggcaagcugugcaagcugagaggcguggccccccugcaccugggcaagugcaacaucgccggcuggauccugggcaaccccgagugcgagagccugagcaccgccagcagcuggagcuacaucguggagaccuucagcagcgacaacggcaccugcuaccccggcgacuucaucgacuacgaggagcugagagagcagcugagcagcgugagcagcuucgagagauucgagaucuuccccaagaccagcagcuggcccaaccacgacagcaacaagggcgugaccgccgccugcccccacgccggcgccaagagcuucuacaagaaccugaucuggcuggugaagaagggcaacagcuaccccaagcugagcaagagcuacaucaacgacaagggcaaggaggugcuggugcuguggggcauccaccaccccagcaccagcgccgaccagcagagccuguaccagaacgccgacgccuacguguucgugggcaccagcagauacagcaagaaguucaagcccgagaucgccaucagacccaaggugagagaccaggagggcagaaugaacuacuacuggacccugguggagcccggcgacaagaucaccuucgaggccaccggcaaccugguggugcccagauacgccuucgccauggagagaaacgccggcagcggcaucaucaucagcgacacccccgugcacgacugcaacaccaccugccagacccccaagggcgccaucaacaccagccugcccuuccagaacauccaccccaucaccaucggcaagugccccaaguacgugaagagcaccaagcugagacuggccaccggccugagaaacgugcccagcauccagagcagaggccuguucggcgccaucgccggcuucaucgagggcggcuggaccggcaugguggacggcugguacggcuaccaccaccagaacgagcagggcagcggcuacgccgccgaccugaagagcacccagaacgccaucgacgagaucaccaacaaggugaacagcgugaucgagaagaugaacacccaguucaccgccgugggcaaggaguucaaccaccuggagaagagaaucgagaaccugaacaagaagguggacgacggcuuccuggacaucuggaccuacaacgccgagcugcuggugcugcuggagaacgagagaacccuggacuaccacgacagcaacgugaagaaccuguacgagaaggugagaagccagcugaagaacaacgccaaggagaucggcaacggcugcuucgaguucuaccacaagugcgacaacaccugcauggagagcgugaagaacggcaccuacgacuaccccaaguacagcgaggaggccaagcugaacagagaggagaucgacggcgugaagcuggagagcaccagaaucuaccagauccuggccaucuacagcaccguggccagcagccuggugcugguggugagccugggcgccaucagcuucuggaugugcagcaacggcagccugcagugcagaaucugcaucuga

SEQ ID NO: 166257 - RNA, 1701 nt, Artificial Sequence; identical to SEQ ID NO: 162909
  derived and/or modified CDS sequence (opt4) from hemagglutinin__InfluenzaA__ADP95341

SEQ ID NO: 166258 - RNA, 1701 nt, Artificial Sequence; identical to SEQ ID NO: 162716
  derived and/or modified CDS sequence (opt4) from hemagglutinin__InfluenzaA__ADP95351

SEQ ID NO: 166259 - RNA, 1701 nt, Artificial Sequence; identical to SEQ ID NO: 162716
  derived and/or modified CDS sequence (opt4) from hemagglutinin__InfluenzaA__ADP95361

SEQ ID NO: 166260 - RNA, 1701 nt, Artificial Sequence; identical to SEQ ID NO: 162716
  derived and/or modified CDS sequence (opt4) from hemagglutinin__InfluenzaA__ADP95371

SEQ ID NO: 166261 - RNA, 1701 nt, Artificial Sequence; identical to SEQ ID NO: 162716
  derived and/or modified CDS sequence (opt4) from hemagglutinin__InfluenzaA__ADP95381

SEQ ID NO: 166262 - RNA, 1701 nt, Artificial Sequence; identical to SEQ ID NO: 162716
  derived and/or modified CDS sequence (opt4) from hemagglutinin__InfluenzaA__ADP95391

SEQ ID NO: 166263 - RNA, 1701 nt, Artificial Sequence; identical to SEQ ID NO: 162971
  derived and/or modified CDS sequence (opt4) from hemagglutinin__InfluenzaA__ADQ28007

SEQ ID NO: 166264 - RNA, 1701 nt, Artificial Sequence; identical to SEQ ID NO: 162729
  derived and/or modified CDS sequence (opt4) from hemagglutinin__InfluenzaA__ADQ28008

SEQ ID NO: 166265 - RNA, 1701 nt, Artificial Sequence; identical to SEQ ID NO: 164580
  derived and/or modified CDS sequence (opt4) from hemagglutinin__InfluenzaA__ADQ28009

SEQ ID NO: 166266 - RNA, 1701 nt, Artificial Sequence
  derived and/or modified CDS sequence (opt4) from hemagglutinin__InfluenzaA__ADQ28010
augaaggccauccugguggugcugcuguacaccuucgccaccgccaacgccgacacccugugcaucggcuaccacgccaacaacagcaccgacaccguggacaccgugcuggagaagaacgugaccgugacccacagcgugaaccugcuggaggacaagcacaacggcaagcugugcaagcugagaggcguggccccccugcaccugggcaagugcaacaucgccggcuggauccugggcaaccccgagugcgagagccugagcaccgccagcagcuggagcuacaucguggagaccagcagcagcgacaacggcaccugcuaccccggcgacuucaucaacuacgaggagcugagagagcagcugagcagcgugagcagcuucgagagauucgagaucuuccccaagaccagcagcuggcccaaccacgacagcaacaagggcgugaccgccgccugcccccacgccggcgccaagagcuucuacaagagccugaucuggcuggugaagaagggcaacagcuaccccaagcugagcaagagcuacaucaacgacaagggcaaggaggugcuggugcuguggggcauccaccaccccagcaccagcgccgaccagcagagccuguaccagaacgccgacgccuacguguucgugggcaccagcagauacagcaagaaguucaagcccgagaucgccaucagacccaaggugagagaccaggagggcagaaugaacuacuacuggacccugguggagcccggcgacaagaucaccuucgaggccaccggcaaccugguggugcccagauacgccuucgccauggagagaaacgccggcagcggcaucaucaucagcgacacccccgugcacgacugcaacaccaccugccagacccccaagggcgccaucaacaccagccugcccuuccagaacauccaccccaucaccaucggcaagugccccaaguacgugaagagcaccaagcugagacuggccaccggccugagaaacgugcccagcauccagagcagaggccuguucggcgccaucgccggcuucaucgagggcggcuggaccggcaugguggacggcugguacggcuaccaccaccagaacgagcagggcagcggcuacgccgccgaccugaagagcacccagaacgccaucgacgagaucaccaacaaggugaacagcgugaucgagaagaugaacacccaguucaccgccgugggcaaggaguucaaccaccuggagaagagaaucgagaaccugaacaagaagguggacgacggcuuccuggacaucuggaccuacaacgccgagcugcuggugcugcuggagaacgagagaacccuggacuaccacgacagcaacgugaagaaccuguacgagaaggugagaagccagcugaagaacaacgccaaggagaucggcaacggcugcuucgaguucuaccacaagugcgacaacaccugcauggagagcgugaagaacggcaccuacgacuaccccaaguacagcgaggaggccaagcugaacagagaggagaucgacggcgugaagcuggagagcaccagaaucuaccagauccuggccaucuacagcaccguggccagcagccuggugcugguggugagccugggcgccaucagcuucuggaugugcagcaacggcagccugcagugcagaaucugcaucuga

SEQ ID NO: 166267 - RNA, 1701 nt, Artificial Sequence; identical to SEQ ID NO: 162729
  derived and/or modified CDS sequence (opt4) from hemagglutinin__InfluenzaA__ADQ28011

SEQ ID NO: 166268 - RNA, 1701 nt, Artificial Sequence; identical to SEQ ID NO: 162729
  derived and/or modified CDS sequence (opt4) from hemagglutinin__InfluenzaA__ADQ28012

SEQ ID NO: 166269 - RNA, 1701 nt, Artificial Sequence; identical to SEQ ID NO: 162729
  derived and/or modified CDS sequence (opt4) from hemagglutinin__InfluenzaA__ADQ28013

SEQ ID NO: 166270 - RNA, 1701 nt, Artificial Sequence; identical to SEQ ID NO: 162971
  derived and/or modified CDS sequence (opt4) from hemagglutinin__InfluenzaA__ADQ28014

SEQ ID NO: 166271 - RNA, 1701 nt, Artificial Sequence; identical to SEQ ID NO: 162971
  derived and/or modified CDS sequence (opt4) from hemagglutinin__InfluenzaA__ADQ28015

SEQ ID NO: 166272 - RNA, 1701 nt, Artificial Sequence; identical to SEQ ID NO: 162729
  derived and/or modified CDS sequence (opt4) from hemagglutinin__InfluenzaA__ADQ28016

SEQ ID NO: 166273 - RNA, 1701 nt, Artificial Sequence; identical to SEQ ID NO: 162729
  derived and/or modified CDS sequence (opt4) from hemagglutinin__InfluenzaA__ADQ28017

SEQ ID NO: 166274 - RNA, 1701 nt, Artificial Sequence; identical to SEQ ID NO: 164975
  derived and/or modified CDS sequence (opt4) from hemagglutinin__InfluenzaA__ADQ28018

SEQ ID NO: 166275 - RNA, 1701 nt, Artificial Sequence; identical to SEQ ID NO: 162971
  derived and/or modified CDS sequence (opt4) from hemagglutinin__InfluenzaA__ADQ28019

SEQ ID NO: 166276 - RNA, 1701 nt, Artificial Sequence
  derived and/or modified CDS sequence (opt4) from hemagglutinin__InfluenzaA__ADQ28020
auggaggccauccugguggugcugcuguacaccuucgccaccgccaacgccgacacccugugcaucggcuaccacgccaacaacagcaccgacaccguggacaccgugcuggagaagaacgugaccgugacccacagcgugaaccugcuggaggacaagcacaacggcaagcugugcaagcugagaggcguggccccccugcaccugggcaagugcaacaucgccggcuggauccugggcaaccccgagugcgagagccugagcaccgccagcagcuggagcuacaucguggagaccagcagcagcgacaacggcaccugcuaccccggcgacuucaucgacuacgaggagcugagagagcagcugagcagcgugagcagcuucgagagauucgagaucuuccccaagaccagcagcuggcccaaccacgacagcaacaagggcgugaccgccgccugcccccaggccggcgccaagagcuucuacaagaaccugaucuggcuggugaagaagggcaacagcuaccccaagcugagcaagagcuacaucaacgacaagggcaaggaggugcuggugcuguggggcauccaccaccccagcaccagcgccgaccagcagagccuguaccagaacgccgacgccuacguguucgugggcagcagcagauacagcaagaaguucaagcccgagaucgccaucagacccaaggugagagaccaggagggcagaaugaacuacuacuggacccugguggagcccggcgacaagaucaccuucgaggccaccggcaaccugguggugcccagauacgccuucgccauggagagaaacgccggcagcggcaucaucaucagcgacacccccgugcacgacugcaacaccaccugccagacccccaagggcgccaucaacaccagccugcccuuccacaacauccaccccaucaccaucggcaagugccccaaguacgugaagagcaccaagcugagacuggccaccggccugagaaacgugcccagcauccagagcagaggccuguucggcgccaucgccggcuucaucgagggcggcuggaccggcaugguggacggcugguacggcuaccaccaccagaacgagcagggcagcggcuacgccgccgaccugaagagcacccagaacgccaucgacgagaucaccaacaaggugaacagcgugaucgagaagaugaacacccaguucaccgccgugggcaaggaguucaaccaccuggagaagagaaucgagaaccugaacaagaagguggacgacggcuuccuggacaucuggaccuacaacgccgagcugcuggugcugcuggagaacgagagaacccuggacuaccacgacagcaacgugaagaaccuguacgagaaggugagaagccagcugaagaacaacgccaaggagaucggcaacggcugcuucgaguucuaccacaagugcgacaacaccugcauggagagcgugaagaacggcaccuacgacuaccccaaguacagcgaggaggccaagcugaacagagaggagaucgacggcgugaagcuggagagcaccagaaucuaccagauccuggccaucuacagcaccguggccagcagccuggugcugguggugagccugggcgccaucagcuucuggaugugcagcaacggcagccugcagugcagaaucugcaucuga

SEQ ID NO: 166277 - RNA, 1701 nt, Artificial Sequence; identical to SEQ ID NO: 163923
  derived and/or modified CDS sequence (opt4) from hemagglutinin__InfluenzaA__ADQ28021

SEQ ID NO: 166278 - RNA, 1701 nt, Artificial Sequence
  derived and/or modified CDS sequence (opt4) from hemagglutinin__InfluenzaA__ADQ28022
augaaggccauccugguggugcugcuguacaccuucgccaccgccaacgccgacacccugugcaucggcuaccacgccaacaacagcaccgacaccguggacaccgugcuggagaagaacgugaccgugacccacagcgugaaccugcuggaggacaagcacaacggcaagcugugcaagcugagaggcguggccccccugcaccugggcaagugcaacaucgccggcuggauccugggcaaccccgagugcgagagccugagcaccgccagcagcuggagcuacaucguggagaccagcagcagcgacaacggcaccugcuaccccggcaacuucaucgacuacgaggagcugagagagcagcugagcagcgugagcagcuucgagagauucgagaucuuccccaagaccagcagcuggcccaaccacgacagcaacaagggcgugaccgccgccugcccccacgccggcgccaagagcuucuacaagaaccugaucuggcuggugaagaagggcaacagcuaccccaagcugagcaagagcuacaucaacgacaagggcaaggaggugcuggugcuguggggcauccaccaccccagcaccagcgccgaccagcagagccuguaccagaacgccgacgccuacguguucgugggcaccagcagauacagcaagaaguucaagcccgagaucgccaucagacccaaggugagaggccaggagggcagaaugaacuacuacuggacccugguggagcccggcgacaagaucaccuucgaggccaccggcaaccugguggugcccagauacgccuucgccauggagagaaacgccggcagcggcaucaucaucagcgacacccccgugcacgacugcaacaccaccugccagacccccaagggcgccaucaacaccagccugcccuuccagaacauccaccccaucaccaucggcaagugccccaaguacgugaagagcaccaagcugagacuggccaccggccugagaaacgugcccagcauccagagcagaggccuguucggcgccaucgccggcuucaucgagggcggcuggaccggcaugguggacggcugguacggcuaccaccaccagaacgagcagggcagcggcuacgccgccgaccugaagagcacccagaacgccaucgacgagaucaccaacaaggugaacagcgugaucgagaagaugaacacccaguucaccgccgugggcaaggaguucaaccaccuggagaagagaaucgagaaccugaacaagaagguggacgacggcuuccuggacaucuggaccuacaacgccgagcugcuggugcugcuggagaacgagagaacccuggacuaccacgacagcaacgugaagaaccuguacgagaaggugagaagccagcugaagaacaacgccaaggagaucggcaacggcugcuucgaguucuaccacaagugcgacaacaccugcauggagagcgugaagaacggcaccuacgacuaccccaaguacagcgaggaggccaagcugaacagagaggagaucgacggcgugaagcuggagagcaccagaaucuaccagauccuggccaucuacagcaccguggccagcagccuggugcugguggugagccugggcgccaucagcuucuggaugugcagcaacggcagccugcagugcagaaucugcaucuga

SEQ ID NO: 166279 - RNA, 1701 nt, Artificial Sequence; identical to SEQ ID NO: 162729
  derived and/or modified CDS sequence (opt4) from hemagglutinin__InfluenzaA__ADQ28023

SEQ ID NO: 166280 - RNA, 1701 nt, Artificial Sequence; identical to SEQ ID NO: 162971
  derived and/or modified CDS sequence (opt4) from hemagglutinin__InfluenzaA__ADQ28024

SEQ ID NO: 166281 - RNA, 1701 nt, Artificial Sequence; identical to SEQ ID NO: 162971
  derived and/or modified CDS sequence (opt4) from hemagglutinin__InfluenzaA__ADQ28025

SEQ ID NO: 166282 - RNA, 1701 nt, Artificial Sequence; identical to SEQ ID NO: 163474
  derived and/or modified CDS sequence (opt4) from hemagglutinin__InfluenzaA__ADQ28028

SEQ ID NO: 166283 - RNA, 1701 nt, Artificial Sequence; identical to SEQ ID NO: 164954
  derived and/or modified CDS sequence (opt4) from hemagglutinin__InfluenzaA__ADQ28029

SEQ ID NO: 166284 - RNA, 1701 nt, Artificial Sequence
  derived and/or modified CDS sequence (opt4) from hemagglutinin__InfluenzaA__ADQ28030
augaaggccauccugguggugcugcuguacaccuucgccaccgccaacgccgacacccugugcaucggcuaccacgccaacaacagcaccgacaccguggacaccgugcuggagaagaacgugaccgugacccacagcgugaaccugcuggaggacaagcacaacggcaagcugugcaagcugagaggcguggccccccugcaccugggcaagugcaacaucgccggcuggauccugggcaaccccgagugcgagagccugagcaccgccagcagcuggagcuacaucguggagaccagcagcagcgacaacggcaccugcuaccccggcgacuucaucaacuacgaggagcugagagagcagcugagcagcgugagcagcuucgagagauucgagaucuuccccaagaccagcagcuggcccaaccacgacagcaacaagggcaucaccgccgccugcccccacgccggcgccaagagcuucuacaagaaccugaucuggcuggugaagaagggcaacagcuaccccaagcugagcaagagcuacaucaacgacaagggcaaggaggugcuggugcuguggggcauccaccaccccagcaccagcgccgaccagcagagccuguaccagaacgccgacgccuacguguucgugggcaccagcagauacagcaagaaguucaagcccgagaucgccaucagacccaaggugagagaccaggagggcagaaugaacuacuacuggacccugguggagcccggcgacaagaucaccuucgaggccaccggcaaccugguggugcccagauacgccuucgccauggagagaaacgccggcagcggcaucaucaucagcgacacccccgugcacgacugcaacaccaccugccagacccccaagggcgccaucaacaccagccugcccuuccagaacauccaccccaucaccaucggcaagugccccaaguacgugaagagcaccaagcugagacuggccaccggccugagaaacgugcccagcauccagagcagaggccuguucggcgccaucgccggcuucaucgagggcggcuggaccggcaugguggacggcugguacggcuaccaccaccagaacgagcagggcagcggcuacgccgccgaccugaagagcacccagaacgccaucgacgagaucaccaacaaggugaacagcgugaucgagaagaugaacacccaguucaccgccgugggcaaggaguucaaccaccuggagaagagaaucgagaaccugaacaagaagguggacgacggcuuccuggacaucuggaccuacaacgccgagcugcuggugcugcuggagaacgagagaacccuggacuaccacgacagcaacgugaagaaccuguacgagaaggugagaagccagcugaagaacaacgccaaggagaucggcaacggcugcuucgaguucuaccacaagugcgacaacaccugcauggagagcgugaagaacggcaccuacgacuaccccaaguacagcgaggaggccaagcugaacagagaggagaucgacggcgugaagcuggagagcaccagaaucuaccagauccuggccaucuacagcaccguggccagcagccuggugcugguggugagccugggcgccaucagcuucuggaugugcagcaacggcagccugcagugcagaaucugcaucuga

SEQ ID NO: 166285 - RNA, 1701 nt, Artificial Sequence; identical to SEQ ID NO: 163923
  derived and/or modified CDS sequence (opt4) from hemagglutinin__InfluenzaA__ADQ28031

SEQ ID NO: 166286 - RNA, 1701 nt, Artificial Sequence; identical to SEQ ID NO: 162971
  derived and/or modified CDS sequence (opt4) from hemagglutinin__InfluenzaA__ADQ28032

SEQ ID NO: 166287 - RNA, 1701 nt, Artificial Sequence
  derived and/or modified CDS sequence (opt4) from hemagglutinin__InfluenzaA__ADQ28034
augaaggccauccugguggugcugcuguacaccuucgccaccgccaacgccgacacccugugcaucggcuaccacgccaacaacagcaccgacaccguggacaccgugcuggagaagaacgugaccgugacccacagcgugaaccugcuggaggacaagcacaacggcaagcugugcaagcugagaggcguggccccccugcaccugggcaagugcaacaucgccggcuggauccugggcaaccccgagugcgagagccugagcaccgccagcagcuggagcuacaucguggagaccagcagcagcgacaacggcaccugcuaccccggcgacuucaucaacuacgaggagcugagagagcagcugagcagcgugagcagcuucgagagauucgagaucuuccccaagaccagcagcuggcccaaccacgacagcaacaagggcgugaccgccgccugcccccacgccggcgccaagagcuucuacaagaaccugaucuggcuggugaagaagggcaacagcuaccccaagcugagcaagagcuacaucaacgacaagggcaaggaggugcuggugcuguggggcauccaccaccccagcaccagcgccgaccagcagagccuguaccagaacgccgacgccuacguguucgugggcaccagcagauacagcaagaaguucaagcccgagaucgccaucagacccaaggugagaggccaggagggcagaaugaacuacuacuggaccaucguggagcccggcgacaagaucaccuucgaggccaccggcaaccugguggugcccagauacgccuucgccauggagagaaacgccggcagcggcaucaucaucagcgacacccccgugcacgacugcaacaccaccugccagacccccaagggcgccaucaacaccagccugcccuuccagaacauccaccccaucaccaucggcaagugccccaaguacgugaagagcaccaagcugagacuggccaccggccugagaaacgugcccagcauccagagcagaggccuguucggcgccaucgccggcuucaucgagggcggcuggaccggcaugguggacggcugguacggcuaccaccaccagaacgagcagggcagcggcuacgccgccgaccugaagagcacccagaacgccaucgacgagaucaccaacaaggugaacagcgugaucgagaagaugaacacccaguucaccgccgugggcaaggaguucaaccaccuggagaagagaaucgagaaccugaacagaaagguggacgacggcuuccuggacaucuggaccuacaacgccgagcugcuggugcugcuggagaacgagagaacccuggacuaccacgacagcaacgugaagaaccuguacgagaaggugagaagccagcugaagaacaacgccaaggagaucggcaacggcugcuucgaguucuaccacaagugcgacaacaccugcauggagagcgugaagaacggcaccuacgacuaccccaaguacagcgaggaggccaagcugaacagagaggagaucgacggcgugaagcuggagagcaccagaaucuaccagauccuggccaucuacagcaccguggccagcagccuggugcugguggugagccugggcgccaucagcuucuggaugugcagcaacggcagccugcagugcagaaucugcaucuga

SEQ ID NO: 166288 - RNA, 1701 nt, Artificial Sequence
  derived and/or modified CDS sequence (opt4) from hemagglutinin__InfluenzaA__ADQ28035
augaaggccauccugguggugcugcuguacaccuucgccaccgccaacgccgacacccugugcaucggcuaccacgccaacaacagcaccgacaccguggacaccgugcuggagaagaacgugaccgugacccacagcgugaaccugcuggaggacaagcacaacggcaagcugugcagacugagaggcguggccccccugcaccugggcaagugcaacaucgccggcuggauccugggcaaccccgagugcgagagccugagcaccgccagcagcuggagcuacaucguggagaccagcagcagcgacaacggcaccugcuaccccggcgacuucaucgacuacgaggagcugagagagcagcugagcagcgugagcagcuucgagagauucgagaucuuccccaagaccagcagcuggcccaaccacgacagcaacaagggcgugaccgccgccugcccccacgccggcgccaagagcuucuacaagaaccugaucuggcuggugaagaagggcaacagcuaccccaagcugagcaagagcuacaucaacgacaagggcaaggaggugcuggugcuguggggcauccaccaccccagcaccagcgccgaccagcagagccuguaccagaacgccgacgccuacguguucgugggcaccagcagauacagcaagaaguucaagcccgagaucgccaucagacccaaggugagaggccaggagggcagaaugaacuacuacuggacccugguggagcccggcgacaagaucaccuucgaggccaccggcaaccugguggugcccagauacgccuucgccauggagagaaacgccggcagcggcaucaucaucagcgacacccccgugcacgacugcaacaccaccugccagacccccaagggcgccaucaacaccagccugcccuuccagaacauccaccccaucaccaucggcaagugccccaaguacgugaagagcaccaagcugagacuggccaccggccugagaaacgugcccagcauccagagcagaggccuguucggcgccaucgccggcuucaucgagggcggcuggaccggcaugguggacggcugguacggcuaccaccaccagaacgagcagggcagcggcuacgccgccgaccugaagagcacccagaacgccaucgacgagaucaccaacaaggugaacagcgugaucgagaagaugaacacccaguucaccgccgugggcaaggaguucaaccaccuggagaagagaaucgagaaccugaacaagaagguggacgacggcuuccuggacaucuggaccuacaacgccgagcugcuggugcugcuggagaacgagagaacccuggacuaccacgacagcaacgugaagaaccuguacgagaaggugagaagccagcugaagaacaacgccaaggagaucggcaacggcugcuucgaguucuaccacaagugcgacaacaccugcauggagagcgugaagaacggcaccuacgacuaccccaaguacagcgaggaggccaagcugaacagagaggagaucgacggcgugaagcuggagagcaccagaaucuaccagauccuggccaucuacagcaccguggccagcagccuggugcugguggugagccugggcgccaucagcuucuggaugugcagcaacggcagccugcagugcagaaucugcaucuga

SEQ ID NO: 166289 - RNA, 1701 nt, Artificial Sequence; identical to SEQ ID NO: 162729
  derived and/or modified CDS sequence (opt4) from hemagglutinin__InfluenzaA__ADQ28036

SEQ ID NO: 166290 - RNA, 1701 nt, Artificial Sequence; identical to SEQ ID NO: 162729
  derived and/or modified CDS sequence (opt4) from hemagglutinin__InfluenzaA__ADQ28037

SEQ ID NO: 166291 - RNA, 1701 nt, Artificial Sequence; identical to SEQ ID NO: 162971
  derived and/or modified CDS sequence (opt4) from hemagglutinin__InfluenzaA__ADQ28038

SEQ ID NO: 166292 - RNA, 1701 nt, Artificial Sequence; identical to SEQ ID NO: 162729
  derived and/or modified CDS sequence (opt4) from hemagglutinin__InfluenzaA__ADQ28039

SEQ ID NO: 166293 - RNA, 1701 nt, Artificial Sequence; identical to SEQ ID NO: 162971
  derived and/or modified CDS sequence (opt4) from hemagglutinin__InfluenzaA__ADQ28040

SEQ ID NO: 166294 - RNA, 1701 nt, Artificial Sequence; identical to SEQ ID NO: 162971
  derived and/or modified CDS sequence (opt4) from hemagglutinin__InfluenzaA__ADQ28041

SEQ ID NO: 166295 - RNA, 1701 nt, Artificial Sequence
  derived and/or modified CDS sequence (opt4) from hemagglutinin__InfluenzaA__ADQ28043
auggaggccauccugguggugcugcuguacaccuucgccaccgccaacgccgacacccugugcaucggcuaccacgccaacaacagcaccgacaccguggacaccgugcuggagaagaacgugaccgugacccacagcgugaaccugcuggaggacaagcacaacggcaagcugugcaagcugagaggcguggccccccugcaccugggcaagugcaacaucgccggcuggauccugggcaaccccgagugcgagagccugagcaccgccagcagcuggagcuacaucguggagaccagcagcagcgacaacggcaccugcuaccccggcgacuucaucgacuacgaggagcugagagagcagcugagcagcgugagcagcuucgagagauucgagaucuuccccaagaccagcagcuggcccaaccacgacagcaacaagggcgugaccgccgccugcccccacgacggcgccaagagcuucuacaagaaccugaucuggcuggugaagaagggcaacagcuaccccaagcugagcaagagcuacaucaacgacaagggcaaggaggugcuggugcuguggggcauccaccaccccagcaccagcgccgaccagcagagccuguaccagaacgccgacgccuacguguucgugggcagcagcagauacagcaagaaguucaagcccgagaucgccaucagacccaaggugagagaccaggagggcagaaugaacuacuacuggacccugguggagcccggcgacaagaucaccuucgaggccaccggcaaccugguggugcccagauacgccuucgccauggagagaaacgccggcagcggcaucaucaucagcgacacccccgugcacgacugcaacaccaccugccagacccccaagggcgccaucaacaccagccugcccuuccacaacauccaccccaucaccaucggcaagugccccaaguacgugaagagcaccaagcugagacuggccaccggccugagaaacgugcccagcauccagagcagaggccuguucggcgccaucgccggcuucaucgagggcggcuggaccggcaugguggacggcugguacggcuaccaccaccagaacgagcagggcagcggcuacgccgccgaccugaagagcacccagaacgccaucgacgagaucaccaacaaggugaacagcgugaucgagaagaugaacacccaguucaccgccgugggcaaggaguucaaccaccuggagaagagaaucgagaaccugaacaagaagguggacgacggcuuccuggacaucuggaccuacaacgccgagcugcuggugcugcuggagaacgagagaacccuggacuaccacgacagcaacgugaagaaccuguacgagaaggugagaagccagcugaagaacaacgccaaggagaucggcaacggcugcuucgaguucuaccacaagugcgacaacaccugcauggagagcgugaagaacggcaccuacgacuaccccaaguacagcgaggaggccaagcugaacagagaggagaucgacggcgugaagcuggagagcaccagaaucuaccagauccuggccaucuacagcaccguggccagcagccuggugcugguggugagccugggcgccaucagcuucuggaugugcagcaacggcagccugcagugcagaaucugcaucuga

SEQ ID NO: 166296 - RNA, 1701 nt, Artificial Sequence; identical to SEQ ID NO: 162971
  derived and/or modified CDS sequence (opt4) from hemagglutinin__InfluenzaA__ADQ28044

SEQ ID NO: 166297 - RNA, 1701 nt, Artificial Sequence
  derived and/or modified CDS sequence (opt4) from hemagglutinin__InfluenzaA__ADQ28045
augaaggccauccugguggugcugcuguacaccuucgccaccgccaacgccgacacccugugcaucggcuaccacgccaacaacagcaccgacaccguggacaccgugcuggagaagaacgugaccgugacccacagcgugaaccugcuggaggacaagcacaacggcaagcugugcaagcugagaggcguggccccccugcaccugggcaagugcaacaucgccggcuggauccugggcaaccccgagugcgagagccugagcaccgccagcagcuggagcuacaucguggagaccagcagcagcgacaacggcaccugcuaccccggcgacuucaucgacuacgaggagcugagagagcagcugagcagcgugagcagcuucgagagauucgagaucuuccccaagaccagcagcuggcccaaccacgacagcaacaagggcgugaccgccgccugcagccacgccggcgccaagagcuucuacaagaaccugaucuggcuggugaagaagggcaacagcuaccccaagcugagcaagagcuacaucaacgacaagggcaaggaggugcuggugcuguggggcauccaccaccccagcaccagcgccgaccagcagagccuguaccagaacgccgacgccuacguguucgugggcaccagcagauacagcaagaaguucaagcccgagaucgccaucagacccaaggugagagaccaggagggcagaaugaacuacuacuggacccugguggagcccggcgacaagaucaccuucgaggccaccggcaaccugguggugcccagauacgccuucgccauggagagaaacgccggcagcggcaucaucaucagcgacacccccgugcacgacugcaacaccaccugccagacccccaagggcgccaucaacaccagccugcccuuccagaacauccaccccaucaccaucggcaagugccccaaguacgugaagagcaccaagcugagacuggccaccggccugagaaacgugcccagcauccagagcagaggccuguucggcgccaucgccggcuucaucgagggcggcuggaccggcaugguggacggcugguacggcuaccaccaccagaacgagcagggcagcggcuacgccgccgaccugaagagcacccagaacgccaucgacgagaucaccaacaaggugaacagcgugaucgagaagaugaacacccaguucaccgccgugggcaaggaguucaaccaccuggagaagagaaucgagaaccugaacaagaagguggacgacggcuuccuggacaucuggaccuacaacgccgagcugcuggugcugcuggagaacgagagaacccuggacuaccacgacagcaacgugaagaaccuguacgagaaggugagaaaccagcugaagaacaacgccaaggagaucggcaacggcugcuucgaguucuaccacaagugcgacaacaccugcauggagagcgugaagaacggcaccuacgacuaccccaaguacagcgaggaggccaagcugaacagagaggagaucgacggcgugaagcuggagagcaccagaaucuaccagauccuggccaucuacagcaccguggccagcagccuggugcugguggugagccugggcgccaucagcuucuggaugugcagcaacggcagccugcagugcagaaucugcaucuga

SEQ ID NO: 166298 - RNA, 1701 nt, Artificial Sequence; identical to SEQ ID NO: 163199
  derived and/or modified CDS sequence (opt4) from hemagglutinin__InfluenzaA__ADQ28047

SEQ ID NO: 166299 - RNA, 1701 nt, Artificial Sequence; identical to SEQ ID NO: 162729
  derived and/or modified CDS sequence (opt4) from hemagglutinin__InfluenzaA__ADQ28048

SEQ ID NO: 166300 - RNA, 1701 nt, Artificial Sequence; identical to SEQ ID NO: 162971
  derived and/or modified CDS sequence (opt4) from hemagglutinin__InfluenzaA__ADQ28049

SEQ ID NO: 166301 - RNA, 1701 nt, Artificial Sequence; identical to SEQ ID NO: 162729
  derived and/or modified CDS sequence (opt4) from hemagglutinin__InfluenzaA__ADQ28050

SEQ ID NO: 166302 - RNA, 1701 nt, Artificial Sequence
  derived and/or modified CDS sequence (opt4) from hemagglutinin__InfluenzaA__ADQ28051
augaaggccauccugguggugcugcuguacaccuucgccaccgccaacgccgacacccugugcaucggcuaccacgccaacaacagcaccgacaccguggacaccgugcuggagaagaacgugaccgugacccacagcgugaaccugcuggaggacaagcacgacggcaagcugugcaagcugagaggcguggccccccugcaccugggcaagugcaacaucgccggcuggauccugggcaaccccgagugcgagagccugagcaccgccagcagcuggagcuacaucguggagaccagcagcagcgacaacggcaccugcuaccccggcgacuucaucaacuacgaggagcugagagagcagcugagcagcgugagcagcuucgagagauucgagaucuuccccaagaccagcagcuggcccaaccacgacagcaacaagggcgugaccgccgccugcccccacgccggcgccaagagcuucuacaagaaccugaucuggcuggugaagaagggcaacagcuaccccaagcugagcaagagcuacaucaacgacaagggcaaggaggugcuggugcuguggggcauccaccaccccagcaccagcgccgaccagcagagccuguaccagaacgccgacgccuacguguucgugggcaccagcagauacagcaagaaguucaagcccgagaucgccaucagacccaaggugagagaccaggagggcagaaugaacuacuacuggacccugguggagcccggcgacaagaucaccuucgaggccaccggcaaccugguggugcccagauacgccuucgccauggagagaaacgccggcagcggcaucaucaucagcgacacccccgugcacgacugcaacaccaccugccagacccccaagggcgccaucaacaccagccugcccuuccagaacauccaccccaucaccaucggcaagugccccaaguacgugaagagcaccaagcugagacuggccaccggccugagaaacgugcccagcauccagagcagaggccuguucggcgccaucgccggcuucaucgagggcggcuggaccggcaugguggacggcugguacggcuaccaccaccagaacgagcagggcagcggcuacgccgccgaccugaagagcacccagaacgccaucgacgagaucaccaacaaggugaacagcgugaucgagaagaugaacacccaguucaccgccgugggcaaggaguucaaccaccuggagaagagaaucgagaaccugaacaagaagguggacgacggcuuccuggacaucuggaccuacaacgccgagcugcuggugcugcuggagaacgagagaacccuggacuaccacgacagcaacgugaagaaccuguacgagaaggugagaagccagcugaagaacaacgccaaggagaucggcaacggcugcuucgaguucuaccacaagugcgacaacaccugcauggagagcgugaagaacggcaccuacgacuaccccaaguacagcgaggaggccaagcugaacagagaggagaucgacggcgugaagcuggagagcaccagaaucuaccagauccuggccaucuacagcaccguggccagcagccuggugcugguggugagccugggcgccaucagcuucuggaugugcagcaacggcagccugcagugcagaaucugcaucuga

SEQ ID NO: 166303 - RNA, 1701 nt, Artificial Sequence; identical to SEQ ID NO: 162729
  derived and/or modified CDS sequence (opt4) from hemagglutinin__InfluenzaA__ADQ28053

SEQ ID NO: 166304 - RNA, 1701 nt, Artificial Sequence; identical to SEQ ID NO: 162971
  derived and/or modified CDS sequence (opt4) from hemagglutinin__InfluenzaA__ADQ28055

SEQ ID NO: 166305 - RNA, 1701 nt, Artificial Sequence
  derived and/or modified CDS sequence (opt4) from hemagglutinin__InfluenzaA__ADQ28056
auggaggccauccugguggugcugcuguacaccuucgccaccgccgacgccgacacccugugcaucggcuaccacgccaacaacagcaccgacaccguggacaccgugcuggagaagaacgugaccgugacccacagcgugaaccugcuggaggacaagcacaacggcaagcugugcaagcugagaggcguggccccccugcaccugggcaagugcaacaucgccggcuggauccugggcaaccccgagugcgagagccugagcaccgccagcagcuggagcuacaucguggagaccagcagcagcgacaacggcaccugcuaccccggcgacuucaucgacuacgaggagcugagagagcagcugagcagcgugagcagcuucgagagauucgagaucuuccccaagaccagcagcuggcccaaccacgacagcaacaagggcgugaccgccgccugcccccacgccggcgccaagagcuucuacaagaaccugaucuggcuggugaagaagggcaacagcuaccccaagcugagcaagagcuacaucaacgacaagggcaaggaggugcuggugcuguggggcauccaccaccccagcaccagcgccgaccagcagagccuguaccagaacgccgacgccuacguguucgugggcagcagcagauacagcaagaaguucaagcccgagaucgccaucagacccaaggugagagaccaggagggcagaaugaacuacuacuggacccugguggagcccggcgacaagaucaccuucgaggccaccggcaaccugguggugcccagauacgccuucgccauggagagaaacgccggcagcggcaucaucaucagcgacacccccgugcacgacugcaacaccaccugccagacccccaagggcgccaucaacaccagccugcccuuccacaacauccaccccaucaccaucggcaagugccccaaguacgugaagagcaccaagcugagacuggccaccggccugagaaacgugcccagcauccagagcagaggccuguucggcgccaucgccggcuucaucgagggcggcuggaccggcaugguggacggcugguacggcuaccaccaccagaacgagcagggcagcggcuacgccgccgaccugaagagcacccagaacgccaucgacgagaucaccaacaaggugaacagcgugaucgagaagaugaacacccaguucaccgccgugggcaaggaguucaaccaccuggagaagagaaucgagaaccugaacaagaagguggacgacggcuuccuggacaucuggaccuacaacgccgagcugcuggugcugcuggagaacgagagaacccuggacuaccacgacagcaacgugaagaaccuguacgagaaggugagaagccagcugaagaacaacgccaaggagaucggcaacggcugcuucgaguucuaccacaagugcgacaacaccugcauggagagcgugaagaacggcaccuacgacuaccccaaguacagcgaggaggccaagcugaacagagaggagaucgacggcgugaagcuggagagcaccagaaucuaccagauccuggccaucuacagcaccguggccagcagccuggugcugguggugagccugggcgccaucagcuucuggaugugcagcaacggcagccugcagugcagaaucugcaucuga

SEQ ID NO: 166306 - RNA, 1701 nt, Artificial Sequence; identical to SEQ ID NO: 162729
  derived and/or modified CDS sequence (opt4) from hemagglutinin__InfluenzaA__ADQ28057

SEQ ID NO: 166307 - RNA, 1701 nt, Artificial Sequence; identical to SEQ ID NO: 162729
  derived and/or modified CDS sequence (opt4) from hemagglutinin__InfluenzaA__ADQ28058

SEQ ID NO: 166308 - RNA, 1701 nt, Artificial Sequence
  derived and/or modified CDS sequence (opt4) from hemagglutinin__InfluenzaA__ADQ28059
augaaggccauccugguggugcugcuguacacccuggccaccgccaacgccgacacccugugcaucggcuaccacgccaacaacagcaccgacaccguggacaccgugcuggagaagaacgugaccgugacccacagcgugaaccugcuggaggacaagcacaacggcaagcugugcaagcugagaggcguggccccccugcaccugggcaagugcaacaucgccggcuggauccugggcaaccccgagugcgagagccugagcaccgccagcagcuggagcuacaucguggagaccagcagcagcgacaacggcaccugcuaccccggcgacuucaucgacuacgaggagcugagagagcagcugagcagcgugagcagcuucgagagauucgagaucuuccccaagaccagcagcuggcccaaccacgacagcaacaagggcgugaccgccgccugcccccacgccggcgccaagagcuucuacaagaaccugaucuggcuggugaagaagggcaacagcuaccccaagcugagcaagagcuacaucaacgacaagggcaaggaggugcuggugcuguggggcauccaccaccccagcaccagcgccgaccagcagagccuguaccagaacgccgacgccuacguguucgugggcaccagcaaguacagcaagaaguucaagcccgagaucgccaucagacccaaggugagagaccaggagggcagaaugaacuacuacuggacccugguggagcccggcgacaagaucaccuucgaggccaccggcaaccugguggugcccagauacgccuucgccauggagagaaacgccggcagcggcaucaucaucagcgacacccccgugcacgacugcaacaccaccugccagacccccaagggcgccaucaacaccagccugcccuuccagaacauccaccccaucaccaucggcaagugccccaaguacgugaagagcaccaagcugagacuggccaccggccugagaaacgugcccagcauccagagcagaggccuguucggcgccaucgccggcuucaucgagggcggcuggaccggcaugguggacggcugguacggcuaccaccaccagaacgagcagggcagcggcuacgccgccgaccugaagagcacccagaacgccaucgacgagaucaccaacaaggugaacagcgugaucgagaagaugaacacccaguucaccgccgugggcaaggaguucaaccaccuggagaagagaaucgagaaccugaacaagaagguggacgacggcuuccuggacaucuggaccuacaacgccgagcugcuggugcugcuggagaacgagagaacccuggacuaccacgacagcaacgugaagaaccuguacgagaaggugagaagccagcugaagaacaacgccaaggagaucggcaacggcugcuucgaguucuaccacaagugcgacaacaccugcauggagagcgugaagaacggcaccuacgacuaccccaaguacagcgaggaggccaagcugaacagagaggagaucgacggcgugaagcuggagagcaccagaaucuaccagauccuggccaucuacagcaccguggccagcagccuggugcugguggugagccugggcgccaucagcuucuggaugugcagcaacggcagccugcagugcagaaucugcaucuga

SEQ ID NO: 166309 - RNA, 1701 nt, Artificial Sequence; identical to SEQ ID NO: 162729
  derived and/or modified CDS sequence (opt4) from hemagglutinin__InfluenzaA__ADQ28060

SEQ ID NO: 166310 - RNA, 1701 nt, Artificial Sequence
  derived and/or modified CDS sequence (opt4) from hemagglutinin__InfluenzaA__ADQ28061
augaaggccauccugguggugcugcuguacaccuucgccaccgccaacgccgacacccugugcaucggcuaccacgccaacaacagcaccgacaccguggacaccgugcuggagaagaacgugaccgugacccacagcgugaaccugcuggaggacaagcacaacggcaagcugugcaagcugagaggcguggccccccugcaccugggcagaugcaacaucgccggcuggauccugggcaaccccgagugcgagagccugagcaccgccagcagcuggagcuacaucguggagaccagcagcagcgacaacggcaccugcuaccccggcgacuucaucgacuacgaggagcugagagagcagcugagcagcgugagcagcuucgagagauucgagaucuuccccaagaccagcagcuggcccaaccacgacagcaacaagggcgugaccgccgccugcccccacgccggcgccaagagcuucuacaagaaccugaucuggcuggugaagaagggcaacagcuaccccaagcugagcaagagcuacaucaacgacaagggcaaggaggugcuggugcuguggggcauccaccaccccagcaccagcgccgaccagcagagccuguaccagaacgccgacgccaacguguucgugggcaccagcagauacagcaagaaguucaagcccgagaucgccaucagacccaaggugagagaccaggagggcagaaugaacuacuacuggacccugguggagcccggcgacaagaucaccuucgaggccaccggcaaccugguggugcccagauacgccuucgccauggagagaaacgccggcagcggcaucaucaucagcgacacccccgugcacgacugcaacaccaccugccagacccccaagggcgccaucaacaccagccugcccuuccagaacauccaccccaucaccaucggcaagugccccaaguacgugaagagcaccaagcugagacuggccaccggccugagaaacgugcccagcauccagagcagaggccuguucggcgccaucgccggcuucaucgagggcggcuggaccggcaugguggacggcugguacggcuaccaccaccagaacgagcagggcagcggcuacgccgccgaccugaagagcacccagaacgccaucgacgagaucaccaacaaggugaacagcgugaucgagaagaugaacacccaguucaccgccgugggcaaggaguucaaccaccuggagaagagaaucgagaaccugaacaagaagguggacgacggcuuccuggacaucuggaccuacaacgccgagcugcuggugcugcuggagaacgagagaacccuggacuaccacgacagcaacgugaagaaccuguacgagaaggugagaagccagcugaagaacaacgccaaggagaucggcaacggcugcuucgaguucuaccacaagugcgacaacaccugcauggagagcgugaagaacggcaccuacgacuaccccaaguacagcgaggaggccaagcugaacagagaggagaucgacggcgugaagcuggagagcaccagaaucuaccagauccuggccaucuacagcaccguggccagcagccuggugcugguggugagccugggcgccaucagcuucuggaugugcagcaacggcagccugcagugcagaaucugcaucuga

SEQ ID NO: 166311 - RNA, 1701 nt, Artificial Sequence
  derived and/or modified CDS sequence (opt4) from hemagglutinin__InfluenzaA__ADQ28063
augaaggccauccugguggugcugcuguacaccuucgccaccgccaacgccgacacccugugcaucggcuaccacgccaacaacagcaccgacaccguggacaccgugcuggagaagaacgugaccgugacccacagcgugaaccugcuggaggacaagcacaacggcaagcugugcaagcugagaggcguggccccccugcaccugggcaagugcaacaucgccggcuggauccugggcaaccccgagugcgagagccugagcaccgccagcagcuggagcuacaucguggagaccagcagcagcgacaacggcaccugcuaccccggcgacuucaucaacuacgaggagcugagagagcagcugagcagcgugagcagcuucgagagauucgagaucuuccccaagaccagcagcuggcccaaccacgacagcaacaagggcgugaccgccgccugcccccacgccggcgccaagagcuucuacaagaaccugaucuggcuggugaagaagggcaacagcuaccccaagcugagcaagagcuacaucaacgacaagggcaaggaggugcuggugcuguggggcauccaccaccccagcaccagcgccgaccagcagagccuguaccagaacgccgacgccuacguguucgugggcaccagcagauacagcaagaaguucaagcccgagaucgccaucagacccaaggugagaaaccaggagggcagaaugaacuaccacuggacccuggugaagcccggcgacaagaucaccuucgaggccaccggcaaccugguggugcccagauacgccuucgccguggagagaaacgccggcagcggcaucaucaucagcgacacccccgugcacgacugcaacaccaccugccagacccccaagggcgccaucaacaccagccugcccuuccagaacauccaccccaucaccaucggcaagugccccaaguacgugaagagcaccaagcugagacuggccaccggccugagaaacgugcccagcauccagagcagaggccuguucggcgccaucgccggcuucaucgagggcggcuggaccggcaugguggacggcugguacggcuaccaccaccagaacgagcagggcagcggcuacgccgccgaccugaagagcacccagaacgccaucgacgagaucaccaacaaggugaacagcgugaucgagaagaugaacacccaguucaccgccgugggcaaggaguucaaccaccuggagaagagaaucgagaaccugaacaagaagguggacgacggcuuccuggacaucuggaccuacaacgccgagcugcuggugcugcuggagaacgagagaacccuggacuaccacgacagcaacgugaagaaccuguacgagaaggugagaagccagcugaagaacaacgccaaggagaucggcaacggcugcuucgaguucuaccacaagugcgacaacaccugcauggagagcgugaagaacggcaccuacgacuaccccaaguacagcgaggaggccaagcugaacagagaggagaucgacggcgugaagcuggagagcaccagaaucuaccagauccuggccaucuacagcaccguggccagcagccuggugcugguggugagccugggcgccaucagcuucuggaugugcagcaacggcagccugcagugcagaaucugcaucuga

SEQ ID NO: 166312 - RNA, 1701 nt, Artificial Sequence; identical to SEQ ID NO: 163477
  derived and/or modified CDS sequence (opt4) from hemagglutinin__InfluenzaA__ADQ28064

SEQ ID NO: 166313 - RNA, 1701 nt, Artificial Sequence
  derived and/or modified CDS sequence (opt4) from hemagglutinin__InfluenzaA__ADQ28065
augaaggccauccugguggugcugcuguacaccuucgccaccgccaacgccgacacccugugcaucggcuaccacgccaacaacagcaccgacaccguggacaccgugcuggagaagaacgugaccgugacccacagcgugaaccugcuggaggacaagcacaacggcaagcugugcaagcugagaggcguggccccccugcaccugggcaagugcaacaucgccggcuggauccugggcaaccccgagugcgagagccugagcaccgccagcagcuggagcuacaucguggagaccagcagcagcgacaacggcaccugcuaccccggcgacuucaucgacuacgaggagcugagagagcagcugagcagcgugagcagcuucgagagauucgagaucuuccccaagaccagcagcuggcccaaccacgacagcaacaagggcgugaccgccgccugcccccacgccggcgccaagagcuucuacaagaaccugaucuggcuggugaagaagggcaacagcuaccccaagcugagcaagagcuacaucaacgacaagggcaaggaggugcuggugcuguggggcauccaccaccccagcaccagcgccggccagcagagccuguaccagaacgccgacgccuacguguucgugggcaccagcagauacagcaagaaguucaagcccgagaucgccaucagacccaaggugagagaccaggagggcagaaugaacuacuacuggacccugguggagcccggcgacaagaucaccuucgaggccaccggcaaccugguggugcccagauacgccuucgccauggagagaaacgccggcagcggcaucaucaucagcgacacccaggugcacgacugcaacaccaccugccagacccccaagggcgccaucaacaccagccugcccuuccagaacauccaccccaucaccaucggcaagugccccaaguacgugaagagcaccaagcugagacuggccaccggccugagaaacgugcccagcauccagagcagaggccuguucggcgccaucgccggcuucaucgagggcggcuggaccggcaugguggacggcugguacggcuaccaccaccagaacgagcagggcagcggcuacgccgccgaccugaagagcacccagaacgccaucgacaagaucaccaacaaggugaacagcgugaucgagaagaugaacacccaguucaccgccgugggcaaggaguucaaccaccuggagaagagaaucgagaaccugaacaagaagguggacgacggcuuccuggacaucuggaccuacaacgccgagcugcuggugcugcuggagaacgagagaacccuggacuaccacgacagcaacgugaagaaccuguacgagaaggugagaagccagcugaagaacaacgccaaggagaucggcaacggcugcuucgaguucuaccacaagugcgacaacaccugcauggagagcgugaagaacggcaccuacgacuaccccaaguacagcgaggaggccaagcugaacagagaggagaucgacggcgugaagcuggagagcaccagaaucuaccagauccuggccaucuacagcaccguggccagcagccuggugcugguggugagccugggcgccaucagcuucuggaugugcagcaacggcagccugcagugcagaaucugcaucuga

SEQ ID NO: 166314 - RNA, 1701 nt, Artificial Sequence
  derived and/or modified CDS sequence (opt4) from hemagglutinin__InfluenzaA__ADQ28066
augaaggccauccugguggugcugcuguacaccuucgccaccgccaacgccgacacccugugcaucggcuaccacgccaacaacagcaccgacaccguggacaccgugcuggagaagaacgugaccgugacccacagcgugaaccugcuggaggacaagcacaacggcaagcugugcaagcugagaggcguggccccccugcaccugggcaagugcaacaucgccggcuggauccugggcaaccccgagugcgagagccugagcaccgccagcagcuggagcuacaucguggagaccagcagcagcgacaacggcaccugcuaccccggcgacuucaucgacuacgaggagcugagagagcagcugagcagcgugagcagcuucgagagauucgagaucuuccccaagaccagcagcuggcccaaccacgacagcaacaagggcgugaccgccgccugcccccacgccggcgccaagagcuucuacaagaaccugaucuggcuggugaagaagggcaacagcuaccccaagcugagcaagagcuacaucaacgacaagggcaaggaggugcuggugcuguggggcauccaccaccccagcaccagcgccgaccagcagagccuguaccagaacgccgacgccuacguguucgugggcaccagcagauacagcaagaaguucaagcccgagaucgccaucagacccagagugagagaccaggagggcagaaugaacuacuacuggacccugguggagcccggcgacaagaucaccuucgaggccaccggcaaccugguggugcccagauacgccuucgccauggagagaaacgccggcagcggcaucaucaucagcgacacccccgugcacgacugcaacaccaccugccagacccccaagggcgccaucaacaccagccugcccuuccagaacauccaccccaucaccaucggcaagugccccaaguacgugaagagcaccaagcugagacuggccaccggccugagaaacgugcccagcauccagagcagaggccuguucggcgccaucgccggcuucaucgagggcggcuggaccggcaugguggacggcugguacggcuaccaccaccagaacgagcagggcagcggcuacgccgccgaccugaagagcacccagaacgccaucgacaagaucaccaacaaggugaacagcgugaucgagaagaugaacacccaguucaccgccgugggcaaggaguucaaccaccuggagaagagaaucgagaaccugaacaagaagguggacgacggcuuccuggacaucuggaccuacaacgccgagcugcuggugcugcuggagaacgagagaacccuggacuaccacgacagcaacgugaagaaccuguacgagaaggugagaagccagcugaagaacaacgccaaggagaucggcaacggcugcuucgaguucuaccacaagugcgacaacaccugcauggagagcgugaagaacggcaccuacgacuaccccaaguacagcgaggaggccaagcugaacagagaggagaucgacggcgugaagcuggagagcaccagaaucuaccagauccuggccaucuacagcaccguggccagcagccuggugcugguggugagccugggcgccaucagcuucuggaugugcagcaacggcagccugcagugcagaaucugcaucuga

SEQ ID NO: 166315 - RNA, 1701 nt, Artificial Sequence
  derived and/or modified CDS sequence (opt4) from hemagglutinin__InfluenzaA__ADQ28067
augaaggccauccugguggugcugcuguacaccuucgccaccgccaacgccgacacccugugcaucggcuaccacgccaacaacagcaccgacaccguggacaccgugcuggagaagaacgugaccgugacccacagcgugaaccugcuggaggacaagcacaacggcaagcugugcaagcugagaggcguggccccccugcaccugggcaagugcaacaucgccggcuggauccugggcaaccccgagugcgagagccugagcaccgccagcagcuggagcuacaucguggagaccagcagcagcgacaacggcaccugcuaccccggcgacuucaucgacuacgaggagcugagagagcagcugagcagcgugagcagcuucgagagauucgagaucuuccccaagaccagcagcuggcccaaccacgacagcaacaagggcgugaccgccgccugcccccacgccggcgccaagagcuucuacaagaaccugaucuggcuggugaagaagggcaacagcuaccccaagcugagcaagagcuacaucaacgacaagggcaaggaggugcuggugcuguggggcauccaccaccccagcaccagcgccgaccagcagagccuguaccagaacgccgacgccuacguguucgugggcaccagcagauacagcaagaaguucaagcccgagaucgccaucagacccaaggugagagaccaggagggcagaaugaacuacuacuggacccugguggagcccggcgacaagaucaccuucgaggccaccggcaaccugguggugcccagauacgccuucgccauggagagaaacgccggcagcggcaucaucaucagcgacacccccgugcacgacugcaacaccaccugccagacccccaagggcgccaucaacaccagccugcccuuccagaacauccaccccaucaccaucggcaagugccccaaguacgugaagagcaccaagcugagacuggccaccggccugagaaacgugcccagcauccagagcagaggccuguucggcgccaucgccggcuucaucgagggcggcuggaccggcaugguggacggcugguacggcuaccaccaccagaacgagcagggcagcggcuacgccgccgaccugaagagcacccagaacgccaucgacaagaucaccaacaaggugaacagcgugaucgagaagaugaacacccaguucaccgccgugggcaaggaguucaaccaccuggagaagagaaucgagaaccugaacaagaagguggacgacggcuuccuggacaucuggaccuacaacgccgagcugcuggugcugcuggagaacgagagaacccuggacuaccacgacagcaacgugaagaaccuguacgagaaggugagaagccagcugaagaacaacgccaaggagaucggcaacggcugcuucgaguucuaccacaagugcgacaacaccugcauggagagcgugaagaacggcaccuacgacuaccccaaguacagcgaggaggccaagcugaacagagaggagaucaacggcgugaagcuggagagcaccagaaucuaccagauccuggccaucuacagcaccguggccagcagccuggugcugguggugagccugggcgccaucagcuucuggaugugcagcaacggcagccugcagugcagaaucugcaucuga

SEQ ID NO: 166316 - RNA, 1701 nt, Artificial Sequence
  derived and/or modified CDS sequence (opt4) from hemagglutinin__InfluenzaA__ADQ28068
augaaggccauccugguggugcugcuguacaccuucaccaccgccaacgccgacacccugugcaucggcuaccacgccaacaacagcaccgacaccguggacaccgugcuggagaagaacgugaccgugacccacagcgugaaccugcuggaggacaagcacaacggcaagcugugcaagcugagaggcguggccccccugcaccugggcaagugcaacaucgccggcuggauccugggcaaccccgagugcgagagccugagcaccgccagcagcuggagcuacaucguggagaccagcagcagcgacaacggcaccugcuaccccggcgacuucaucaacuacgaggagcugagagagcagcugagcagcgugagcagcuucgagagauucgagaucuuccccaagaccagcagcuggcccaaccacgacagcaacaagggcgugaccgccgccugcccccacgccggcgagaagagcuucuacaagaaccugaucuggcuggugaagaagggcaacagcuaccccaagcugagcaagagcuacaucaacgacaagggcaaggaggugcuggugcuguggggcauccaccaccccagcaccagcgccgaccagcagagccuguaccagaacgccgacgccuacguguucgugggcaccagcagauacagcaagaaguucaagcccgagaucgccaucagacccaaggugagagaccaggagggcagaaugaacuaccacuggacccuggugaagcccggcgacaagaucaccuucgaggccaccggcaaccugguggugcccagauacgccuucgccauggagagaaacgccggcagcggcaucaucaucagcgacacccccgugcacgacugcaacaccaccugccagacccccaagggcgccaucaacaccagccugcccuuccagaacauccaccccaucaccaucggcaagugccccaaguacgugaagagcaccaagcugagacuggccaccggccugagaaacgugcccagcauccagagcagaggccuguucggcgccaucgccggcuucaucgagggcggcuggaccggcaugguggacggcugguacggcuaccaccaccagaacgagcagggcagcggcuacgccgccgaccugaagagcacccagaacgccaucgacgagaucaccaacaaggugaacagcgugaucgagaagaugaacacccaguucaccgccgugggcaaggaguucaaccaccuggagaagagaaucgagaaccugaacaagaagguggacgacggcuuccuggacaucuggaccuacaacgccgagcugcuggugcugcuggagaacgagagaacccuggacuaccacgacagcaacgugaagaaccuguacgagaaggugagaagccagcugaagaacaacgccaaggagaucggcaacggcugcuucgaguucuaccacaagugcgacaacaccugcauggagagcgugaagaacggcaccuacgacuaccccaaguacagcgaggaggccaagcugaacagagaggagaucgacggcgugaagcuggagagcaccagaaucuaccagauccuggccaucuacagcaccguggccagcagccuggugcugguggugagccugggcgccaucagcuucuggaugugcagcaacggcagccugcagugcagaaucugcaucuga

SEQ ID NO: 166317 - RNA, 1701 nt, Artificial Sequence; identical to SEQ ID NO: 166315
  derived and/or modified CDS sequence (opt4) from hemagglutinin__InfluenzaA__ADQ28069

SEQ ID NO: 166318 - RNA, 1701 nt, Artificial Sequence
  derived and/or modified CDS sequence (opt4) from hemagglutinin__InfluenzaA__ADQ28070
augaaggccauccugguggugcugcuguacaccuucgccaccgccaacgccgacacccugugcaucggcuaccacgccaacaacagcaccgacaccguggacaccgugcuggagaagaacgugaccgugacccacagcgugaaccugcuggaggacaagcacaacggcaagcugugcaagcugagaggcguggccccccugcaccugggcaagugcaacaucgccggcuggauccugggcaaccccgagugcgagagccugagcaccgccagcagcuggagcuacaucguggagaccagcagcagcgacaacggcaccugcuaccccggcgacuucaucgacuacgaggagcugagagagcagcugagcagcgugagcagcuucgagagauucgagaucuuccccaagaccagcagcuggcccaaccacgacagcaacaagggcgugaccgccgccugcccccacgccggcgccaagagcuucuacaagaaccugaucuggcuggugaagaagggcaacagcuaccccaagcugagcaagagcuacaucaacgacaagggcaaggaggugcuggugcuguggggcauccaccaccccagcaccagcgccgaccagcagagccuguaccagaacgccgacgccuacguguucgugggcaccagcagauacagcaagaaguucaagcccgagaucgccaucagacccaaggugagagaccaggagggcagaaugaacuacuacuggacccugguggagcccggcgacaagaucaccuucgaggccaccggcaaccugguggugcccagauacgccuucgccauggagagaaacgccggcagcggcaucaucaucagcgacacccccgugcacgacugcaacaccaccugccagacccccaagggcgccaucaacaccagccugcccuuccagaacauccaccccaucaccaucggcaagugccccaaguacgugaagagcaccaagcugagacuggccaccggccugagaaacgugcccagcauccagagcagaggccuguucggcgccaucgccggcuucaucgagggcggcuggaccggcaugguggacggcugguacggcuaccaccaccagaacgagcagggcagcggcuacgccgccgaccugaagagcacccagaacgccaucgacaagaucaccaacaaggugaacagcgugaucgagaagaugaacacccaguucaccgccgugggcaaggaguucaaccaccuggagaagagaaucgagaaccugaacaagaagguggacgacggcuuccuggacaucuggaccuacaacgccgagcugcuggugcugcuggagaacgagagaacccuggacuaccacgacagcaacgugaagaaccuguacgagaaggugagaagacagcugaagaacaacgccaaggagaucggcaacggcugcuucgaguucuaccacaagugcgacaacaccugcauggagagcgugaagaacggcaccuacgacuaccccaaguacagcgaggaggccaagcugaacagagaggagaucgacggcgugaagcuggagagcaccagaaucuaccagauccuggccaucuacagcaccguggccagcagccuggugcugguggugagccugggcgccaucagcuucuggaugugcagcaacggcagccugcagugcagaaucugcaucuga

SEQ ID NO: 166319 - RNA, 1701 nt, Artificial Sequence
  derived and/or modified CDS sequence (opt4) from hemagglutinin__InfluenzaA__ADQ28071
augaaggccauccugguggugcugcuguacacccuggccaccgccaacgccgacacccugugcaucggcuaccacgccaacaacagcaccgacaccguggacaccgugcuggagaagaacgugaccgugacccacagcgugaaccugcuggaggacaagcacaacggcaagcugugcaagcugagaggcguggccccccugcaccugggcaagugcaacaucgccggcuggauccugggcaaccccgagugcgagagccugagcaccgccagcagcuggagcuacaucguggagaccagcagcagcgacaacggcaccugcuaccccggcgacuucaucgacuacgaggagcugagagagcagcugagcagcgugagcagcuucgagagauucgagaucuuccccaagaccagcagcuggcccaaccacgacagcaacaagggcgugaccgccgccugcccccacgccggcgccaagagcuucuacaagaaccugaucuggcuggugaagaagggcaacagcuaccccaagcugagcaagagcuacaucaacgacaagggcaaggaggugcuggugcuguggggcauccaccaccccagcaccagcgccgaccagcagagccuguaccagaacgccgacgccuacguguucgugggcaccagcagauacagcaagaaguucaagcccgagaucgccaucagacccaaggugagagaccaggagggcagaaugaacuacuacuggacccugguggagcccggcgacaagaucaccuucgaggccaccggcaaccugguggugcccagauacgccuucgccauggagagaaacgccggcagcggcaucaucaucagcgacacccccgugcacgacugcaacaccaccugccagacccccaagggcgccaucaacaccagccugcccuuccagaacauccaccccaucaccaucggcaagugccccaaguacgugaagagcaccaagcugagacuggccaccggccugagaaacgugcccagcauccagagcagaggccuguucggcgccaucgccggcuucaucgagggcggcuggaccggcaugguggacggcugguacggcuaccaccaccagaacgagcagggcagcggcuacgccgccgaccugaagagcacccagaacgccaucgacaagaucaccaacaaggugaacagcgugaucgagaagaugaacacccaguucaccgccgugggcaaggaguucaaccaccuggagaagagaaucgagaaccugaacaagaagguggacgacggcuuccuggacaucuggaccuacaacgccgagcugcuggugcugcuggagaacgagagaacccuggacuaccacgacagcaacgugaagaaccuguacgagaaggugagaagccagcugaagaacaacgccaaggagaucggcaacggcugcuucgaguucuaccacaagugcgacaacaccugcauggagagcgugaagaacggcaccuacgacuaccccaaguacagcgaggaggccaagcugaacagagaggagaucgacggcgugaagcuggagagcaccagaaucuaccagauccuggccaucuacagcaccguggccagcagccuggugcugguggugagccugggcgccaucagcuucuggaugugcagcaacggcagccugcagugcagaaucugcaucuga

SEQ ID NO: 166320 - RNA, 1701 nt, Artificial Sequence; identical to SEQ ID NO: 163673
  derived and/or modified CDS sequence (opt4) from hemagglutinin__InfluenzaA__ADR32361

SEQ ID NO: 166321 - RNA, 1689 nt, Artificial Sequence
  derived and/or modified CDS sequence (opt4) from hemagglutinin__InfluenzaA__ADT78887
auggcccugaucuaccugauccugcuguucaccagcgugagaggcgaccagaucugcaucggcuaccacgccaacaacagcaccgagaagguggacaccauccuggagagaaacgugaccgugacccacgccaaggacauccuggagaagacccacaacggcaagcugugcaagcugaacggcauccccccccuggagcugggcgacugcagcaucgccggcuggcugcugggcaaccccgagugcgacagacugcugagagugcccgaguggagcuacaucauggagaaggagaaccccaaguacagccugugcuaccccggcagcuucaacgacuacgaggagcugaagcaccugaucagcagcgugaagcacuucgagaaggugaagauccugcccaaggacggcuggacccagcacaccaccaccggcggcagcagagccugcgccgugagcggcaaccccagcuucuucagaaacaugguguggcugaccaagaagggccccaacuaccccguggccaagggcagcuacaacaacaccagcggcgagcagaugcugaucaucuggggcgugcaccaccccaacgacgaggccgagcagagagcccuguaccagaaggugggcaccuacgugagcgccagcaccagcacccugaacaagagaagcacccccgagaucgccgccagacccgaggugaacggccugggcagcagaauggaguucagcuggacccugcuggacaugugggacaccaucaacuucgagagcaccggcaaccugguggcccccgaguacggcuucaagaucagcaagagaggcagcagcggcgugaugaagaccgagggcacccuggagaacugcgagaccaagugccagaccccccugggcgccaucaacaccacccugcccuuccacaacgugcacccccugaccaucggcgagugccccaaguacgugaagagcgagaagcuggugcuggccaccggccugagaaacgugccccagaucgagagcagaggccuguucggcgccaucgccggcuucaucgagggcggcuggcagggcaugguggacggcugguacggcuaccaccacagcaacgaccagggcagcggcuacgccgccgacaaggagagcacccagaaggccuucgacggcaucaccaacaaggugaacagcgugaucgagaagaugaacacccaguucgaggccgugggcaaggaguucagcaaccuggagaagagacuggagaaccugaacaagaagauggaggacggcuuccuggacguguggaccuacaacgccgagcugcuggugcugauggagaacgagagaacccuggacuuccacgacagcaacgugaagaaccuguacgacaaggugagaaugcagcugagagacaacgugaaggagcugggcaacggcugcuucgaguucuaccacaagugcgacgacgagugcauggacagcgugaagaacggcaccuacgacuaccccaaguacgaggaggagagcaagcugaacagaaacgagaucaagggcgugaagcugagcagcaugggcguguaccagauccuggccaucuacgccaccguggccggcagccugagccuggccaucaugauggccggcaucagcuucuggaugugcagcaacggcagccugcagugcagaaucugcaucuga

SEQ ID NO: 166322 - RNA, 1701 nt, Artificial Sequence
  derived and/or modified CDS sequence (opt4) from hemagglutinin__InfluenzaA__ADT78908
augaaggccaagcugcugauccugcugugcgcccugagcgccaccgacgccgacaccaucugcaucggcuaccacgccaacaacagcaccgacaccguggacaccgugcuggagaagaacgugaccgugacccacagcgugaaccugcuggaggacagccacaacggcaagcugugcagacugaagggcaaggccccccugcagcugggcaagugcaacaucgccggcugggugcugggcaaccccgagugcgagagccugcugagcaacagaagcuggagcuacaucgccgagacccccaacagcgagaacggcaccugcuaccccggcgacuucgccgacuacgaggagcugagagagcagcugagcagcgugagcagcuucgagagauucgagaucuuccccaaggagagaagcuggcccaagcacaacaccaccagaggcgugaccgccgccugcagccacgccagaaagagcagcuucuacaagaaccugguguggcugaccgaggccaacggcagcuaccccaaccugagcaagagcuacgugaacaaccaggagaaggaggugcuggugcuguggggcgugcaccaccccagcaacaucgaggaccagagaacccuguacagaaaggacaacgccuacgugagcguggugagcagcaacuacaacagaagauucacccccgagaucgccaagagacccaaggugagagaccagcccggcagaaugaacuacuacuggacccugcuggagcccggcgacaccaucaucuucgaggccaccggcaaccugaucgcccccugguacgccuucgcccugagcagaggccccggcagcggcaucaucaccagcaacgcccccauggacgagugcgacaccaagugccagaccccccagggcgccaucaacagcagccugcccuuccagaacauccaccccgugaccaucggcgagugccccaaguacgugagaagcaccaagcugagaauggugaccggccugagaaacauccccagcauccagagcagaggccuguucggcgccaucgccggcuucaucgagggcggcuggaccggcaugauggacggcugguacggcuaccaccaccagaacgagcagggcagcggcuacgccgccgaccagaagagcacccagaacgccaucaacggcaucaccaacaaggugaacagcgugaucgagaagaugaacacccaguucaccgccgugggcaaggaguucaacaagcuggagaagagaauggagaaccugaacaagaagguggacgacggcuuccuggacaucuggaccuacaacgccgagcugcuggugcugcuggagaacgagagaacccuggacuuccacgacagcaacgugaagaaccuguacgagaaggugaagaaccagcugagaaacaacgccaaggagcugggcaacggcugcuucgaguucuaccacaagugcgacaacgagugcauggagagcgugaagaacggcaccuacgacuaccccaaguacagcgaggagagcaagcugaacagagagaagaucgacggcgugaagcuggagagcaugggcguguacagaauccuggccaucuacagcaccguggccagcagccuggugcugcuggugagccugggcgccaucagcuucuggaugugcagcaacggcagccugcagugcagaaucugcaucuga

SEQ ID NO: 166323 - RNA, 1701 nt, Artificial Sequence
  derived and/or modified CDS sequence (opt4) from hemagglutinin__InfluenzaA__ADT78929
augaaggccaagcugcugauccugcugugcgcccugagcgccaccgacgccgacaccaucugcaucggcuaccacgccaacaacagcaccgacaccguggacaccgugcuggagaagaacgugaccgugacccacagcgugaaccugcuggaggacagccacaacggcaagcugugcagacugaagggcaucgccccccugcagcugggcaagugcaacaucgccggcuggauccugggcaaccccgagugcgagagccugcugagcaagagaagcuggagcuacaucgccgagacccccaacagcgagaacggcaccugcuaccccggcgacuucgccgacuacgaggagcugagagagcagcugagcagcgugagcagcuucgagagauucgagaucuuccccaaggagagaagcuggcccaagcacaacaucaccagaggcgugaccgccgccugcagccacgccggcaagagcagcuucuacaagaaccugcuguggcugaccgagaccaagggcagcuaccccaaccugagcaagagcuacgugaacaacaaggagaaggaggugcuggugcuguggggcgugcaccaccccagcaacaucgaggaccagaagacccuguacagaaaggagaacgccuacgugagcguggugagcagcaacuacaacagaagauucacccccgagaucgccgagagacccaaggugagaggccaggccggcagaaugaacuacuacuggacccugcuggagcccggcgacaccaucaucuucgaggccaacggcaaccugaucgcccccugguacgccuucgcccugagcagaggccugggcagcggcaucaucaccagcaacgccagcauggacgagugcgacaccaagugccagaccccccagggcgccaucaacagcagccugcccuuccagaacauccaccccgugaccaucggcgagugccccaaguacgugaagagcaccaagcugagaauggugaccggccugagaaacauccccagcauccagagcagaggccuguucggcgccaucgccggcuucaucgagggcggcuggaccggcaugaucgacggcugguacggcuaccaccaccagaacgagcagggcagcggcuacgccgccgaccagaagagcacccagaacgccaucaacggcaucaccaacaaggugaacagcgugaucgagaagaugaacacccaguucaccgccgugggcaaggaguucaacaagcuggagaagagaauggagaaccugaacaagaagguggacgacggcuuccuggacaucuggaccuacaacgccgagcugcuggugcugcuggagaacgagagaacccuggacuuccacgacagcaacgugaagaaccuguacgagaaggugaagaaccagcugagaaacaacgccaaggagaucggcaacggcugcuucgaguucuaccacaagugcaacaacgagugcauggagagcgugaagaacggcaccuacgacuaccccaaguacagcgaggagagcaagcugaacagagagaagaucgacggcgugaagcuggagagcaugggcguguaccagauccuggccaucuacagcaccguggccagcagccuggugcugcuggugagccugggcgccaucagcuucuggaugugcagcaacggcagccugcagugcagaaucugcaucuga

SEQ ID NO: 166324 - RNA, 1701 nt, Artificial Sequence
  derived and/or modified CDS sequence (opt4) from hemagglutinin__InfluenzaA__ADT78936
augaaggccaagcugcuggugcugcugugcgcccugagcgccaccuacgccgacaccaucugcaucggcuaccacgccaacaacagcaccgacaccguggacaccgugcuggagaagaacgugaccgugacccacagcgugaaccugcuggaggacagccacaacggcaagcugugcagacugaagggcaaggccccccugcagcugggcaagugcaacaucgccggcuggauccugggcaaccccgagugcgagagccugcugagcaagagaagcuggagcuacaucgccgagacccccaacagcgagaacggcaccugcuaccccggcgacuucgccgacuacgaggagcugagagagcagcugagcagcgugagcagcuucgagagauucgagaucuuccccaaggagagcagcuggcccaagcacaacaccaccagaggcgugaccgccgccugcagccacgccagaaagagcagcuucuacaagaaccugcuguggcugaccgaggccaacggcagcuaccccaaccugagcaagagcuacgugaacaaccaggagaaggaggugcuggugcuguggggcgugcaccaccccagcaacaucgaggaccagagaacccuguacagaaaggagaacgccuacgugagcguggugagcagcaacuacaacagaagauucacccccgagaucgccgagagacccaaggugagaaaccaggccggcagaaugaacuacuacuggacccugcuggagcccggcgacaccaucaucuucgaggccaacggcaaccugaucgcccccugguacgccuucgcccugagcagaggccugggcagcggcaucaucaccagcaacgccagcauggacgagugcgacaccaagugccagaccccccagggcgccaucaacagcagccugcccuuccagaacauccaccccgugaccaucggcgagugccccaaguacgugaagagcaccaagcugagaauggugaccggccugagaaacauccccagcauccagagcagaggccuguucggcgccaucgccggcuucaucgagggcggcuggaccggcaugauggacggcugguacggcuaccaccaccagaacgagcagggcagcggcuacgccgccgaccagaagagcacccagaacgccaucaacggcaucaccaacaaggugaacagcgugaucgagaagaugaacacccaguucaccgccgugggcaaggaguucaacaagcuggagaagagaauggagaaccugaacaagaagguggacgacggcuuccuggacaucuggaccuacaacgccgagcugcuggugcugcuggagaacgagagaacccuggacuuccacgacagcaacgugaagaaccuguacgagaaggugaagaaccagcugagaaacaacgccaaggagcugggcaacggcugcuucgaguucuaccacaagugcgacaacgagugcauggagagcgugaagaacggcaccuacgacuaccccaaguacagcgaggagagcaagcugaacagagagaagaucgacggcgugaagcuggagagcaugggcguguacagaauccuggccaucuacagcaccguggccagcagccuggugcugcuggugagccugggcgccaucagcuucuggaugugcagcaacggcagccugcagugcagaaucugcaucuga

SEQ ID NO: 166325 - RNA, 1689 nt, Artificial Sequence
  derived and/or modified CDS sequence (opt4) from hemagglutinin__InfluenzaA__ADT78961
auggccaucaucugccugauccugcuguucaccgccgugagaggcgaccagaucugcaucggcuaccacgccaacaacagcaccgagaagguggacaccauccuggagagaaacgugaccgugacccacgccaaggacauccuggagaagacccacaacggcaagcugugcaagcugaacggcauccccccccuggagcugggcgacugcagcaucgccggcuggcugcugggcaaccccgagugcgacagacugcugagcgugcccgaguggagcuacaucauggagaaggagaaccccagagacggccugugcuaccccggcagcuucaacgacuacgaggagcugaagcaccugcugagcagcgugaagcacuucgagaaggugaagauccugcccaagaacagauggacccagcacaccaccaccggcggcagcagagccugcgccgugagcggcaaccccagcuucuucagaaacaugguguggcugaccaagaagggcagcaacuaccccguggccaagggcagcuacaacaacaccagcggcgagcagaugcugaucaucuggggcgugcaccaccccaacgacgagaccgagcagagaacccuguaccagaacguggagaccuacgugagcgugagcaccagcacccugaacaagagaagcacccccaagaucgccaccagacccgaggugaacggccugggcagcagaauggaguucagcuggacccugcuggacaugugggacaccaucaacuucgagagcaccggcaaccugaucgcccccgaguacggcuucaagaucagcaagagaggcagcagcggcaucaugaagaccgagggcacccuggagaacugcgagaccaagugccagaccccccugggcgccaucaacaccacccugcccuuccacaacgugcacccccugaccaucggcgagugccccaaguacgugaagagcgagaagcuggugcuggccaccggccccagaaacgugccccagaucgagagcagaggccuguucggcgccaucgccggcuucaucgagggcggcuggcagggcaugguggacggcugguacggcuaccaccacagcaacgaccagggcagcggcuacgccgccgacaaggagagcacccagaaggccuucgacggcaucaccaacaaggugaacagcgugaucgagaagaugaacacccaguucgaggccgugggcaaggaguucagcaaccuggagagaagacuggagaaccugaacaagaagauggaggacggcuuccuggacguguggaccuacaacgccgagcugcuggugcugauggagaacgagagaacccuggacuuccacgacagcaacgugaagaaccuguacgacaaggugagaaugcagcugagagacaacgugaaggagcugggcaacggcugcuucgaguucuaccacaagugcgacgacgagugcaugaacagcgugaagaacggcaccuacgacuaccccaaguacgaggaggagagcaagcugaacagaaacgagaucaagggcgugaagcugagcagcaugggcguguaccagauccuggugaucuacgccaccguggccggcagccugagccuggccaucaugauggccggcaucagcuucuggaugugcagcaacggcagccugcagugcagaaucugcaucuga

SEQ ID NO: 166326 - RNA, 1701 nt, Artificial Sequence; identical to SEQ ID NO: 160824
  derived and/or modified CDS sequence (opt4) from hemagglutinin__InfluenzaA__ADT78971

SEQ ID NO: 166327 - RNA, 1701 nt, Artificial Sequence; identical to SEQ ID NO: 160365
  derived and/or modified CDS sequence (opt4) from hemagglutinin__InfluenzaA__ADT79010

SEQ ID NO: 166328 - RNA, 1701 nt, Artificial Sequence; identical to SEQ ID NO: 160824
  derived and/or modified CDS sequence (opt4) from hemagglutinin__InfluenzaA__ADT79030

SEQ ID NO: 166329 - RNA, 1701 nt, Artificial Sequence; identical to SEQ ID NO: 161402
  derived and/or modified CDS sequence (opt4) from hemagglutinin__InfluenzaA__ADT79050

SEQ ID NO: 166330 - RNA, 1701 nt, Artificial Sequence
  derived and/or modified CDS sequence (opt4) from hemagglutinin__InfluenzaA__ADT79108
augaaggccagacugcugauccugcugugcgcccugagcgccaccgacgccgacaccaucugcaucggcuaccacgccaacaacagcaccgacaccguggacaccgugcuggagaagaacgugaccgugacccacagcgugaaccugcuggaggacagccacaacggcaagcugugcagacugaagggcaucgccccccugcagcugggcaagugcaacaucgccggcuggauccugggcaaccccgagugcgagagccugcugagcaacagaagcuggagcuacaucgccgagacccccaacagcgagaacggcaccugcuaccccggcgacuucgccgacuacgaggagcugagagagcagcugagcagcgugagcagcuucgagagauucgagaucuuccccaaggagagaagcuggcccaagcacaacaucaccagaggcgugaccgccgccugcagccacgccaagaagagcagcuucuacaagaaccugcuguggcugaccgaggccaacggcagcuaccccaaccugaucaagagcuacgugaacaacaaggagaaggaggugcuggugcuguggggcgugcaccaccccagcaacaucgaggaccagagaacccuguacagaaaggagaacgccuacgugagcguggugagcagcaacuacaacagaagauucacccccgagaucgccgagagacccaaggugagaggccaggccggcagaaugaacuacuacuggacccugcuggagcccggcgacaagaucaucuucgaggccaacggcaaccugaucgcccccugguacgccuucgcccugagcagaggccugggcagcggcaucaucaccagcaacgccagcauggacgagugcgacaccaagugccagaccccccagggcgccaucaacagcagccugcccuuccagaacauccaccccgugaccaucggcgagugccccaaguacgugagaagcaccaagcugagaauggugaccggccugagaaacauccccagcauccagagcagaggccuguucggcgccaucgccggcuucaucgagggcggcuggaccggcaugguggacggcugguacggcuaccaccaccagaacgagcagggcagcggcuacgccgccgaccagaagagcacccagaacgccaucaacggcaucaccaacaaggugaacagcgugaucgagaagaugaacacccaguucaccgccgugggcaaggaguucaacaagcuggagaagagaauggagaaccugaacaagaagguggacgacggcuuccuggacaucuggaccuacaacgccgagcugcuggugcugcuggagaacgagagaacccuggacuuccacgacagcaacgugaagaaccuguacgagaaggugaagaaccagcugagaaacaacgccaaggagaucggcaacggcugcuucgaguucuaccacaagugcgacaacgagugcauggagagcgugaagaacggcaccuacgacuaccccaaguacagcgaggagagcaagcugaacagagagaagaucgacggcgugaagcuggagagcaugggcguguaccagauccuggccaucuacagcaccguggccagcagccuggugcugcuggugagccugggcgccaucagcuucuggaugugcagcaacggcagccugcagugcagaaucugcaucuga

SEQ ID NO: 166331 - RNA, 1689 nt, Artificial Sequence
  derived and/or modified CDS sequence (opt4) from hemagglutinin__InfluenzaA__ADT79119
auggccaucaucuaccugauccugcuguucaccgccgugagaggcgaccagaucugcaucggcuaccacgccaacaacagcaccgagaagguggacaccauccuggagagaaacgugaccgugacccacgccaaggacauccuggagaagacccacaacggcaagcugugcaagcugaacggcauccccccccuggagcugggcgacugcagcaucgccggcuggcugcugggcaaccccgagugcgacagacugcugagcgugcccgaguggagcuacaucauggagaaggagaaccccagagacggccugugcuaccccggcagcuucaacgacuacgaggagcugaagcaccugcugagcagcgugaagcacuucgagaaggugaagauccugcccaaggacagauggacccagcacaccaccaccggcggcagcagagccugcgccgugagcggcaaccccagcuucuucagaaacaugguguggcugaccaagaagggcagcaacuaccccguggccaagggcagcuacaacaacaccagcggcgagcagaugcugaucaucuggggcgugcaccaccccaacgacgagaccgagcagagaacccuguaccagaacgugggcaccuacgugagcgugggcaccagcacccugaacaagagaagcacccccgacaucgccaccagacccaaggugaacggccugggcggcagaauggaguucagcuggacccugcuggacaugugggacaccaucaacuucgagagcaccggcaaccugaucgcccccgaguacggcuucaagaucagcaagagaggcagcagcggcaucaugaagaccgagggcacccugggcaacugcgagaccaagugccagaccccccugggcgccaucaacaccacccugcccuuccacaacgugcacccccugaccaucggcgagugccccaaguacgugaagagcgagaagcuggugcuggccaccggccugagaaacgugccccagaucgagagcagaggccuguucggcgccaucgccggcuucaucgagggcggcuggcagggcaugguggacggcugguacggcuaccaccacagcaacgaccagggcagcggcuacgccgccgacaaggagagcacccagaaggccuucgacggcaucaccaacaaggugaacagcgugaucgagaagaugaacacccaguucgaggccgugggcaaggaguucagcaaccuggagagaagacuggagaaccugaacaagaagauggaggacggcuuccuggacguguggaccuacaacgccgagcugcuggugcugauggagaacgagagaacccuggacuuccacgacagcaacgugaagaaccuguacgacaaggugagaaugcagcugagagacaacgugaaggagcugggcaacggcugcuucgaguucuaccacaagugcgacgacgagugcaugaacagcgugaagaacggcaccuacgacuaccccaaguacgaggaggagagcaagcugaacagaaacgagaucaagggcgugaagcugagcagcaugggcguguaccagauccuggccaucuacgccaccguggccggcagccugagccuggccaucaugauggccggcaucagcuucuggaugugcagcaacggcagccugcagugcagaaucugcaucuga

SEQ ID NO: 166332 - RNA, 1689 nt, Artificial Sequence
  derived and/or modified CDS sequence (opt4) from hemagglutinin__InfluenzaA__ADT79129
auggccaucaucuaccugauccugcuguucaccgccgugagaggcgaccagaucugcaucggcuaccacgccaacaacagcaccgagaagguggacaccauccuggagagaaacgugaccgugacccacgccaaggacauccuggagaagacccacaacggcaagcugugcaagcugaacggcauccccccccuggagcugggcgacugcagcaucgccggcuggcugcugggcaaccccgagugcgacagacugcugagagugcccgaguggagcuacaucauggagaaggagaaccccagagacggccugugcuaccccggcagcuucaacgacuacgaggagcugaagcaccugcugagcagcgugaagcacuucgagaaggugaagauccugcccaaggacagauggacccagcacaccaccaccggcggcagcagagccugcgccgugagcggcaaccccagcuucuucagaaacaugaucuggcugaccaagaagggcagcaacuaccccguggccaagggcagcuacaacaacaccagcggcgagcagaugcugaucaucuggggcgugcaccaccccaacgacgagaccgagcagagaacccuguaccagaacgugggcaccuacgugagcguggugaccagcacccugaacaagagaagcacccccaagaucgccaccagacccaaggugaacggccugggcggcagaauggaguucagcuggacccugcuggacaugugggacaccaucaacuucgagagcaccggcaaccugaucgcccccgaguacggcuucaagaucagcaagagaggcagcagcggcaucaugaagaccgagggcacccuggagaacugcgagaccaagugccagaccccccugggcgccaucaacaccacccugcccuuccacaacgugcacccccuggccaucggcgagugccccaaguacgugaagagcgagaagcuggugcuggccaccggccugagaaacgugccccagaucgagagcagaggccuguucggcgccaucgccggcuucaucgagggcggcuggcagggcaugguggacggcugguacggcuaccaccacagcaacgaccagggcagcggcuacgccgccgacaaggagagcacccagagagccuucgacggcaucaccaacaaggugaacagcgugaucgagaagaugaacacccaguucgaggccgugggcaaggaguucagcaaccuggagagaagacuggagaaccugaacaagaagauggaggacggcuuccuggacguguggaccuacaacgccgagcugcuggugcugauggagaacgagagaacccuggacuuccacgacagcaacgugaagaaccuguacgacaaggugagaaugcagcugagagacaacgugaaggagcugggcaacggcugcuucgaguucuaccacaagugcgacgacgagugcaugaacagcgugaagaacggcaccuacgacuaccccaaguacgaggaggagagcaagcugaacagaaacgagaucaagggcgugaagcugagcagcaugggcguguaccagauccuggccaucuacgccaccguggccggcagccugagccuggccaucaugauggccggcaucagcuucuggaugugcagcaacggcagccugcagugcagaaucugcaucuga

SEQ ID NO: 166333 - RNA, 1701 nt, Artificial Sequence
  derived and/or modified CDS sequence (opt4) from hemagglutinin__InfluenzaA__ADT79232
augaaggccauccugguggugcugcuguacaccuucgccaccgccaacgccgacacccugugcaucggcuaccacgccaacaacagcaccgacaccguggacaccgugcuggagaagaacgugaccgugacccacagcgugaaccugcuggaggacaagcacaacggcaagcugugcaagcugagaggcguggccccccugcaccugggcaagugcaacaucgccggcuggauccugggcaaccccgagugcgagagccugagcaccgccagcagcuggagcuacaucguggagaccagcagcagcgacaacggcaccugcuaccccggcgacuucaucgacuacgaggagcugagagagcagcugagcagcgugagcagcuucgagagauucgagaucuuccccaagaccagcagcuggcccaaccacgacagcaacaagggcgugaccgccgccugcccccacgccggcgccaagagcuucuacaagaaccugaucuggcuggugaagaagggcaacagcuaccccaagcugagcaagagcuacaucaacgacaagggcaaggaggugcuggugcuguggggcauccaccaccccagcaccagcgccgaccagcagagccuguaccagaacgccgacgccuacguguucgugggcagcagcagauacagcaagaaguucaagcccgagaucgccaucagacccaaggugagagaccaggagggcagaaugaacuacuacuggacccugguggagcccggcgacaagaucaccuucgaggccaccggcaaccugguggugcccagauacgccuucgccauggagagaaacgccggcagcggcaucaucaucagcgacacccccgugcacgacugcaacaccaccugccagacccccaagggcgccaucaacaccagccugcccuuccagaacaagcaccccaucaccaucggcaagugccccaaguacgugaagagcaccaagcugagacuggccaccggccugagaaacgugcccagcauccagagcagaggccuguucggcgccaucgccggcuucaucgagggcggcuggaccggcaugguggacggcugguacggcuaccaccaccagaacgagcagggcagcggcuacgccgccgacgugaagagcacccagaacgccaucgacgagaucaccaacaaggugaacagcgugaucgagaagaugaacacccaguucaccgccgugggcaaggaguucaaccaccuggagaagagaaucgagaaccugaacaagaagguggacgacggcuuccuggacaucuggaccuacaacgccgagcugcuggugcugcuggagaacgagagaacccuggacuaccacgacagcaacgugaagaaccuguacgagaaggugagaagccagcugaagaacaacgccaaggagaucggcaacggcugcuucgaguucuaccacaagugcgacaacaccugcauggagagcgugaagaacggcaccuacgacuaccccaaguacagcgaggaggccaagcugaacagagaggagaucgacggcgugaagcuggagagcaccagaaucuaccagauccuggccaucuacagcaccguggccagcagccuggugcugguggugagccugggcgccaucagcuucuggaugugcagcaacggcagccugcagugcagaaucugcaucuga

SEQ ID NO: 166334 - RNA, 1701 nt, Artificial Sequence
  derived and/or modified CDS sequence (opt4) from hemagglutinin__InfluenzaA__ADT79242
augaaggccauccugguggugcugcuguacaccuucgccaccgccaacgccgacacccugugcaucggcuaccacgccaacaacagcaccgacaccguggacaccgugcuggagaagaacgugaccgugacccacagcgugaaccugcuggaggacaagcacaacggcaagcugugcaagcugagaggcguggccccccugcaccugggcaagugcaacaucgccggcuggauccugggcaaccccgagugcgagagccugagcaccgccagcagcuggagcuacaucguggagacccccagcagcgacaacggcaccugcuaccccggcgacuucaucgacuacgaggagcugagagagcagcugagcagcgugagcagcuucgagagauucgagaucuuccccaagaccagcagcuggcccaaccacgacagcaacaagggcgugaccgccgccugcccccacgccggcgccaagagcuucuacaagaaccugaucuggcuggugaagaagggcaacagcuaccccaagcugagcaagagcuacaucaacgacaagggcaaggaggugcuggugcuguggggcauccaccaccccagcaccagcgccgaccagcagagccuguaccagaacgccgacgccuacguguucgugggcagcagcagauacagcaagaaguucaagcccgagaucgccaucagacccaaggugagagaccaggagggcagaaugaacuacuacuggacccugguggagcccggcgacaagaucaccuucgaggccaccggcaaccugguggugcccagauacgccuucgccauggagagaaacgccggcagcggcaucaucaucagcgacacccccgugcacgacugcaacaccaccugccagacccccaagggcgccaucaacaccagccugcccuuccagaacauccaccccaucaccaucggcaagugccccaaguacgugaagagcaccaagcugagacuggccaccggccugagaaacgugcccagcauccagagcagaggccuguucggcgccaucgccggcuucaucgagggcggcuggaccggcaugguggacggcugguacggcuaccaccaccagaacgagcagggcagcggcuacgccgccgaccugaagagcacccagaacgccaucgacgagaucaccaacaaggugaacagcgugaucgagaagaugaacacccaguucaccgccgugggcaaggaguucaaccaccuggagaagagaaucgagaaccugaacaagaagguggacgacggcuuccuggacaucuggaccuacaacgccgagcugcuggugcugcuggagaacgagagaacccuggacuaccacgacagcaacgugaagaaccuguacgagaaggugagaagccagcugaagaacaacgccaaggagaucggcaacggcugcuucgaguucuaccacaagugcgacaacaccugcauggagagcgugaagaacggcaccuacgacuaccccaaguacagcgaggaggccaagcugaacagagaggagaucgacggcgugaagcuggagagcaccagaaucuaccagauccuggccaucuacagcaccguggccagcagccuggugcugguggugagccugggcgccaucagcuucuggaugugcagcaacggcagccugcagugcagaaucugcaucuga

SEQ ID NO: 166335 - RNA, 1701 nt, Artificial Sequence
  derived and/or modified CDS sequence (opt4) from hemagglutinin__InfluenzaA__ADT91182
augaaggccauccugguggugcugcuguacaccuucgccaccgccaacgccgacacccugugcaucggcuaccacgccaacaacagcaccgacaccguggacaccgugcuggagaagaacgugaccgugacccacagcgugaaccugcuggaggacaagcacaacggcaagcugugcaagcugagaggcguggccccccugcaccugggcaagugcaacaucgccggcuggauccugggcaaccccgagugcgagccccugagcaccgccagcagcuggagcuacaucguggagaccagcagcagcgacaacggcaccugcuaccccggcgacuucaucgacuacgaggagcugagagagcagcugagcagcgugagcagcuucgagagauucgagaucuuccccaagaccagcagcuggcccaaccacgacagcaacaagggcgugaccaccgccugcccccacgccggcgccaagagcuucuacaagaaccugaucuggcuggugaagaagggcaacagcuaccccaagcugagcaagagcuacaucaacgacaagggcaaggaggugcuggugcuguggggcauccaccacccccccaccagcgccgaccagcagagccuguaccagaacgccgacgccuacguguucgugggcaccagcagauacagcaagaaguucaagcccgagaucgccaucagacccaaggugagagaccaggagggcagaaugaacuacuacuggacccugguggagcccggcgacaagaucaccuucgaggccaccggcaaccugguggugcccagauacgccuucgccauggagagaaacgccggcagcggcaucaucaucagcgacacccccgugcacgacugcaacaccaccugccagacccccaagggcgccaucaacaccagccugcccuuccagaacauccaccccaucaccaucggcaagugccccaaguacgugaagagcaccaagcugagacuggccaccggccugagaaacgugcccagcauccagagcagaggccuguucggcgccaucgccggcuucaucgagggcggcuggaccggcaugguggacggcugguacggcuaccaccaccagaacgagcagggcagcggcuacgccgccgaccugaagagcacccagaacgccaucgacggcaucaccaacaaggugaacagcgugaucgagaagaugaacacccaguucaccgccgugggcaaggaguucaaccaccuggagaagagaaucgagaaccugaacaagaagguggacgacggcuuccuggacaucuggaccuacaacgccgagcugcuggugcugcuggagaacgagagaacccuggacuaccacgacagcaacgugaagaaccuguacgagaaggugagaagccagcugaagaacaacgccaaggagaucggcaacggcugcuucgaguucuaccacaagugcgacaacaccugcauggagagcgugaagaacggcaccuacgacuaccccaaguacagcgaggaggccaagcugaacagagaggagaucgacggcgugaagcuggagagcaccagaaucuaccagauccuggccaucuacagcaccguggccagcagccuggugcugguggugagccugggcgccaucagcuucuggaugugcagcaacggcagccugcagugcagaaucugcaucuga

SEQ ID NO: 166336 - RNA, 1701 nt, Artificial Sequence
  derived and/or modified CDS sequence (opt4) from hemagglutinin__InfluenzaA__ADU20561
augaaggccauccugguggugcugcuguacaccuucgccaccgccaacgccgacacccugugcaucggcuaccacgccaacaacagcaccgacaccguggacaccgugcuggagaagaacgugaccgugacccacagcgugaaccugcuggaggacaagcacaacggcaagcugugcaagcugggcggcguggccccccugcaccugggcaagugcaacaucgccggcuggauccugggcaaccccgagugcgagagccugagcaccgccagcagcuggagcuacaucguggagaccagcagcagcgacaacggcaccugcuaccccggcgacuucaucgacuacgaggagcugagagagcagcugagcagcgugagcagcuucgagagauucgagaucuuccccaagaccagcagcuggcccaaccacgacagcaacaagggcgugaccgccgccugcccccacgccggcgccaagagcuucuacaagaaccugaucuggcuggugaagaagggcaacagcuaccccaagcugagcaagagcuacaucaacgacaagggcaaggaggugcuggugcuguggggcauccaccaccccagcaccagcgccgaccagcagagccuguaccagaacgccgacgccuacguguucgugggcaccagcagauacagcaagaaguucaagcccgagaucgccaucagacccaaggugagagaccaggagggcagaaugaacuacuacuggacccugguggagcccggcgacaagaucaccuucgaggccaccggcaaccugguggugcccagauacgccuucgccauggagagaaacgccggcagcggcaucaucaucagcgacacccccgugcacgacugcaacaccaccugccagacccccaagggcgccaucaacaccagccugcccuuccagaacauccaccccaucaccaucggcaagugccccaaguacgugaagagcaccaagcugagacuggccaccggccugagaaacgugcccagcauccagagcagaggccuguucggcgccaucgccggcuucaucgagggcggcuggaccggcaugguggacggcugguacggcuaccaccaccagaacgagcagggcagcggcuacgccgccgaccugaagagcacccagaacgccaucgacaagaucaccaacaaggugaacagcgugaucgagaagaugaacacccaguucaccgccgugggcaaggaguucaaccaccuggagaagagaaucgagaaccugaacaagaagguggacgacggcuuccuggacaucuggaccuacaacgccgagcugcuggugcugcuggagaacgagagaacccuggacuaccacgacagcaacgugaagaaccuguacgagaaggugagaagccagcugaagaacaacgccaaggagaucggcaacggcugcuucgaguucuaccacaagugcgacaacaccugcauggagagcgugaagaacggcaccuacgacuaccccaaguacagcgaggaggccaagcugaacagagaggagaucgacggcgugaagcuggagagcaccagaaucuaccagauccuggccaucuacagcaccguggccagcagccuggugcugguggugagccugggcgccaucagcuucuggaugugcagcaacggcagccugcagugcagaaucugcaucuga

SEQ ID NO: 166337 - RNA, 1701 nt, Artificial Sequence
  derived and/or modified CDS sequence (opt4) from hemagglutinin__InfluenzaA__ADU20562
augaaggccauccugguggugcugcuguacaccuucgccaccgccaacgccgacacccugugcaucggcuaccacgccaacaacagcaccgacaccguggacaccgugcuggagaagaacgugaccgugacccacagcgugaaccugcuggaggacaagcacaacggcaagcugugcaagcugagaggcguggccccccugcaccugggcaagugcaagaucgccggcuggauccugggcaaccccgagugcgagagccugagcaccgccagcagcuggagcuacaucguggagaccagcagcagcgacaacggcaccugcuaccccggcgacuucaucgacuacgaggagcugagagagcagcugagcagcgugagcagcuucgagagauucgagaucuuccccaagaccagcagcuggcccaaccacgacagcaacaagggcgugaccgccgccugcccccacgccggcgccaagagcuucuacaagaaccugaucuggcuggugaagaagggcaacagcuaccccaagcugagcaagagcuacaucaacgacaagggcaaggaggugcuggugcuguggggcauccaccaccccagcaccagcgccgaccagcagagccuguaccagaacgccgacgccuacguguucgugggcaccagcagauacagcaagaaguucaagcccgagaucgccaucagacccaaggugagagaccaggagggcagaaugaacuacuacuggacccugguggagcccggcgacaagaucaccuucgaggccaccggcaaccugguggugcccagauacgccuucgccauggagagaaacgccggcagcggcaucaucaucagcgacacccccgugcacgacugcaacaccaccugccagacccccaagggcgccaucaacaccagccugcccuuccagaacauccaccccaucaccaucggcaagugccccaaguacgugaagagcaccaagcugagacuggccaccggccugagaaacgugcccagcauccagagcagaggccuguucggcgccaucgccggcuucaucgagggcggcuggaccggcaugguggacggcugguacggcuaccaccaccagaacgagcagggcagcggcuacgccgccgaccugaagagcacccagaacgccaucgacaagaucaccaacaaggugaacagcgugaucgagaagaugaacacccaguucaccgccgugggcaaggaguucaaccaccuggagaagagaaucgagaaccugaacaagaagguggacgacggcuuccuggacaucuggaccuacaacgccgagcugcuggugcugcuggagaacgagagaacccuggacuaccacgacagcaacgugaagaaccuguacgagaaggugagaagccagcugaagaacaacgccaaggagaucggcaacggcugcuucgaguucuaccacaagugcgacaacaccugcauggagagcgugaagaacggcaccuacgacuaccccaaguacagcgaggaggccaagcugaacagagaggagaucgacggcgugaagcuggagagcaccagaaucuaccagauccuggccaucuacagcaccguggccagcagccuggugcugguggugagccugggcgccaucagcuucuggaugugcagcaacggcagccugcagugcagaaucugcaucuga

SEQ ID NO: 166338 - RNA, 1701 nt, Artificial Sequence
  derived and/or modified CDS sequence (opt4) from hemagglutinin__InfluenzaA__ADU25478
auggaggccaagcuguucgugcuguucugcgccuucaccgcccugaaggccgacaccaucugcgugggcuaccacgccaacaacagcaccgacaccguggacaccauccuggagagaaacgugaccgugacccacagcgugaaccugcuggagagcagccacaacggcaagcugugcagccugaacggcaaggccccccugcagcugggcaacugcaacguggccggcuggauccugggcaaccccgagugcgaccugcugcugaccgugaacagcuggagcuacaucaucgagaccagcaccagcaagaacggcgccugcuaccccggcgaguucgccgacuacgaggagcugagagagcagcugagcaccgugagcagcuucgagagauucgagaucuuccccaaggccaccagcuggcccaaccacgagaccaccaagggcaccaccguggccugcagccacagcggcgccaacagcuucuacagaaaccugcuguggaucgugaagaagggcaacagcuaccccaagcugagcaagagcuacaccaacaacaagggcaaggaggugcuggugaucuggggcgugcaccacccccccaccgacagcgaccagcagacccuguaccagaacaaccacaccuacgugagcgugggcagcagcaaguacuaccagagauucacccccgagaucgugaccagacccaaggugagagagcaggccggcagaaugaacuacuacuggacccugcuggaccagggcgacaccaucaccuucgaggccaccggcaaccugaucgcccccuggcacgccuucgcccugaacaagggcagcagcagcggcaucaugaugagcgacgcccacgugcacaacugcaccaccaagugccagaccccccacggcgcccugaagagcaaccugcccuuccagaacgugcaccccaucaccaucggcgagugccccaaguacgugaagagcacccagcugagaauggccaccggccugagaaacauccccagcauccagagcagaggccuguucggcgccaucgccggcuucaucgagggcggcuggaccggcaugaucgacggcugguacggcuaccaccaccagaacgagcagggcagcggcuacgccgccgaccagaagagcacccagaucgccaucgacggcaucagcaacaaggugaacagcgugaucgagaagaugaacgugcaguucaccagcgugggcaaggaguucaacaaccuggagaagagaaucgagaaccugaacaagaagguggacgacggcuuccuggacaucuggaccuacaacgccgagcugcugauccugcuggagaacgagagaacccuggacuuccacgacuucaacgugaagaaccuguacgagagagugaagagccagcugagaaacaacgccaaggagaucggcaacggcugcuucgaguucuaccacaagugcaacaacgagugcauggagagcgugaagaacggcaccuacaacuaccccagauacagcgaggagagcaagcugaacagagaggagaucgacggcgugaagcuggagagcgugggcgugcaccagauccuggccaucuacagcaccguggccagcagccuggugcugcuggugagccugggcgccaucagcuucuggaugugcagcaacggcagccugcagugcagaaucugcaucuga

SEQ ID NO: 166339 - RNA, 1701 nt, Artificial Sequence
  derived and/or modified CDS sequence (opt4) from hemagglutinin__InfluenzaA__ADU59558
augaaggccauccugguggugcugcuguacaccuucgccaccgccaacgccgacacccugugcaucggcuaccacgccaacaacagcaccgacaccguggacaccgugcuggagaagaacgugaccgugacccacagcgugaaccugcuggaggacaagcacaacggcaagcugugcaagcugagaggcguggccccccugcaccugggcaagugcaacaucgccggcuggauccugggcaaccccgagugcgagagccugagcaccgccagcagcuggagcuacaucguggagaccagcagcagcgacaacggcaccugcuaccccggcgacuucaucgacuacgaggagcugagagagcagcugagcagcgugagcagcuucgagagauucgagaucuuccccaagaccagcagcuggcccaaccacgacagcaacaagggcgugaccgccgccugcccccacgccggcgccaagagcuucuacaagaaccugaucuggcuggugaagaagggcaacagcuaccccaagcugagcaagagcuacaucaacgacaagggcaaggaggugcuggugcuguggggcauccaccaccccagcaccagcgccgaccagcagagccuguaccagaacgccgacgccuacguguucgugggcaccagcagauacagcaagaaguucaagcccgagaucgccaucagacccaaggugagaggccaggagggcagaaugaacuacuacuggacccugguggagcccggcgacaagaucaccuucgaggccaccggcaaccugguggugcccagauacgccuucgccauggagagaaacgccggcagcggcaucaucaucagcgacacccccgugcacgacugcaacaccaccugccagacccccaagggcgccaucaacaccagccugcccuuccagaacauccaccccaucaccaucggcaagugccccaaguacgugaagagcaccaagcugagacuggccaccggccugagaaacgugcccagcauccagagcagaggccuguucggcgccaucgccggcuucaucgagggcggcuggaccggcaugguggacggcugguacggcuaccaccaccagaacgagcagggcagcggcuacgccgccgaccugaagagcacccagaacgccaucgacaagaucaccaacaaggugaacagcgugaucgagaagaugaacacccaguucaccgccgugggcaaggaguucaaccaccuggagaagagaaucgagaaccugaacaagaagguggacgacggcuuccuggacaucuggaccuacaacgccgagcugcuggugcugcuggagaacgagagaacccuggacuaccacgacagcaacgugaagaaccuguacgagaaggugagaagccagcugaagaacaacgccaaggagaucggcaacggcugcuucgaguucuaccacaagugcgacaacaccugcauggagagcgugaagaacggcaccuacgacuaccccaaguacagcgaggaggccaagcugaacagagaggagaucgacggcgugaagcuggagagcaccagaaucuaccagauccuggccaucuacagcaccguggccagcagccuggugcugguggugagccugggcgccaucagcuucuggaugugcagcaacggcagccugcagugcagaaucugcaucuga

SEQ ID NO: 166340 - RNA, 1701 nt, Artificial Sequence; identical to SEQ ID NO: 162729
  derived and/or modified CDS sequence (opt4) from hemagglutinin__InfluenzaA__ADU59579

SEQ ID NO: 166341 - RNA, 1701 nt, Artificial Sequence; identical to SEQ ID NO: 162729
  derived and/or modified CDS sequence (opt4) from hemagglutinin__InfluenzaA__ADU59590

SEQ ID NO: 166342 - RNA, 1701 nt, Artificial Sequence; identical to SEQ ID NO: 162729
  derived and/or modified CDS sequence (opt4) from hemagglutinin__InfluenzaA__ADU59601

SEQ ID NO: 166343 - RNA, 1701 nt, Artificial Sequence; identical to SEQ ID NO: 162729
  derived and/or modified CDS sequence (opt4) from hemagglutinin__InfluenzaA__ADU59612

SEQ ID NO: 166344 - RNA, 1701 nt, Artificial Sequence; identical to SEQ ID NO: 162729
  derived and/or modified CDS sequence (opt4) from hemagglutinin__InfluenzaA__ADU59768

SEQ ID NO: 166345 - RNA, 1701 nt, Artificial Sequence; identical to SEQ ID NO: 162729
  derived and/or modified CDS sequence (opt4) from hemagglutinin__InfluenzaA__ADU59769

SEQ ID NO: 166346 - RNA, 1701 nt, Artificial Sequence; identical to SEQ ID NO: 162729
  derived and/or modified CDS sequence (opt4) from hemagglutinin__InfluenzaA__ADU59771

SEQ ID NO: 166347 - RNA, 1701 nt, Artificial Sequence; identical to SEQ ID NO: 162729
  derived and/or modified CDS sequence (opt4) from hemagglutinin__InfluenzaA__ADU59772

SEQ ID NO: 166348 - RNA, 1701 nt, Artificial Sequence; identical to SEQ ID NO: 162729
  derived and/or modified CDS sequence (opt4) from hemagglutinin__InfluenzaA__ADU59774

SEQ ID NO: 166349 - RNA, 1701 nt, Artificial Sequence; identical to SEQ ID NO: 162729
  derived and/or modified CDS sequence (opt4) from hemagglutinin__InfluenzaA__ADU59906

SEQ ID NO: 166350 - RNA, 1701 nt, Artificial Sequence; identical to SEQ ID NO: 162729
  derived and/or modified CDS sequence (opt4) from hemagglutinin__InfluenzaA__ADU59916

SEQ ID NO: 166351 - RNA, 1701 nt, Artificial Sequence; identical to SEQ ID NO: 162729
  derived and/or modified CDS sequence (opt4) from hemagglutinin__InfluenzaA__ADU76756

SEQ ID NO: 166352 - RNA, 1701 nt, Artificial Sequence; identical to SEQ ID NO: 162729
  derived and/or modified CDS sequence (opt4) from hemagglutinin__InfluenzaA__ADU76757

SEQ ID NO: 166353 - RNA, 1701 nt, Artificial Sequence; identical to SEQ ID NO: 162729
  derived and/or modified CDS sequence (opt4) from hemagglutinin__InfluenzaA__ADU76758

SEQ ID NO: 166354 - RNA, 1701 nt, Artificial Sequence; identical to SEQ ID NO: 162729
  derived and/or modified CDS sequence (opt4) from hemagglutinin__InfluenzaA__ADU76759

SEQ ID NO: 166355 - RNA, 1701 nt, Artificial Sequence; identical to SEQ ID NO: 163089
  derived and/or modified CDS sequence (opt4) from hemagglutinin__InfluenzaA__ADU76761

SEQ ID NO: 166356 - RNA, 1701 nt, Artificial Sequence; identical to SEQ ID NO: 162729
  derived and/or modified CDS sequence (opt4) from hemagglutinin__InfluenzaA__ADU76762

SEQ ID NO: 166357 - RNA, 1701 nt, Artificial Sequence
  derived and/or modified CDS sequence (opt4) from hemagglutinin__InfluenzaA__ADU76764
augaaggccauccugguggugcugcuguacaccuucgccaccgccaacgccgacacccugugcaucggcuaccacgccaacaacagcaccgacaccguggacaccgugcuggagaagaacgugaccgugacccacagcgugaaccugcuggaggacaagcacaacggcaagcugugcaagcugagaggcguggccccccugcaccugggcaagugcaacaucgccggcuggauccugggcaaccccgagugcgagagccugagcaccgccagcagcuggagcuacaucguggaggccagcagcagcaacaacggcaccugcuaccccggcgacuucaucgacuacgaggagcugagagagcagcugagcagcgugagcagcuucgagagauucgagaucuuccccaagaccagcagcuggcccaaccacgacagcaacaagggcgugaccgccgccugcccccacgccggcgccaagagcuucuacaagaaccugaucuggcuggugaagaagggcaacagcuaccccaagcugagcaagagcuacaucaacgacaagggcaaggaggugcuggugcuguggggcauccaccaccccagcaccagcgccgaccagcagagccuguaccagaacgccgacgccuacguguucgugggcaccagcagauacagcaagaaguucaagcccgagaucgccaucagacccaaggugagagaccaggagggcagaaugaacuacuacuggacccugguggagcccggcgacaagaucaccuucgaggccaccggcaaccugguggugcccagauacgccuucgccauggagagaaacgccggcagcggcaucaucaucagcgacacccccgugcacgacugcaacaccaccugccagacccccaagggcgccaucaacaccagccugcccuuccagaacauccaccccaucaccaucggcaagugccccaaguacgugaagagcaccaagcugagacuggccaccggccugagaaacgugcccagcauccagagcagaggccuguucggcgccaucgccggcuucaucgagggcggcuggaccggcaugguggacggcugguacggcuaccaccaccagaacgagcagggcagcggcuacgccgccgaccugaagagcacccagaacgccaucgacgagaucaccaacaaggugaacagcgugaucgagaagaugaacacccaguucaucgccgugggcaaggaguucaaccaccuggagaagagaaucgagaaccugaacaagaagguggacgacggcuuccuggacaucuggaccuacaacgccgagcugcuggugcugcuggagaacgagagaacccuggacuaccacgacagcaacgugaagaaccuguacgagaaggugagaagccagcugaagaacaacgccaaggagaucggcaacggcugcuucgaguucuaccacaagugcgacaacaccugcauggagagcgugaagaacggcaccuacgacuaccccaaguacagcgaggaggccaagcugaacagagaggagaucgacggcgugaagcuggagagcaccagaaucuaccagauccuggccaucuacagcaccguggccagcagccuggugcugguggugagccugggcgccaucagcuucuggaugugcagcaacggcagccugcagugcagaaucugcaucuga

SEQ ID NO: 166358 - RNA, 1701 nt, Artificial Sequence
  derived and/or modified CDS sequence (opt4) from hemagglutinin__InfluenzaA__ADU76765
augaaggccauccugaucgugcugcuguacaccuucgccaccgccaacgccgacacccugugcaucggcuaccacgccaacaacagcaccgacaccguggacaccgugcuggagaagaacgugaccgugacccacagcgugaaccugcuggaggacaagcacaacggcaagcugugcaagcugagaggcguggccccccugcaccugggcaagugcaacaucgccggcuggauccugggcaaccccgagugcgagagccugagcaccgccagcagcuggagcuacaucguggagaccagcagcagcgacaacggcaccugcuaccccggcgacuucaucgacuacgaggagcugagagagcagcugagcagcgugagcagcuucgagagauucgagaucuuccccaagaccagcagcuggcccaaccacgacagcaacaagggcgugaccgccgccugcccccacgccggcgccaagagcuucuacaagaaccugaucuggcuggugaagaagggcaacagcuaccccaagcugagcaagagcuacaucaacgacaagggcaaggaggugcuggugcuguggggcauccaccaccccagcaccagcgccgaccagcagagccuguaccagaacgccgacgccuacguguucgugggcaccagcagauacagcaagaaguucaagcccgagaucgccaucagacccaaggugagagaccaggagggcagaaugaacuacuacuggacccugguggagcccggcgacaagaucaccuucgaggccaccggcaaccugguggugcccagauacgccuucgccauggagagaaacgccggcagcggcaucaucaucagcgacacccccgugcacgacugcaacaccaccugccagacccccaagggcgccaucaacaccagccugcccuuccagaacauccaccccaucaccaucggcaagugccccaaguacgugaagagcaccaagcugagacuggccaccggccugagaaacgugcccagcauccagagcagaggccuguucggcgccaucgccggcuucaucgagggcggcuggaccggcaugguggacggcugguacggcuaccaccaccagaacgagcagggcagcggcuacgccgccgaccugaagagcacccagaacgccaucgacgagaucaccaacaaggugaacagcgugaucgagaagaugaacacccaguucaccgccgugggcaaggaguucaaccaccuggagaagagaaucgagaaccugaacaagaagguggacgacggcuuccuggacaucuggaccuacaacgccgagcugcuggugcugcuggagaacgagagaacccuggacuaccacgacagcaacgugaagaaccuguacgagaaggugagaagccagcugaagaacaacgccaaggagaucggcaacggcugcuucgaguucuaccacaagugcgacaacaccugcauggagagcgugaagaacggcaccuacgacuaccccaaguacagcgaggaggccaagcugaacagagaggagaucgacggcgugaagcuggagagcaccagaaucuaccagauccuggccaucuacagcagcguggccagcagccuggugcugguggugagccugggcgccaucagcuucuggaugugcagcaacggcagccugcagugcagaaucugcaucuga

SEQ ID NO: 166359 - RNA, 1701 nt, Artificial Sequence; identical to SEQ ID NO: 164326
  derived and/or modified CDS sequence (opt4) from hemagglutinin__InfluenzaA__ADU76766

SEQ ID NO: 166360 - RNA, 1701 nt, Artificial Sequence
  derived and/or modified CDS sequence (opt4) from hemagglutinin__InfluenzaA__ADU76767
augaaggccauccugguggugcugcuguacaccuucgccaccgccaacgccgacacccugugcaucggcuaccacgccaacaacagcaccgacaccguggacaccgugcuggagaagaacgugaccgugacccacagcgugaaccugcuggaggacaagcacaacggcaagcugugcaagcugagaggcguggccccccugcaccugggcaagugcaacaucgccggcuggauccugggcaaccccgagugcgagagccugagcaccgccagcagcuggagcuacaucguggagaccagcagcagcgacaacggcaccugcuaccccggcgacuucaucgacuacgaggagcugagagagcagcugagcagcgugagcagcuucgagagauucgagaucuuccccaagaccagcagcuggcccaaccacgacagcaacaagggcgugaccgccgccugcccccacgccggcgccaagagcuucuacaagaaccugaucuggcuggugaagaagggcaacagcuaccccaagcugagcaagagcuacaucaacgacaagggcaaggaggugcuggugcuguggggcauccaccaccccagcaccagcgccgaccagcagagccuguaccagaacgccgacgccuacguguucgugggcaccagcagauacagcaagaaguucaagcccgagaucgccaucagacccaaggugagagagcaggagggcagaaugaacuacuacuggacccugguggagcccggcgacaagaucaccuucgaggccaccggcaaccugguggugcccagauacgccuucgccauggagagaaacgccggcagcggcaucaucaucagcgacacccccgugcacgacugcaacaccaccugccagacccccaagggcgccaucaacaccagccugcccuuccagaacauccaccccaucaccaucggcaagugccccaaguacgugaagagcaccaagcugagacuggccaccggccugagaaacgugcccagcauccagagcagaggccuguucggcgccaucgccggcuucaucgagggcggcuggaccggcaugguggacggcugguacggcuaccaccaccagaacgagcagggcagcggcuacgccgccgaccugaagagcacccagaacgccaucgacaagaucaccaacaaggugaacagcgugaucgagaagaugaacacccaguucaccgccgugggcaaggaguucaaccaccuggagaagagaaucgagaaccugaacaagaagguggacgacggcuuccuggacaucuggaccuacaacgccgagcugcuggugcugcuggagaacgagagaacccuggacuaccacgacagcaacgugaagaaccuguacgagaaggugagaagccagcugaagaacaacgccaaggagaucggcaacggcugcuucgaguucuaccacaagugcgacaacaccugcauggagagcgugaagaacggcaccuacgacuaccccaaguacagcgaggaggccaagcugaacagagaggagaucgacggcgugaagcuggagagcaccagaaucuaccagauccuggccaucuacagcaccguggccagcagccuggugcugguggugagccugggcgccaucagcuucuggaugugcagcaacggcagccugcagugcagaaucugcaucuga

SEQ ID NO: 166361 - RNA, 1701 nt, Artificial Sequence
  derived and/or modified CDS sequence (opt4) from hemagglutinin__InfluenzaA__ADU76768
augaaggccauccugguggugcugcuguacaccuucgccaucgccaacgccgacacccugugcaucggcuaccacgccaacaacagcaccgacaccguggacaccgugcuggagaagaacgugaccgugacccacagcgugaaccugcuggaggacaagcacaacggcaagcugugcaagcugagaggcguggccccccugcaccugggcaagugcaacaucgccggcuggauccugggcaaccccgagugcgagagccugagcaccgccagcagcuggagcuacaucguggagaccagcagcagcgacaacggcaccugcuaccccggcgacuucaucgacuacgaggagcugagagagcagcugagcagcgugagcagcuucgagagauucgagaucuuccccaagaccagcagcuggcccaaccacgacagcaacaagggcgugaccgccgccugcccccacgccggcgccaagagcuucuacaagaaccugaucuggcuggugaagaagggcaacagcuaccccaagcugagcaagagcuacaucaacgacaagggcaaggaggugcuggugcuguggggcauccaccaccccagcaccagcgccgaccagcagagccuguaccagaacgccgacgccuacguguucgugggcaccagcaaguacagcaagaaguucaagcccgagaucgccaucagacccaaggugagagaccaggagggcagaaugaacuacuacuggacccugguggagcccggcgacaagaucaccuucgaggccaccggcaaccugguggugcccagauacgccuucgccauggagagaaacgccggcagcggcaucaucaucagcgacacccccgugcacgacugcaacaccaccugccagacccccaagggcgccaucaacaccagccugcccuuccagaacauccaccccaucaccaucggcaagugccccaaguacgugaagagcaccaagcugagacuggccaccggccugagaaacgugcccagcauccagagcagaggccuguucggcgccaucgccggcuucaucgagggcggcuggaccggcaugguggacggcugguacggcuaccaccaccagaacgagcagggcagcggcuacgccgccgaccugaagagcacccagcacgccaucgacgagaucaccaacaaggugaacagcgugaucgagaagaugaacacccaguucaccgccgugggcaaggaguucaaccaccuggagaagagaaucgagaaccugaacaagaagguggacgacggcuuccuggacaucuggaccuacaacgccgagcugcuggugcugcuggagaacgagagaacccuggacuaccacgacagcaacgugaagaaccuguacgagaaggugagaagccagcugaagaacaacgccaaggagaucggcaacggcugcuucgaguucuaccacaagugcgacaacaccugcauggagagcgugaagaacggcaccuacgacuaccccaaguacagcgaggaggccaagcugaacagagaggagaucaacggcgugaagcuggagagcaccagaaucuaccagauccuggccaucuacagcaccguggccagcagccuggugcugguggugagccugggcgccaucagcuucuggaugugcagcaacggcagccugcagugcagaaucugcaucuga

SEQ ID NO: 166362 - RNA, 1701 nt, Artificial Sequence; identical to SEQ ID NO: 162729
  derived and/or modified CDS sequence (opt4) from hemagglutinin__InfluenzaA__ADU76769

SEQ ID NO: 166363 - RNA, 1701 nt, Artificial Sequence; identical to SEQ ID NO: 162729
  derived and/or modified CDS sequence (opt4) from hemagglutinin__InfluenzaA__ADU76770

SEQ ID NO: 166364 - RNA, 1701 nt, Artificial Sequence; identical to SEQ ID NO: 162729
  derived and/or modified CDS sequence (opt4) from hemagglutinin__InfluenzaA__ADU76771

SEQ ID NO: 166365 - RNA, 1701 nt, Artificial Sequence; identical to SEQ ID NO: 163474
  derived and/or modified CDS sequence (opt4) from hemagglutinin__InfluenzaA__ADU76772

SEQ ID NO: 166366 - RNA, 1701 nt, Artificial Sequence; identical to SEQ ID NO: 162729
  derived and/or modified CDS sequence (opt4) from hemagglutinin__InfluenzaA__ADU76774

SEQ ID NO: 166367 - RNA, 1701 nt, Artificial Sequence; identical to SEQ ID NO: 162729
  derived and/or modified CDS sequence (opt4) from hemagglutinin__InfluenzaA__ADU76775

SEQ ID NO: 166368 - RNA, 1701 nt, Artificial Sequence; identical to SEQ ID NO: 162729
  derived and/or modified CDS sequence (opt4) from hemagglutinin__InfluenzaA__ADU76776

SEQ ID NO: 166369 - RNA, 1701 nt, Artificial Sequence; identical to SEQ ID NO: 162729
  derived and/or modified CDS sequence (opt4) from hemagglutinin__InfluenzaA__ADU76777

SEQ ID NO: 166370 - RNA, 1701 nt, Artificial Sequence; identical to SEQ ID NO: 162729
  derived and/or modified CDS sequence (opt4) from hemagglutinin__InfluenzaA__ADU76778

SEQ ID NO: 166371 - RNA, 1701 nt, Artificial Sequence; identical to SEQ ID NO: 165587
  derived and/or modified CDS sequence (opt4) from hemagglutinin__InfluenzaA__ADU76779

SEQ ID NO: 166372 - RNA, 1701 nt, Artificial Sequence; identical to SEQ ID NO: 162729
  derived and/or modified CDS sequence (opt4) from hemagglutinin__InfluenzaA__ADU76780

SEQ ID NO: 166373 - RNA, 1701 nt, Artificial Sequence; identical to SEQ ID NO: 164326
  derived and/or modified CDS sequence (opt4) from hemagglutinin__InfluenzaA__ADU76781

SEQ ID NO: 166374 - RNA, 1701 nt, Artificial Sequence; identical to SEQ ID NO: 163089
  derived and/or modified CDS sequence (opt4) from hemagglutinin__InfluenzaA__ADU76782

SEQ ID NO: 166375 - RNA, 1701 nt, Artificial Sequence
  derived and/or modified CDS sequence (opt4) from hemagglutinin__InfluenzaA__ADU76784
augaaggccauccugguggugcugcuguacaccuucgccaccgccaacgccgacacccugugcaucggcuaccacgccaacaacagcaccgacaccguggacaccgugcuggagaagaacgugaccgugacccacagcgugaaccugcuggaggacaagcacaacggcaagcugugcaagcugagaggcguggccccccugcaccugggcaagugcaacaucgccggcuggauccugggcaaccccgagugcgagagccugagcaccgccagcagcuggagcuacaucguggagaccagcagcagcaacaacggcaccugcuaccccggcgacuucaucgacuacgaggagcugagagagcagcugagcagcgugagcagcuucgagagauucgagaucuuccccaagaccagcagcuggcccaaccacgacagcaacaagggcgugaccgccgccugcccccacgccggcgccaagagcuucuacaagaaccugaucuggcuggugaagaagggcaacagcuaccccaagcugagcaagagcuacaucaacgacaagggcaaggaggugcuggugcuguggggcauccaccaccccagcaccagcgccgaccagcagagccuguaccagaacgccgacgccuacguguucgugggcaccagcagauacagcaagaaguucaagcccgagaucgccaucagacccaaggugagagaccaggagggcagaaugaacuacuacuggacccugguggagcccggcgacaagaucaccuucgaggccaccggcaaccugguggugcccagauacgccuucgccauggagagaaacgccggcagcggcaucaucaucagcgacacccccgugcacgacugcaacaccaccugccagacccccaagggcgccaucaacaccagccugcccuuccagaacauccaccccaucaccaucggcaagugccccaaguacgugaagagcaccaagcugagacuggccaccggccugagaaacgugcccagcauccagagcagaggccuguucggcgccaucgccggcuucaucgagggcggcuggaccggcaugguggacggcugguacggcuaccaccaccagaacgagcagggcagcggcuacgccgccgaccugaagagcacccagaacgccaucgacgagaucaccaacaaggugaacagcgugaucgagaagaugaacacccaguucaccgccgugggcaaggaguucaaccaccuggagaagagaaucgagaaccugaacaagaagguggacgacggcuuccuggacaucuggaccuacaacgccgagcugcuggugcugcuggagaacgagagaacccuggacuaccacgacagcaacgugaagaaccuguacgagaaggugagaagccagcugaagaacaacgccaaggagaucggcaacggcugcuucgaguucuaccacaagugcgacaacaccugcauggagagcgugaagaacggcaccuacgacuaccccaaguacagcgaggaggccaagcugaacagagaggagaucgacggcgugaagcuggagagcaccagaaucuaccagauccuggccaucuacagcaccguggccagcagccuggugcugguggugagccugggcgccaucagcuucuggaugugcagcaacggcagccugcagugcagaaucugcaucuga

SEQ ID NO: 166376 - RNA, 1701 nt, Artificial Sequence; identical to SEQ ID NO: 162729
  derived and/or modified CDS sequence (opt4) from hemagglutinin__InfluenzaA__ADU76785

SEQ ID NO: 166377 - RNA, 1701 nt, Artificial Sequence; identical to SEQ ID NO: 162729
  derived and/or modified CDS sequence (opt4) from hemagglutinin__InfluenzaA__ADU76786

SEQ ID NO: 166378 - RNA, 1701 nt, Artificial Sequence
  derived and/or modified CDS sequence (opt4) from hemagglutinin__InfluenzaA__ADU76787
augaaggccauccugguggugcugcuguacaccuucgccaccgccaacgccgacacccugugcaucggcuaccacgccaacaacagcaccgacaccguggacaccgugcuggagaagaacgugaccgugacccacagcgugaaccugcuggaggacaagcacaacggcaagcugugcaagcugagaggcguggccccccugcaccugggcaagugcaacaucgccggcuggauccugggcaaccccgagugcgagagccugagcaccgccagcagcuggagcuacaucguggagaccagcagcagcgacaacggcaccugcuaccccggcgacuucaucgacuacgaggagcugagagagcagcugagcagcgugagcagcuucgagagauucgagaucuuccccaagaccagcagcuggcccaaccacgacagcaacaagggcgugaccgccgccugcccccacgccggcgccaagagcuucuacaagaaccugaucuggcuggugaagaagggcaacagcuaccccaagcugagcaagagcuacaucaacgacaagggcaaggaggugcuggugcuguggggcauccaccaccccagcaccagcgccgaccagcagagccuguaccagaacgccgacgccuacguguucgugggcaccagcagauacagcaagaaguucaagcccgagaucgccaucagacccaaggugagagagcaggagggcagaaugaacuacuacuggacccugguggagcccggcgacaagaucaccuucgaggccaccggcaaccugguggugcccagauacgccuucgccauggagagaaacgccggcagcggcaucaucaucagcgacacccccgugcacgacugcaacaccaccugccagacccccaagggcgccaucaacaccagccugcccuuccacaacauccacagcaucaccaucggcaagugccccaaguacgugaagagcaccaagcugagacuggccaccggccugagaaacgugcccagcauccagagcagaggccuguucggcgccaucgccggcuucaucgagggcggcuggaccggcaugguggacggcugguacggcuaccaccaccagaacgagcagggcagcggcuacgccgccgaccugaagagcacccagaacgccaucgacgagaucaccaacaaggugaacagcgugaucgagaagaugaacacccaguucaccgccgugggcaaggaguucaaccaccuggagaagagaaucgagaaccugaacaagaagguggacgacggcuuccuggacaucuggaccuacaacgccgagcugcuggugcugcuggagaacgagagaacccuggacuaccacgacagcaacgugaagaaccuguacgagaaggugagaagccagcugaagaacaacgccaaggagaucggcaacggcugcuucgaguucuaccacaagugcgacaacaccugcauggagagcgugaagaacggcaccuacgacuaccccaaguacagcgaggaggccaagcugaacagagaggagaucgacggcgugaagcuggagagcaccagaaucuaccagauccuggccaucuacagcaccguggccagcagccuggugcugguggugagccugggcgccaucagcuucuggaugugcagcaacggcagccugcagugcagaaucugcaucuga

SEQ ID NO: 166379 - RNA, 1701 nt, Artificial Sequence; identical to SEQ ID NO: 166360
  derived and/or modified CDS sequence (opt4) from hemagglutinin__InfluenzaA__ADU76788

SEQ ID NO: 166380 - RNA, 1701 nt, Artificial Sequence; identical to SEQ ID NO: 166360
  derived and/or modified CDS sequence (opt4) from hemagglutinin__InfluenzaA__ADU76789

SEQ ID NO: 166381 - RNA, 1701 nt, Artificial Sequence; identical to SEQ ID NO: 162729
  derived and/or modified CDS sequence (opt4) from hemagglutinin__InfluenzaA__ADU76790

SEQ ID NO: 166382 - RNA, 1701 nt, Artificial Sequence; identical to SEQ ID NO: 162729
  derived and/or modified CDS sequence (opt4) from hemagglutinin__InfluenzaA__ADU76791

SEQ ID NO: 166383 - RNA, 1701 nt, Artificial Sequence; identical to SEQ ID NO: 166360
  derived and/or modified CDS sequence (opt4) from hemagglutinin__InfluenzaA__ADU76792

SEQ ID NO: 166384 - RNA, 1701 nt, Artificial Sequence
  derived and/or modified CDS sequence (opt4) from hemagglutinin__InfluenzaA__ADU76793
augaaggccauccugguggugcugcuguacaccuucgccaccgccaacgccgacacccugugcaucggcuaccacgccaacaacagcaccgacaccguggacaccgugcuggagaagaacgugaccgugacccacagcgugaaccugcuggaggacaagcacaacggcaagcugugcaagcugagaggcguggccccccugcaccugggcaagugcaacaucgccggcuggauccugggcaaccccgagugcgagagccugagcaccgccagcagcuggagcuacaucguggagaccagcagcagcgacaacggcaccugcuaccccggcgacuucaucgacuacgaggagcugagagagcagcugagcagcgugagcagcuucgagaaguucgagaucuuccccaagaccagcagcuggcccaaccacgacagcaacaagggcgugaccgccgccugcccccacgccggcaccaagagcuucuacaagaaccugaucuggcuggugaagaagggcaacagcuaccccaagcugagcaagagcuacaucaacgacaagggcaaggaggugcuggugcuguggggcauccaccaccccagcaccagcgccgaccagcagagccuguaccagaacgccgacgccuacguguucgugggcaccagcagauacagcaagaaguucaagcccgagaucgccaucagacccaaggugagagaccaggagggcagaaugaacuacuacuggacccugguggagcccggcgacaagaucaccuucgaggccaccggcaaccugguggugcccagauacgccuucgccauggagagaaacgccggcagcggcaucaucaucagcgacacccccgugcacgacugcaacaccaccugccagacccccaagggcgccaucaacaccagccugcccuuccagaacauccaccccaucaccaucggcaagugccccaaguacgugaagagcaccaagcugagacuggccaccggccugagaaacgugcccagcauccagagcagaggccuguucggcgccaucgccggcuucaucgagggcggcuggaccggcaugguggacggcugguacggcuaccaccaccagaacgagcagggcagcggcuacgccgccgaccugaagagcacccagaacgccaucgacaagaucaccaacaaggugaacagcgugaucgagaagaugaacacccaguucaccgccgugggcaaggaguucaaccaccuggagaagagaaucgagaaccugaacaagaagguggacgacggcuuccuggacaucuggaccuacaacgccgagcugcuggugcugcuggagaacgagagaacccuggacuaccacgacagcaacgugaagaaccuguacgagaaggugagaagccagcugaagaacaacgccaaggagaucggcaacggcugcuucgaguucuaccacaagugcgacaacaccugcauggagagcgugaagaacggcaccuacgacuaccccaaguacagcgaggaggccaagcugaacagagaggagaucgacggcgugaagcuggagagcaccagaaucuaccagauccuggccaucuacagcaccguggccagcagccuggugcugguggugagccugggcgccaucagcuucuggaugugcagcaacggcagccugcagugcagaaucugcaucuga

SEQ ID NO: 166385 - RNA, 1701 nt, Artificial Sequence
  derived and/or modified CDS sequence (opt4) from hemagglutinin__InfluenzaA__ADU85911
augaaggccaucaucguggugcugcuguacaccuucgccaccgccgacgccgacacccugugcaucggcuaccacgccaacaacagcaccgacaccguggacaccgugcuggagaagaacgugaccgugacccacagcgugaaccugcuggagaacaagcacaacggcaagcugugcaagcugggcggcaucgccccccugcaccugggcaagugcgacaucgccggcuggcugcugggcaaccccgagugcgagagccuguucaccgccagcagcuggagcuacaucguggagacccccaacagcgacaacggcaccugcuaccccggcgacuucaucaacuacgaggagcugagagagcaccugagcagcgugagcagcuucgagagauucgagaucuuccccaaggccaacagcuggcccaaccacgacaccaacaagggcgugaccgccgccugccccuacgccggcgccaacagcuucuacagaaaccugaucuggcuggugaagaagggcaacagcuaccccaagcugagcaagagcuacaucaacaacaagaagaaggaggugcuggugaucuggggcauccaccacccccccaccagcaccgaccagcagacccuguaccagaacgccgacgccuacguguucgugggcagcagcaaguacagcaagagauucaagcccgagaucgccgccagacccaaggugagagaccaggccggcagaauggacuacuacuggacccugaucgagcccggcgacaccaucaccuucgaggccaccggcaaccugguggugcccagauacgccuucgccaugaagagaggcagcggcagcggcaucaucgugagcgacgcccccgugcacgacugcaacaccaccugccagacccccaagggcgccaucaacaccagccugcccuuccagaacauccaccccgugaccaucggcgagugccccaaguacgugaagagcaccaagcugagaauggccaccggccugagaaacauccccagcauccagagcagaggccuguucggcgccaucgccggcuuccuggagggcggcuggaccggcaugaucgacggcugguacggcuaccaccaccagaacgagcagggcagcggcuacgccgccgaccagaagagcacccagaacgccaucgacggcaucaccaacaaggugaacagcaucaucgagaagaugaacacccaguucaccgccgugggcaaggaguucagccagcuggagaagagaaucgagagccugaacaacaagguggacgacggcuuccuggacaucuggaccuacaacgccgagcugcuggugcugcuggagaacgagagaacccuggacuaccacgacagcaacgugaagaaccuguacgagaaggugagaagccagcugaagaacaacgccaaggagaucggcaacggcugcuucgaguucuaccacaagugcgacaacaccugcauggagagcgugaagaacggcaccuacgacuaccccaaguacagcgaggaggccaagcugaacagagaggagaucgacggcgugaagcuggagagcgccagaaucuaccagauccuggccaucuacagcaccguggccagcagccuggugcugcuggugagccugggcgccaucagcuucuggaugugcagcaacggcagccugcagugcagaaucugcaucuga

SEQ ID NO: 166386 - RNA, 1701 nt, Artificial Sequence; identical to SEQ ID NO: 163893
  derived and/or modified CDS sequence (opt4) from hemagglutinin__InfluenzaA__ADV17283

SEQ ID NO: 166387 - RNA, 1701 nt, Artificial Sequence; identical to SEQ ID NO: 163893
  derived and/or modified CDS sequence (opt4) from hemagglutinin__InfluenzaA__ADV17293

SEQ ID NO: 166388 - RNA, 1701 nt, Artificial Sequence
  derived and/or modified CDS sequence (opt4) from hemagglutinin__InfluenzaA__ADV17303
augaaggccauccugguggugcugcuguacaccuucgccaccgccaacgccgacacccugugcaucggcuaccacgccaacaacagcaccgacaccguggacaccgugcuggagaagaacgugaccgugacccacagcgugaaccugcuggaggacaagcacaacggcaagcugugcaagcugagaggcguggccccccugcaccugggcaagugcaacaucgccggcuggauccugggcaaccccgagugcgagagccugagcaccgccagcagcuggagcuacaucguggagaccagcagcagcgacaacggcaccugcuaccccggcgacuucaucgacuacgaggagcugagagagcagcugagcagcgugagcagcuucgagagauucgagaucuuccccaagaccagcagcuggcccaaccacgacagcaacaagggcgugaccgccgccugcccccacgccggcgccaagagcuucuacaagaaccugaucuggcuggugaagaagggcaacagcuaccccaagcugagcaagagcuacaucaacgacaagggcaaggaggugcuggugcuguggggcauccaccaccccagcaccagcgccgaccagcagagccuguaccagaacgccgacgccuacguguucgugggcaccagcagauacagcaagaaguucaagcccgagaucgccaucagacccaaggugagagaccaggagggcagaaugaacuacuacuggacccugguggagcccggcgacaagaucaccuucgaggccaccggcaaccugguggugcccagauacgccuucgccauggagagaaacgccggcagcggcaucaucaucagcgacacccccgugcacgacugcaacaccaccugccagacccccaagggcgccaucaacaccagccugcccuuccagaacauccaccccaucaccaucggcaagugccccaaguacgugaagagcaccaagcugagacuggccaagggccugagaaacgugcccagcauccagagcagaggccuguucggcgccaucgccggcuucaucgagggcggcuggaccggcaugguggacggcugguacggcuaccaccaccagaacgagcagggcagcggcuacgccgccgaccugaagagcacccagaacgccaucgacgagaucaccaacaaggugaacagcgugaucgagaagaugaacacccaguucaccgccgugggcaaggaguucaaccaccuggagaagagaaucgagaaccugaacaagaagguggacgacggcuuccuggacaucuggaccuacaacgccgagcugcuggugcugcuggagaacgagagaacccuggacuaccacgacagcaacgugaagaaccuguacgagaaggugagaagccagcugaagaacaacgccaaggagaucggcaacggcugcuucgaguucuaccacaagugcgacaacaccugcauggagagcgugaagaacggcaccuacgacuaccccaaguacagcgaggaggccaagcugaacagagaggagaucgacggcgugaagcuggagagcaccagaaucuaccagauccuggccaucuacagcaccguggccagcagccuggugcugguggugagccugggcgccaucagcuucuggaugugcagcaacggcagccugcagugcagaaucugcaucuga

SEQ ID NO: 166389 - RNA, 1701 nt, Artificial Sequence; identical to SEQ ID NO: 163893
  derived and/or modified CDS sequence (opt4) from hemagglutinin__InfluenzaA__ADV17313

SEQ ID NO: 166390 - RNA, 1701 nt, Artificial Sequence
  derived and/or modified CDS sequence (opt4) from hemagglutinin__InfluenzaA__ADV17323
augaaggccauccugguggugcugcuguacaccuucgccaccaccaacgccgacacccugugcaucggcuaccacgccaacaacagcaccgacaccguggacaccgugcuggagaagaacgugaccgugacccacagcgugaaccugcuggaggacaagcacaacggcaagcugugcaagcugagaggcguggccccccugcaccugggcaagugcaacaucgccggcuggauccugggcaaccccgagugcgagagccugagcaccgccagcagcuggagcuacaucguggagaccagcagcagcgacaacggcaccugcuaccccggcgacuucaucgacuacgaggagcugagagagcagcugagcagcgugagcagcuucgagagauucgagaucuuccccaagaccaacagcuggcccaaccacgacagcaacaagggcgugaccgccgccugcccccacgccggcgccaagagcuucuacaagaaccugaucuggcuggugaagaagggcaacagcuaccccaagcugagcaagagcuacaucaacgacaagggcaaggaggugcuggugcuguggggcauccaccaccccagcaccagcgccgaccagcagggccuguaccagaacgccgacgccuacguguucgugggcaccagcagauacagcaagaaguucaagcccgagaucgccaucagacccaaggugagagaccaggagggcagaaugaacuacuacuggacccugguggagcccggcgacaagaucaccuucgaggccaccggcaaccugguggugcccagauacgccuucgccauggagagaaacgccggcagcggcaucaucaucagcgacacccccgugcacgacugcaacaccaccugccagacccccgagggcgccaucaacaccagccugcccuuccagaacauccaccccaucaccaucggcaagugccccaaguacgugaagagcaccaagcugagacuggccaccggccugagaaacgugcccagcauccagagcagaggccuguucggcgccaucgccggcuucaucgagggcggcuggaccggcaugguggacggcugguacggcuaccaccaccagaacgagcagggcagcggcuacgccgccgaccugaagagcacccagaacgccaucgacaagaucaccaacaaggugaacuacgugaucgagaagaugaacacccaguucaccgccgugggcaaggaguucaaccaccuggagaagagaaucgagaaccugaacaagaagguggacgacggcuuccuggacaucuggaccuacaacgccgagcugcuggugcugcuggagaacgagagaacccuggacuaccacgacagcaacgugaagaaccuguacgagaaggugagaagccagcugaagaacaacgccaaggagaucggcaacggcugcuucgaguucuaccacaagugcgacaacaccugcauggagagcgugaagaacggcaccuacgacuaccccaaguacagcgaggaggccaagcugaacagagaggagaucgacggcgugaagcuggagagcaccagaaucuaccagauccuggccaucuacagcaccguggccagcagccuggugcugguggugagccugggcgccaucagcuucuggaugugcagcaacggcagccugcagugcagaaucugcaucuga

SEQ ID NO: 166391 - RNA, 1701 nt, Artificial Sequence
  derived and/or modified CDS sequence (opt4) from hemagglutinin__InfluenzaA__ADV17333
augaaggccauccugguggugcugcuguacaccuucgccaccgccaacgccgacacccugugcaucggcuaccacgccaacaacagcaccgacaccguggacaccgugcuggagaagaacgugaccgugacccacagcgugaaccugcuggaggacaagcacaacggcaagcugugcaagcugagaggcguggccccccugcaccugggcaagugcaacaucgccggcuggauccugggcaaccccgagugcgagagccugagcaccgccagcagcuggagcuacaucguggagaccagcagcagcgacaacggcaccugcuaccccggcgacuucaucgacuacgaggagcugagagagcagcugagcagcgugagcagcuucgagagauucgagaucuuccccaagaccagcagcuggcccaaccacgacagcaacaagggcgugaccgccgccugcccccacgccggcgccaagagcuucuacaagaaccugaucuggcuggugaagaagggcaacagcuaccccaagcugagcaagagcuacaucaacgacaagggcaaggaggugcuggugcuguggggcauccaccaccccagcaccagcgccgaccagcagaaccuguaccagaacgccgacgccuacguguucgugggcaccagcagauacagcaagaaguucaagcccgagaucgccaucagacccaaggugagagaccaggagggcagaaugaacuacuacuggacccugguggagcccggcgacaagaucaccuucgaggccaccggcaaccugguggugcugagauacgccuucgccauggagagaaacgccggcagcggcaucaucaucagcgacacccccgugcacgacugcaacaccaccugccagacccccaagggcgccaucaacaccagccugcccuuccagaacauccaccccaucaccaucggcaagugccccaaguacgugaagagcaccaagcugagacuggccaccggccugagaaacgugcccagcauccagagcagaggccuguucggcgccaucgccggcuucaucgagggcggcuggaccggcaugguggacggcugguacggcuaccaccaccagaacgagcagggcagcggcuacgccgccgaccugaagagcacccagaacgccaucgacaagaucaccaacaaggugaacagcgugaucgagaagaugaacacccaguucaccgccgugggcaaggaguucaaccaccuggagaagagaaucgagaaccugaacaagaagguggacgacggcuuccuggacaucuggaccuacaacgccgagcugcuggugcugcuggagaacgagagaacccuggacuacuacgacagcaacgugaagaaccuguacgagaaggugagaagccagcugaagaacaacgccaaggagaucggcaacggcugcuucgaguucuaccacaagugcgacaacaccugcauggagagcgugaagaacggcaccuacgacuaccccaaguacagcgaggaggccaagcugaacagagaggagaucgacggcgugaagcuggagagcaccagaaucuaccagauccuggugaucuacagcaccguggccagcagccuggugcugguggugagccugggcgccaucagcuucuggaugugcagcaacggcagccugcagugcagaaucugcaucuga

SEQ ID NO: 166392 - RNA, 1701 nt, Artificial Sequence; identical to SEQ ID NO: 162729
  derived and/or modified CDS sequence (opt4) from hemagglutinin__InfluenzaA__ADV19019

SEQ ID NO: 166393 - RNA, 1701 nt, Artificial Sequence; identical to SEQ ID NO: 163214
  derived and/or modified CDS sequence (opt4) from hemagglutinin__InfluenzaA__ADV41677

SEQ ID NO: 166394 - RNA, 1701 nt, Artificial Sequence
  derived and/or modified CDS sequence (opt4) from hemagglutinin__InfluenzaA__ADV58939
augaaggccauccugguggugcugcuguacaccuucgccaccgccaacgccgacacccugugcaucggcuaccacgccaacaacagcaccgacaccguggacaccgugcuggagaagaacgugaccgugacccacagcgugaaccugcuggaggacaagcacaacggcaagcugugcaagcugagaggcguggccccccugcaccugggcaagugcaacaucgccggcuggauccugggcaaccccgagugcgagagccugagcaccgccagcagcuggagcuacaucguggagaccagcagcagcgacaacggcaccugcuaccccggcgacuucaucgacuacgaggagcugagagagcagcugagcagcgugagcagcuucgagagauucgagaucuuccccaagaccagcagcuggcccaaccacgacagcaacaagggcgugaccgccgccugcccccacgccggcgccaagggcuucuacaagaaccugaucuggcuggugaagaagggcaacagcuaccccaagcugagcaagagcuacaucaacgacaagggcaaggaggugcuggugcuguggggcauccaccaccccagcaccaccgccgaccagcagagccuguaccagaacgccgacaccuacguguucgugggcaccagcagauacagcaagaaguucaagcccgagaucgccaucagacccaaggugagagaccaggagggcagaaugaacuacuacuggacccugguggagcccggcgacaagaucaccuucgaggccaccggcaaccugguggugcccagauacgccuucgccauggagagaaacgccggcagcggcaucaucaucagcgacacccccgugcacgacugcaacaccaccugccagacccccaagggcgccaucaacaccagccugcccuuccagaacauccaccccaucaccaucggcaagugccccaaguacgugaagagcaccaagcugagacuggccaccggccugagaaacgugcccagcauccagagcagaggccuguucggcgccaucgccggcuucaucgagggcggcuggaccggcaugguggacggcugguacggcuaccaccaccagaacgagcagggcagcggcuacgccgccgaccugaagagcacccagaacgccaucgacaagaucaccaacaaggugaacagcgugaucgagaagaugaacacccaguucaccgccgugggcaaggaguucaaccaccuggagaagagaaucgagaaccugaacaagaagguggacgacggcuuccuggacaucuggaccuacaacgccgagcugcuggugcugcuggagaacgagagaacccuggacuaccacgacagcaacgugaagaaccuguacgagaaggugagaaaccagcugaagaacaacgccaaggagaucggcaacggcugcuucgaguucuaccacaagugcgacaacaccugcauggagagcgugaagaacgagaccuacgacuaccccaaguacagcgaggaggccaagcugaacagagaggagaucgacggcgugaagcuggagagcaccagaaucuaccagauccuggccaucuacagcaccguggccagcagccuggugcugguggugagccugggcgccaucagcuucuggaugugcagcaacggcagccugcagugcagaaucugcaucuga

SEQ ID NO: 166395 - RNA, 1698 nt, Artificial Sequence
  derived and/or modified CDS sequence (opt4) from hemagglutinin__InfluenzaA__ADV69074
augaaggugaagcugcuggugcugcugugcaccuucaccgccaccuacgccgacaccaucugcaucggcuaccacgccaacaacagcaccgacaccguggacaccgugcuggagaagaacgugaccgugacccacagcgugaaccugcuggaggacagccacaacggcaagcugugccugcugaagggcaucgccccccugcagcugggcaacugcaacguggccggcuggauccugggcaaccccgagugcgagcugcugaucagcaaggagagcuggagcuacaucguggagacccccgaccccgagaacggcaccugcuaccccggcuacuucaccgacuacgaggagcugagagagcagcugagcagcgugagcagcuucaagagauucgagaucuuccccaaggagagcagcuggcccaaccacaccgugaccggcgugagcgccagcugcagccacaacggcaagagcagcuucuacagaaaccugcuguggcugaccgugaagaacggccuguaccccaaccugagcaagagcuacaccaacgacaaggagaaggaggugcuggugcuguggggcgugcaccacccccccagcaucggcgaccagagaacccuguaccacaccgagaacgccuacgugagcguggugagcagccacuacagcagaagauucacccccgagaucgugaagagacccaaggugagagaccaggagggcagaaucaacuacuacuggacccugcuggagcccggcgacaccaucaucugcgaggccaacggcaaccugaucgcccccagauacgccuucgcccugagcagaggccugggcagcggcaucaucaccagcaacgcccccaugggcgagugcaacgccaagugccagaccccccagggcgccaucaacagcagccugcccuuccagaacgugcaccccgugaccaucggcgagugccccaaguacgugaagagcgccaagcugagaauggugaccggccugagaaacacccccagcauccagagcagaggccuguucggcgccaucgccggcuucaucgagggcggcuggaccggcaugguggacggcugguacggcuaccaccaccagaacgagcagggcagcggcuacgccgccgaccagaagagcacccagaacgccaucaacggcaucaccaacaaggugaacagcgugaucgagaagaugaacacccaguucaccgccgugggcaaggaguucaacaagcuggagagaagaauggagaaccugaacaagaagguggacgacggcuuccuggacaucuggaccuacaacgccgagcugcuggugcugcuggagaacgagagaacccuggacuuccacgacagcaacgugaagaaccuguacgagaaggugaagagccagcugaagaacaacgccaaggagaucggcaacggcugcuucgaguucuaccacaagugcaacgacgagugcauggagagcgugaagaacggcaccuacgacuaccccaaguacagcgaggagagcaagcugaacagagagaagaucgacggcgugaagcuggagagcauggagguguaccagauccuggccaucuacagcaccguggccagcagccugguguuccugguggcccugggcgccaucugcuucuggaugugcagcaacggcagccugcagugcaagaucugcaucuga

SEQ ID NO: 166396 - RNA, 1698 nt, Artificial Sequence
  derived and/or modified CDS sequence (opt4) from hemagglutinin__InfluenzaA__ADV69075
augaaggugaagcugcuggugcugcugugcaccuucaccgccaccuacgccgacaccaucugcaucggcuaccacgccaacaacagcaccgacaccguggacaccgugcuggagaagaacgugaccgugacccacagcgugaaccugcuggaggacagccacaacggcaagcugugccugcugaagggcaucgccccccugcagcugggcaacugcaacguggccggcuggauccugggcaaccccgagugcgagcugcugaucagcaaggagagcuggagcuacaucguggagacccccgaccccgagaacggcaccugcuaccccggcuacgugaccgacuacgaggagcugagagagcagcugagcagcgugagcagcuucaagagauucgagaucuuccccaaggagagcagcuggcccaaccacaccgugaccggcgugagcgccagcugcagccacaacggcaagagcagcuucuacagaaaccugcuguggcugaccgugaagaacggccuguaccccaaccugagcaagagcuacaccaacgacaaggagaaggaggugcuggugcuguggggcgugcaccacccccccagcaucggcgaccagagaacccuguaccacaccgagaacgccuacgugagcguggugagcagccacuacagcagaagauucacccccgagaucgugaagagacccaaggugagagaccaggagggcagaaucaacuacuacuggacccugcuggagcccggcgacaccaucaucugcgaggccaacggcaaccugaucgcccccagauacgccuucgcccugagcagaggcuucggcagcggcaucaucaccagcaacgcccccaugggcgagugcaacgccaagugccagaccccccagggcgccaucaacagcagccugcccuuccagaacgugcaccccgugaccaucggcgagugccccaaguacgugaagagcgccaagcugagaauggugaccggccugagaaacacccccagcauccagagcagaggccuguucggcgccaucgccggcuucaucgagggcggcuggaccggcaugguggacggcugguacggcuaccaccaccccaacgagcagggcagcggcuacgccgccgaccagaagagcacccagaacgccaucaacggcaucaccaacaaggugaacagcgugaucgagaagaugaacacccaguucaccgccgugggcaaggaguucaacaagcuggagagaagaauggagaaccugaacaagaagguggacgacggcuuccuggacaucuggaccuacaacgccgagcugcuggugcugcuggagaacgagagaacccuggacuuccacgacagcaacgugaagaaccuguacgagaaggugaagagccagcugaagaacaaggugaaggagaucggcaacggcugcuucgaguucuaccacaagugcaacgacgagugcauggagagcgugaagaacggcaccuacgacuaccccaaguacagcgaggagagcaagcugaacagagagaagaucgacggcgugaagcuggagagcauggagguguaccagauccuggccaucuacagcaccguggccagcagccugguguuccugguggcccugggcgccaucugcuucuggaugugcagcaacggcagccugcagugcaagaucugcaucuga

SEQ ID NO: 166397 - RNA, 1698 nt, Artificial Sequence
  derived and/or modified CDS sequence (opt4) from hemagglutinin__InfluenzaA__ADV69077
augaaggugaagcugcuggugcugcugugcaccuucaccgccaccuacgccgacaccaucugcaucggcuaccacgccaacaacagcaccgacaccguggacaccgugcuggagaagaacgugaccgugacccacagcgugaaccugcuggaggacagccacaacggcaagcugugccugcugaagggcaucgccccccugcagcugggcaacugcaacguggccggcuggauccugggcaaccccgagugcgagcugcugaucagcaaggagagcuggagcuacaucguggagacccccgaccccgagaacggcaccugcuaccccggcuacuucaccgacuacgaggagcugagagagcagcugagcagcgugagcagcuucaagagauucgagaucuuccccaaggagagcagcuggcccaaccacaccgugaccggcgugagcgccagcugcagccacaacggcaagagcagcuucuacagaaaccugcuguggcugaccgugaagaacggccuguaccccaaccugagcaagagcuacaccaacgacaaggagaaggaggugcuggugcuguggggcgugcaccacccccccagcaucggcgaccagagaacccuguaccacaccgagaacgccuacgugagcguggugagcagccacuacagcagaagauucacccccgagaucgugaagagacccaaggugagagaccaggagggcagaaucaacuacuacuggacccugcuggagcccggcgacaccaucaucuucgaggccaacggcaaccugaucgcccccagauacgccuucgcccugagcagaggcuucggcagcggcaucaucaccagcaacgcccccaugggcgagugcaacgccaagugccagaccccccagggcgccaucaacagcagccugcccuuccagaacgugcaccccgugaccaucggcgagugccccaaguacgugaagagcgccaagcugagaauggugaccggccugagaaacacccccagcauccagagcagaggccuguucggcgccaucgccggcuucaucgagggcggcuggaccggcaugguggacggcugguacggcuaccaccaccagaacgagcagggcagcggcuacgccgccgaccagaagagcacccagaacgccaucaacggcaucaccaacaaggugaacagcgugaucgagaagaugaacacccaguucaccgccgugggcaaggaguucaacaagcuggagagaagaauggagaaccugaacaagaagguggacgacggcuuccuggacaucuggaccuacaacgccgagcugcuggugcugcuggagaacgagagaacccuggacuuccacgacagcaacgugaagaaccuguacgagaaggugaagagccagcugaagaacaacgccaaggagaucggcaacggcugcuucgaguucuaccacaagugcaacgacgagugcauggagagcgugaagaacggcaccuacgacuaccccaaguacagcgaggagagcaagcugaacagagagaagaucgacggcgugaagcuggagagcauggagguguaccagauccuggccaucuacagcaccguggccagcagccugguguuccugguggcccugggcgccaucugcuucuggaugugcagcaacggcagccugcagugcaagaucugcaucuga

SEQ ID NO: 166398 - RNA, 1698 nt, Artificial Sequence
  derived and/or modified CDS sequence (opt4) from hemagglutinin__InfluenzaA__ADV69078
augaaggugaagcugcugauccugcugugcaccuucaccgccaccuacgccgacaccaucugcaucggcuaccacgccaacaacagcaccgacaccguggacaccgugcuggagaagaacgugaccgugacccacagcgugaaccugcuggaggacagccacaacggcaagcugugccugcugaagggcaucgccccccugcagcugggcaacugcagcguggccggcuggauccugggcaaccccgagugcgagagccugaucagcaagaagagcuggagcuacaucguggagacccccaaccccgagaacggcgccugcuaccccggcgaguucgccgacuacgaggagcugagagagcagcugagcagcgugagcagcuucgagagauucgagaucuuccccaaggagagcagcuggcccaaccacaccgccgccggcgugagcgccagcugcagccacaacggcgagaagagcuucuacagaaaccugaucuggcugaccaagaagaacggccuguaccccaaccugagcaagagcuacgagaacgacaaggagaaggaggugcugauccuguggggcgugcaccacccccccaacaucgagaaccagagaacccuguacagaaccgagaacgccuacgugagcguggugagcagccacuacagcggcagauucacccccgagaucaccaagagacccaaggugagaaaccaggagggcagaaucaacuacuacuggacccugcuggagcccggcgacaccaucaucuucgaggccaacggcaaccugaucgcccccugguacgccuucacccugagcagaggccugggcagcggcaucaucaccagcaacgcccccauggacgagugcgacgccaagugccagaccccccagggcgccaucaacagcagccugcccuuccagaacgugcaccccgugaccaucggcgagugccccaaguacgugagaagcagcaagcugagaauggugaccggccugagaaacauccccagcauccagagcagaggccuguucggcgccaucgccggcuucaucgagggcggcuggaccggcaugguggacggcugguacggcuaccaccaccagaacgagcagggcagcggcuacgccgccgaccaggagagcacccagaacgccaucaacggcaucaccaacaaggugaacagcgugaucgagaagaugaacacccaguucaccgccgugggcaaggaguucaacaagcuggagagaagaauggagaaccugaacaagaagguggacgacggcuuccuggacaucuggaccuacaacgccgagcugcuggugcugcuggagaacgagagaacccuggacuuccacgacagcaacgugaagagccuguacgagaaggugaagagccagcugaagaacaacgccaaggagaucggcaacggcugcuucgaguucuaccacaagugcaacaacgagugcauggagagcgugaagaacggcaccuacgacuaccccaaguacagcgaggagagcaagcugaacagagagaagaucgacggcgugaagcuggacagcaugggcguguacagaauccuggccaucuacagcaccguggccagcagccuggugcugcuggugagccugggcgccaucagcuucuggaugugcagcaacggcagccugcagugcagaaucugcaucuga

SEQ ID NO: 166399 - RNA, 1698 nt, Artificial Sequence
  derived and/or modified CDS sequence (opt4) from hemagglutinin__InfluenzaA__ADV69079
augaaggugaagcugcugauccugcugugcaccuucaccgccaccuacgccgacaccaucugcaucggcuaccacgccaacaacagcaccgacaccguggacaccgugcuggagaagaacgugaccgugacccacagcgugaaccugcuggaggacagccacaacggcaagcugugccugcugaagggcaucgccccccugcagcugggcaacugcagcguggccggcuggauccugggcaaccccgagugcgagcugcugaucagcaagaagagcuggagcuacaucgugaagacccccaaccccgagaacggcagcugcuaccccggcuacuucgccgacuacgaggagcugagagagcagcugagcagcgugagcagcuucgagagauucgagauguuccccaaggagagcagcuggcccaaccacaacgugaacggcgugagcgccagcugcagccacaacggcaagagaagcuucuacagaaaccugcuguggcugaccggcaagaacggccuguaccccaaccugaccaagagcuacgagaacaacaacgagaaggaggugcugauccuguggggcgugcaccaccccagcaacaucggcgaccagagaacccuguaccacaccgagaacgccuacgugagcgugaugagcagccacuacagcagaagauucacccccgagaucaacaagagacccaaggugagagaccaggagggcagaaucaacuacuacuggacccugcuggagcccggcgacaccaucaucuucgaggccaacggcaaccugaucgcccccugguacgccuucgcccugagcagaggcuucggcagcggcaucaucaccagcagcgcccccauggacgagugcgacgccaagugccagacccccagaggcgccaucaacagcagccugcccuuccagaacgugcaccccgugaccaucggcgagugccccaaguacgugagaagcgccaagcugagaauggugaccggccugagaaacauccccagcauccagagcagaggccuguucggcgccaucgccggcuucaucgagggcggcuggaccggcaugguggacggcugguacggcuaccaccaccagaacgagcagggcagcggcuacgccgccgaccaggagagcacccagaacgccaucaacggcaucaccaacaaggugaacagcgugaucgagaagaugaacacccaguucaccgccgugggcaaggaguucaacaagcuggagagaagaauggagaaccugaacaagaagguggacgacggcuuccuggacaucuggaccuacaacgccgagcugcuggugcugcuggagaacgagagaacccuggacuuccacgacagcaacgugaagagccuguacgagaaggugaagagccagcugaagaacaacgccaaggagaucggcaacggcugcuucgaguucuaccacaagugcaacaacgagugcauggagagcgugaagaacggcaccuacgacuaccccaaguacagcgaggagagcaagcugaacagagagaagaucgacggcgugaagcuggacagcaugggcguguaccagauccuggccaucuacagcaccguggccagcagccuggugcugcuggugagccugggcgccaucagcuucuggaugugcagcaacggcagccugcagugcagaaucugcaucuga

SEQ ID NO: 166400 - RNA, 1698 nt, Artificial Sequence
  derived and/or modified CDS sequence (opt4) from hemagglutinin__InfluenzaA__ADV69080
augaaggugaagcugcugauccugcugugcaccuucaccgccaccuacgccgacaccaucugcaucggcuaccacgccaacaacagcaccgacaccguggacaccgugcuggagaagaacgugaccgugacccacagcgugaaccugcuggaggacagccacaacggcaagcugugccugcugaagggcaucgccccccugcagcugggcaacugcagcguggccggcuggauccugggcaaccccgagugcgagagccugaucagcaagaagagcuggagcuacaucguggagacccccaaccccgagaacggcgccugcuaccccggcgaguucgccgacuacgaggagcugagagagcagcugagcagcgugagcagcuucgagagauucgagaucuuccccaaggagagcagcuggcccaaccacaccgccgccggcgugagcgccagcugcagccacaacggcgagagaagcuucuacagaaaccugaucuggcugaccaugaagaacggccuguaccccaaccugagaaagagcuacgagaacgacaaggagaaggaggugcugauccuguggggcgugcaccacccccccaacaucgagaaccagagaacccuguaccacaccgagaacgccuacgugagcguggugagcagccacuacagcggcagauucacccccgagaucaccaagagacccaaggugagagaccaggagggcagaaucaacuacuacuggacccugcuggagcccggcgacaccaucaucuucgaggccaacggcaaccugaucgcccccugguacgccuucacccugagcagaggccugggcagcggcaucaucaccagcaacgcccccauggacgccugcgacgccaagugccagaccccccagggcgccaucaacagcagccugcccuuccagaacgugcaccccgugaccaucggcgagugccccaaguacgugagaagcgccaagcugagaauggugaccggccugagaaacauccccagcauccagagcagaggccuguucggcgccaucgccggcuucaucgagggcggcuggaccggcaugguggacggcugguacggcuaccaccaccagaacgagcagggcagcggcuacgccgccgaccaggagagcacccagaacgccaucaacggcaucaccaacaaggugaacagcgugaucgagaagaugaacacccaguucaccgccgugggcaaggaguucaacaagcuggagagaagaaucgagaaccugaacaagaagguggacgacggcuucaucgacaucuggaccuacaacgccgagcugcuggugcugcuggagaacgagagaacccuggacuuccacgacagcaacgugaagagccuguacgagaaggugaagagccagcugaagaacaacgccaaggagaucggcaacggcugcuucgaguucuaccacaagugcaacaacgagugcauggagagcgugaagaacggcaccuacgacuaccccaaguacagcgaggagagcaagcugaacagagagaagaucgacggcgugaagcuggacagcaugggcguguacagaauccuggccaucuacagcaccguggccagcagccuggugcugcuggugagccugggcgccaucagcuucuggaugugcagcaacggcagccugcagugcagaaucugcaucuga

SEQ ID NO: 166401 - RNA, 1698 nt, Artificial Sequence
  derived and/or modified CDS sequence (opt4) from hemagglutinin__InfluenzaA__ADV69081
augaaggugaagcugcuggugcugcugugcaccuucaccgccaccuacgccgacaccaucugcaucggcuaccacgccaacaacagcaccgacaccguggacaccgugcuggagaagaacgugaccgugacccacagcgugaaccugcuggaggacagccacaacggcaagcugugccugcugaagggcaucgccccccugcagcugggcaacugcaacguggccggcuggauccugggcaaccccgagugcgagcugcugaucagcaaggagagcuggagcuacaucguggagacccccaaccccgagaacggcaccugcuaccccggcuacuucaccgacuacgaggagcugagagagcagcugagcagcgugagcagcuucaagagauucgagaucuuccccaaggagagcagcuggcccaaccacaccgugaccggcgugagcgccagcugcagccacaacggcgagagcagcuucuacagaaaccugcuguggcugaccgugaagaacggccuguaccccaagcugagcaagagcuacaccaacgacaaggagaaggaggugcuggugcuguggggcgugcaccacccccccaacaucagagaccagagaacccuguaccacaccgagaacgccuacgugagcguggugagcagccacuacagcagaagauucacccccgagaucgugaagagacccaaggugagagaccaggagggcagaaucaacuacuacuggacccugcuggagcccggcgacaccaucaucuucgaggccaacggcaaccugaucgcccccagauacgccuucgcccugagcagaggcuucggcagcggcaucaucaccagcaacgcccccaugggcgagugcaacgccaagugccagaccccccagggcgccaucaucagcagccugcccuuccagaacgugcaccccgugaccaucggcgagugccccaaguacgugaagagcgccaagcugagaauggugaccggccugagaaacacccccagcauccagagcagaggccuguucggcgccaucgccggcuucaucgagggcggcuggaccggcaugguggacggcugguacggcuaccaccaccagaacgagcagggcagcggcuacgccgccgaccagaagagcacccagaacgccaucaacggcaucaccaacaaggugaacagcgugaucgagaagaugaacacccaguucaccgccgugggcaaggaguucaacaagcuggagagaagaauggagaaccugaacaagaagguggacgacggcuuccuggacaucuggaccuacaacgccgagcugcuggugcugcuggagaacgagagaacccuggacuuccacgacagcaacgugaagaaccuguacgagaaggugaagagccagcugaagaacaacgccaaggagaucggcaacggcugcuucgaguucuaccacaagugcaacgacgagugcauggagagcgugaagaacggcaccuacgacuaccccaaguacagcgaggagagcaagcugaacagagagaagaucgacggcgugaagcuggagagcauggagguguaccagauccuggccaucuacagcaccguggccagcagccugguguuccugguggcccugggcgccaucugcuucuggaugugcagcaacggcagccugcagugcaagaucugcaucuga

SEQ ID NO: 166402 - RNA, 1698 nt, Artificial Sequence
  derived and/or modified CDS sequence (opt4) from hemagglutinin__InfluenzaA__ADV69083
augaaggugaagcugauggugcugcugugcaccuucaccgccaccuacgccgacaccaucugcgugggcuaccacgccaacaacagcaccgacaccguggacaccgugcuggagaagaacgugaccgugacccacagcgugaaccugcuggaggacagccacaacggcaagcugugccugcugaagggcaucgccccccugcagcugggcagcugcagcguggccggcuggauccugggcaaccccgagugcgagcugcugaucagcaaggagagcuggagcuacaucguggagacccccaaccccgagaacggcaccugcuaccccggcuacuucaccgacuacgaggagcugagagagcagcugagcagcgugagcagcuucaagagauucgagaucuuccccaaggagagcagcuggcccaaccacaacgugaccggcgugagcagcagcugcagccacaacggcaagagcagcuucuacagaaaccugcuguggcugaccgugaagaacggccuguaccccaaccugagcaagagcuacaccaacaagaaggagaaggaggugcuggugcuguggggcgugcaccaccccagcaacaucggcgaccagagagcccuguaccacaccgagaacgccuacgugagcguggugagcagccacuacagcagaagauucacccccgagaucgccaagagacccaaggugagaaaccaggagggcagaaucaacuacuacuggacccugcuggagcccggcgacaccaucauccuggaggccaacggcaaccugaucgcccccagauacgccuucgagcugagcaagggccugggcagcggcaucaucaccagcaacgcccccaugggcgagugcaacgccaagugccagaccccccagggcgccaucaacagcagccugcccuuccagaacgugcaccccgugaccaucggcgagugccccaaguacgugaagagcgccaagcugagaauggugaccggccugagaaacacccccagcauccagagcagaggccuguucggcgccaucgccggcuucaucgagggcggcuggaccggcaugguggacggcugguacggcuaccaccaccagaacgagcagggcagcggcuacgccgccgaccagcagagcacccagaacgccaucaacggcaucaccaacaaggugaacagcgugaucgagaagaugaacacccaguucaccgccgugggcaaggaguucaacaagcuggagagaagaauggagaaccugaacaagaagguggacgacggcuuccuggacaucuggaccuacaacgccgagcugcuggugcugcuggagaacgagagaacccuggacuuccacgacagcaacgugaagaaccuguacgagaaggugaagagccagcugaagaacaacgccaaggagaucggcaacggcugcuucgaguucuaccacaagugcaacgacgagugcauggagagcgugaagaacggcaccuacgacuaccccaaguacagcgaggagagcaagcugaacagagagaagaucgacggcgugaagcuggagagcaugggcguguacaacauccuggccaucuacagcaccguggccagcagccuggugcugcuggugagccugggcgccaucagcuucuggaugugcagcaacggcagccugcagugcagaaucugcaucuga

SEQ ID NO: 166403 - RNA, 1698 nt, Artificial Sequence
  derived and/or modified CDS sequence (opt4) from hemagglutinin__InfluenzaA__ADV69084
augaaggugaagcugauggugcugcugugcaccuucaccgccaccuacgccgacaccaucugcgugggcuaccacgccaacaacagcaccgacaccguggacaccgugcuggagaagaacgugaccgugacccacagcgugaaccugcuggaggacagccacaacggcaagcugugccugcugaagggcaucgccccccugcagcugggcagcugcagcguggccggcuggauccugggcaaccccgagugcgagcugcugaucagcaaggagagcuggagcuacaucguggagacccccaaccccgagaacggcaccugcuaccccggcuacuucaccgacuacgaggagcugagagagcagcugagcagcgugagcagcuucaagagauucgagaucuuccccaaggagagcagcuggcccaaccacaacgugaccggcgugagcagcagcugcagccacaacggcaagagcagcuucuacagaaaccugcuguggcugaccgugaagaacggccuguaccccaaccugagcaagagcuacaccaacaagaaggagaaggaggugcugauccuguggggcgugcaccaccccagcaacaucagagaccagagagcccuguacuacaccgagaacgccuacgugagcguggugagcagccacuacagcagaagauucacccccgagaucgccaagagacccaaggugagaaaccaggagggcagaaucaacuacuacuggacccugcuggagcccggcgacaccaucaucuucgaggccaacggcaaccugaucgcccccagauacgccuucgagcugagcaagggcuucggcagcggcaucaucaccagcgacgcccccaugggcgagugcaacgccaagugccagaccccccagggcgccaucaacagcagccugcccuuccagaacgugcaccccgugaccaucggcgagugccccaaguacgugagaagcgccaagcugagaauggugaccggccugagaaacacccccagcauccagagcagaggccuguucggcgccaucgccggcuucaucgagggcggcuggaccggcaugguggacggcugguacggcuaccaccaccagaacgagcagggcagcggcuacgccgccgaccagcagagcacccagaacgccaucaacggcaucaccaacaaggugaacagcgugaucgagaagaugaacacccaguucaccgccgugggcaaggaguucaacaagcuggagagaagaauggagaaccugaacaagaagaucgacgacggcuuccuggacaucuggaccuacaacgccgagcugcuggugcugcuggagaacgagagaacccuggacuuccacgacagcaacgugaagaaccuguacgagaaggugaagagccagcugaagaacaacgccaaggagaucggcaacggcugcuucgaguucuaccacaagugcaacgacgagugcauggagagcgugaagaacggcaccuacgacuaccccaaguacagcgaggagagcaagcugaacagagagaagaucgacggcgugaagcuggagagcaugggcguguacaacauccuggccaucuacagcaccguggccagcagccuggugcugcuggugagccugggcgccaucagcuucuggaugugcagcaacggcagccugcagugcagaaucugcaucuga

SEQ ID NO: 166404 - RNA, 1698 nt, Artificial Sequence
  derived and/or modified CDS sequence (opt4) from hemagglutinin__InfluenzaA__ADV69085
augaaggugaagcugauggugcugcugugcaccuucaccgccaccuacgccgacaccaucugcgugggcuaccacgccaacaacagcaccgacaccguggacaccgugcuggagaagaacgugaccgugacccacagcgugaaccugcuggaggacagccacaacggcaagcugugccugcugaagggcaucgccccccugcagcugggcagcugcagcguggccggcuggauccugggcaaccccgagugcgagcugcugaucagcaaggagagcuggagcuacaucguggagacccccaaccccgagaacggcaccugcuaccccggcuacuucaccgacuacgaggagcugagagagcagcugagcagcgugagcagcuucaagagauucgagaucuuccccaaggagagcagcuggcccaaccacaccgugaccggcgugagcagcagcugcagccacaacggcaagagcagcuucuacagaaaccugcuguggcugaccaugaagaacggccuguaccccaaccugagcaagagcuacaccaacaagaaggagaaggaggugcuggugcuguggggcgugcaccaccccagcaacaucggcgaccagagagcccuguaccacaccgagaacgccuacgugagcguggugagcagccacuacagcagaagauucacccccgagaucgccaagagacccaaggugagaaaccaggagggcagaaucaacuacuacuggacccugcuggagcccggcgacaccaucaucuucgaggccaacggcaaccugaucgcccccagauacgccuucgagcugagcaagggcuucggcagcggcaucaucaccagcaacgcccccaugggcgagugcaacgccaagugccagaccccccagggcgccaucaacagcagccugcccuuccagaacgugcaccccgugaccaucggcgagugccccaaguacgugagaagcagcaagcugagaauggugaccggccugagaaacacccccagcauccagagcagaggccuguucggcgccaucgccggcuucaucgagggcggcuggaccggcaugguggacggcugguacggcuaccaccaccagaacgagcagggcagcggcuacgccgccgaccagcagagcacccagaacgccaucaacggcaucaccaacaaggugaacagcgugaucgagaagaugaacacccaguucaccgccgugggcaaggaguucaacaagcuggagagaagaauggagaaccugaacaagaagaucgacgacggcuuccuggacaucuggaccuacaacgccgagcugcuggugcugcuggagaacgagagaacccuggacuuccacgacagcaacgugaagaaccuguacgagaaggugaagagccagcugaagaacaacgccaaggagaucggcaacggcugcuucgaguucuaccacaagugcaacgacgagugcauggagagcgugaagaacggcaccuacgacuaccccaaguacagcgaggagagcaagcugaacagagagaagaucgacggcgugaagcuggagagcaugggcguguacaacauccuggccaucuacagcaccguggccagcagccuggugcugcuggugagccugggcgccaucagcuucuggaugugcagcaacggcagccugcagugcagaaucugcaucuga

SEQ ID NO: 166405 - RNA, 1698 nt, Artificial Sequence
  derived and/or modified CDS sequence (opt4) from hemagglutinin__InfluenzaA__ADV69086
augaaggugaagcugcuggugcugcugugcaccuucaccgccaccuacgccgacaccaucugcaucggcuaccacgccaacaacagcaccgacaccguggacaccgugcuggagaagaacgugaccgugacccacagcgugaaccugcuggaggacagccacaacggcaagcugugccugcugaagggcaucgccccccugcagcugggcaacugcaacguggccggcuggauccugggcaaccccgagugcgagcugcugaucagcaaggagagcuggagcuacaucguggagacccccaaccccgagaacggcaccugcuaccccggcuacuucaccgacuacgaggagcugagagagcagcugagcagcgugagcagcuucaagagauucgagaucuuccccaaggagagcagcuggcccaagcacaccgugaccggcgugagcgccagcugcagccacaacggcaagagcagcuucuacagaaaccugcuguggcugaccggcaagaacggccuguaccccaaccugagcaagagcuacaccaacgacaaggagaaggaggugcuggugcuguggggcgugcaccaccccagcaacaucggcgaccagagagcccuguaccacaaggagaacgccuacgugagcguggugagcagccacuacagcagaagauucacccccgagaucgugaagagacccaaggugagagaccaggagggcagaaucaacuacuacuggacccugcuggagcccggcgacaccaucaucuucgaggccaacggcaaccugaucgcccccagauacgccuucgcccugagcagaggcuucggcagcggcaucaucaccagcaacgcccccauggacgagugcaacaccaagugccagaccccccagggcgccaucaacagcagccugcccuuccagaacgugcaccccgugaccaucggcgagugccccaaguacgugaagagcgccaagcugagaauggugaccggccugagaaacacccccagcauccagagcagaggccuguucggcgccaucgccggcuucaucgagggcggcuggaccggcaugguggacggcugguacggcuaccaccaccagaacgagcagggcagcggcuacgccgccgaccagaagagcacccagaacgccaucaacggcaucaccaacaaggugaacagcgugaucgagaagaugaacacccaguucaccgccgugggcaaggaguucaacaagcuggagagaagaauggagaaccugaacaagaagguggacgacggcuuccuggacaucuggaccuacaacgccgagcugcuggugcugcuggagaacgagagaacccuggacuuccacgacagcaacgugaagaaccuguacgagaaggugaagagccagcugaagaacaacgccaaggagaucggcaacggcugcuucgaguucuaccacaagugcaacgacgagugcauggagagcgugaagaacggcaccuacgacuaccccaaguacagcgaggagagcaagcugaacagagagaagaucgacggcgugaagcuggagagcauggagguguaccagauccuggccaucuacagcaccguggccagcagccugguguuccuggugagccugggcgccaucugcuucuggaugugcagcaacggcagccugcagugcagaaucugcaucuga

SEQ ID NO: 166406 - RNA, 1698 nt, Artificial Sequence
  derived and/or modified CDS sequence (opt4) from hemagglutinin__InfluenzaA__ADV69087
augaaggugaagcugauggugcugcugugcaccuucaccgccaccuacgccgacaccaucugcgugggcuaccacgccaacaacagcaccgacaccguggacaccgugcuggagaagaacgugaccgugacccacagcgugaaccugcuggaggacagccacaacggcaagcugugccugcugaagggcaucgccccccugcagcugggcagcugcagcguggccggcuggauccugggcaaccccgagugcgagcugcugaucagcaaggagagcuggagcuacaucguggagacccccaaccccgagaacggcaccugcuaccccggcuacuucaccgacuacgaggagcugagagagcagcugagcagcgugagcagcuucaagagauucgagaucuuccccaaggagagcagcuggcccaaccacaccgugaacggcgugagcagcagcugcagccacaacggcgagagcagcuucuacagaaaccugcuguggcugaccgugaaggacggccuguaccccaaccugagcaagagcuacaccaacaagaaggagaaggaggugcuggugcuguggggcgugcaccaccccagcaacaucggcgaccagagagcccuguaccacaccgagaacgccuacgugagcguggugagcagccacuacagcagaagauucacccccgagaucgccaagagacccaaggugagaaaccaggagggcagaaucaacuacuacuggacccugcuggagcccggcgacaccaucaucuucgaggccaacggcaaccugaucgcccccagauacgccuucgagcugagcaagggcuucggcagcggcaucaucaccagcaacgcccccaugggcgagugcaacgccaagugccagaccccccagggcgccaucaacagcagccugcccuuccagaacgugcaccccgugaccaucggcgagugccccaaguacgugagaagcaccaagcugagaauggugaccggccugagaaacacccccagcauccagagcagaggccuguucggcgccaucgccggcuucaucgagggcggcuggaccggcaugguggacggcugguacggcuaccaccaccagaacgagcagggcagcggcuacgccgccgaccagcagagcacccagaacgccaucaacggcaucaccaacaaggugaacagcgugaucgagaagaugaacacccaguucaccgccgugggcaaggaguucaacaagcuggagagaagaauggagaaccugaacaagaagaucgacgacggcuuccuggacaucuggaccuacaacgccgagcugcuggugcugcuggagaacgagagaacccuggacuuccacgacagcaacgugaagaaccuguacgagaaggugaagagccagcugaagaacaacgccaaggagaucggcaacggcugcuucgaguucuaccacaagugcaacgacgagugcauggagagcgugaagaacggcaccuacgacuaccccaaguacagcgaggagagcaagcugaacagagagaagaucgacggcgugaagcuggagagcaugggcguguacaacauccuggccaucuacagcaccguggccagcagccuggugcugcuggugagccugggcgccaucagcuucuggaugugcagcaacggcagccugcagugcagaaucugcaucuga

SEQ ID NO: 166407 - RNA, 1698 nt, Artificial Sequence
  derived and/or modified CDS sequence (opt4) from hemagglutinin__InfluenzaA__ADV69088
augaaggugaagcugcugauccugcugugcaccuucaccgccaccuacgccgacaccaucugcaucggcuaccacgccaacaacagcaccgacaccguggacaccgugcuggagaagaacgugaccgugacccacagcgugaaccugcuggaggacagccacaacggcaagcugugccugcugaagggcaucgccccccugcagcugggcaacugcagcgugaccggcuggauccugggcaaccccgagugcgagcugcugaucagcaagaagagcuggagcuacaucguggagacccccaaccccgagaacggcgccugcuaccccggcuacuucgccgacuacgaggagcugagagagcagcugagcagcgugagcagcuucgagagauucgagaucuuccccaaggagagcagcuggcccaaccacaacgugaacggcgugagcgccagcugcagccacaacggcaagagcagcuucuacagaaaccugcuguggcugaccggcaagaacggccuguaccccagccugaccaagagcuacgccaacgacaaggagaaggaggugcugauccuguggggcgugcaccaccccagcaacaucggcgaccagagaacccuguaccacaccgagaacgccuacgugagcgugaugagcagccacuacagcagaagauucacccccgagaucagcaagagacccaaggugagagaccaggagggcagaaucaacuacuacuggacccugcuggagcccggcgacaccaucaucuucgaggccaacggcaaccugaucgcccccugguacgccuucgcccugagcagaggcuucggcagcggcaucaucaccagcagcgcccccauggacgccugcgacgccaagugccagaccccccagggcgccaucaacagcagccugcccuuccagaacgugcaccccgugaccaucggcgagugccccaaguacgugagaagcaccaagcugagaauggugaccggccugagaaacauccccagcauccagagcagaggccuguucggcgccaucgccggcuucaucgagggcggcuggaccggcaugguggacggcugguacggcuaccaccaccagaacgagcagggcagcggcuacgccgccgaccaggagagcacccagaacgcccugcacggcaucaccaacaaggugaacagcgugaucgagaagaugaacacccaguucaccgccgugggcaaggaguucaacaagcuggagagaagaauggagaaccugaacaagaagguggacgacggcuuccuggacaucuggaccuacaacgccgagcugcuggugcugcuggagaacgagagaacccuggacuuccacgacagcaacgugaagagccuguacgagaaggugaagauccagcugaagaacaacgccaaggagaucggcaacggcugcuucgaguucuaccacaagugcaacaacgagugcauggagagcgugagaaacggcaccuacgacuaccccaaguacagcgaggagagcaagcugaacagagagaagaucgacggcgugaagcuggacagcaugggcguguaccagauccuggccaucuacagcaccguggccagcagccuggugcugcuggugagccugggcgccaucagcuucuggaugugcagcaacggcagccugcagugcagaaucugcaucuga

SEQ ID NO: 166408 - RNA, 1698 nt, Artificial Sequence
  derived and/or modified CDS sequence (opt4) from hemagglutinin__InfluenzaA__ADV69089
augaaggugaagcugcugauccugcugugcaccuucaccgccaccuacgccgacaccaucugcaucggcuaccacgccaacaacagcaccgacaccguggacaccgugcuggagaagaacgugaccgugacccacagcgugaaccugcuggaggacagccacaacggcaagcugugccugcugaagggcaucgccccccugcagcugggcaacugcagcguggccggcuggauccugggcaaccccgagugcgagcugcugaucagcaagaagagcuggagcuacaucguggagacccccaaccccgagaacggcgccugcuaccccggcuacuucgccgacuacgaggagcugagagagcagcugagcagcgugagcagcuucgagagauucgagaucuuccccaaggagagcagcuggcccaaccacaacgugaacggcgugagcgccagcugcagccacaacggcaagagcagcuucuacagaaaccugcuguggcugaccggcaagaacggccuguaccccaaccugaccaagagcuacgccaacaacaaggagaaggaggugcugauccuguggggcgugcaccaccccagcaacaucggcgaccagagaacccuguaccacaccgagaacgccuacgugagcgugaugagcagccacuacagcagaagauucacccccgagaucaccaagagacccaagaucagagaccaggagggcagaaucaacuacuacuggacccugcuggagcccggcgacaccaucaucuacgaggccaacggcaaccugaucgcccccugguacgccuucgcccugagcagaggcuucggcagcggcaucaucaccagcagcgcccccauggacgagugcgacgccaagugccagaccccccagggcgccaucaacagcagccugcccuuccagaacgugcaccccgugaccaucggcgagugccccaaguacgugagaagcgccaagcugagaauggugaccggccugagaaacauccccagcauccagagcagaggccuguucggcgccaucgccggcuucaucgagggcggcuggaccggcauggugaacggcugguacggcuacagacugcacaacgaccagggcagcggcuacgccgccgaccagaagagcacccagaacgcccugaacggcaucaccaacaaggugaacagcgugaucgagaagaugaacacccaguucaccgccgugggcaaggaguucaacaagcuggagagaagaauggagaaccugaacaagaagguggacgacggcuuccuggacaucuggaccuacaacgccgagaugcuggugcugcuggagaacgagagaacccuggacuuccacgacagcaacgugaagagccuguacgagagagugaagauccagcugaagaacaacgccaaggagaucggcaacggcugcuucgaguucuaccacaagugcaacaacgagugcauggagagcgugagaaacggcaccuacgacuaccccaaguacagcgaggagagcaagcugaacagagagaagaucgacggcgugaagcuggacagcaugggcguguaccagauccuggccaucuacagcaccguggccagcagccuggugcugcuggugagccugggcgccaucagcuucuggaugugcagcaacggcagccugcagugcagaaucugcaucuga

SEQ ID NO: 166409 - RNA, 1698 nt, Artificial Sequence
  derived and/or modified CDS sequence (opt4) from hemagglutinin__InfluenzaA__ADV69090
augaaggugaagcugcuggugcugcugugcaccuucaccgccaccuacgccgacaccaucugcaucggcuaccacgccaacaacagcaccgacaccguggacaccgugcuggagaagaacgugaccgugacccacagcgugaaccugcuggaggacagccacaacggcaagcugugccugcugaagggcaucgccccccugcagcugggcaacugcagcguggccggcuggauccugggcaaccccgagugcgagagccugaucagcaaggagagcuggagcuacaucguggagacccccaaccccgagaacggcaccugcuaccccggcuacuucgccgacuacgaggagcugagagagcagcugagcagcgugagcagcuucgagagauucgagaucuuccccaaggagagcagcuggcccaaccacaccgugaccggcgugagcgccagcugcagccacaacggcaagagcagcuucuacagaaaccugcuguggcugaccagaaagaacggccuguaccccaaccugagcaagagcuacgccaacaacaaggagaaggaggugcuggugcuguggggcgugcaccacccccccaaccugggcgaccagagagcccuguaccacaccgagaacgccuacgugagcguggugagcagccacuacagcagaagauucacccccgagaucgccaagagacccaaggugagagaccaggagggcagaaucaacuacuacuggacccugcuggagcccggcgacaccaucaucuucgaggccaacggcaaccugaucgcccccagauucgccuucgcccugagcagaggcuucggcagcggcaucaucaccagcaacgcccccauggacgagugcgacgccaagugccagaccccccagggcgccaucaacagcagccugcccuuccagaacgugcaccccgugaccaucggcgagugccccaaguacgugagaagcaccaagcugagaauggugaccggccugagaaacauccccagcauccagagcagaggccuguucggcgccaucgccggcuucaucgagggcggcuggaccggcaugguggacggcugguacggcuaccaccaccagaacgagcagggcagcggcuacgccgccgaccagaagagcacccagaacgccaucaacggcaucaccaacaaggugaacagcgugaucgagaagaugaacacccaguucaccgccgugggcaaggaguucaacaagcuggagagaagaauggagaaccugaacaagaagguggacgacggcuuccuggacaucuggaccuacaacgccgagcugcuggugcugcuggagaacgagagaacccuggacuuccacgacagcaacgugaagaaccuguacgagaaggugaagagccagcugaagaacaacgccaaggagaucggcaacggcugcuucgaguucuaccacaagugcaacgacgagugcauggagagcgugaagaacggcaccuacgacuaccccaaguacagcgaggagagcaagcugaacagagagaagaucgacggcgugaagcuggagagcaugggcguguaccagauccuggccaucuacagcaccguggccagcagccuggugcugcuggugagccugggcgccaucagcuucuggaugugcagcaacggcagccugcagugcagaaucugcaucuga

SEQ ID NO: 166410 - RNA, 1698 nt, Artificial Sequence
  derived and/or modified CDS sequence (opt4) from hemagglutinin__InfluenzaA__ADV69091
augaaggugaagcugcuggugcugcugugcaccuucaccgccaccuacgccgacaccaucugcaucggcuaccacgccaacaacagcaccgacaccguggacaccgugcuggagaagaacgugaccgugacccacagcgugaaccugcuggaggacagccacaacggcaagcugugccugcugaagggcaucgccccccugcagcugggcaacugcaacguggccggcuggauccugggcaaccccgagugcgagcugcugaucagcaaggagagcuggagcuacaucguggagacccccaaccccgagaacggcaccugcuaccccggcuacuucaccgacuacgaggagcugagagagcagcugagcagcgugagcagcuucaagagauucgagaucuuccccaaggagagcagcuggcccaaccacaccgugaccggcgugagcgccagcugcagccacaacggcaagagcagcuucuacagaaaccugcuguggcugaccagaaagaacggccuguaccccaaccugagcaagagcuacaccaacgacaaggagaaggaggugcuggugcuguggggcgugcaccaccccagcaacaucggcgaccagagagcccuguaccacaaggagaacgccuacgugagcguggugagcagccacuacagcagaagauucacccccgagaucgugaagagacccaaggugagagaccaggagggcagaaucaacuacuacuggacccugcuggagcccggcgacaccaucaucuucgaggccaacggcaaccugaucgcccccagauacgccuucgcccugagcagaggcuucggcagcggcaucaucaccagcaacgcccccauggacgagugcaacaccaagugccagaccccccagggcgccaucaacagcagccugcccuuccagaacgugcaccccgugaccaucggcgagugccccaaguacgugaagagcgccaagcugagaauggugaccggccugagaaacacccccagcauccagagcagaggccuguucggcgccaucgccggcuucaucgagggcggcuggaccggcaugguggacggcugguacggcuaccaccaccagaacgagcagggcagcggcuacgccgccgaccagaagagcacccagaacgccaucaacggcaucaccaacaaggugaacagcgugaucgagaagaugaacacccaguucaccgccgugggcaaggaguucaacaagcuggagagaagaauggagaaccugaacaagaagguggacgacggcuuccuggacaucuggaccuacaacgccgagcugcuggugcugcuggagaacgagagaacccuggacuuccacgacagcaacgugaagaaccuguacgagaaggugaagaaccagcugaagaacaacgccaaggagaucggcaacggcugcuucgaguucuaccacaagugcaacgacgagugcauggagagcgugaagaacggcaccuacgacuaccccaaguacagcgaggagagcaagcugaacagagagaagaucgacggcgugaagcuggagagcauggagguguaccagauccuggccaucuacagcaccguggccagcagccugguguuccuggugagccugggcgccaucugcuucuggaugugcagcaacggcagccugcagugcagaaucugcaucuga

SEQ ID NO: 166411 - RNA, 1698 nt, Artificial Sequence
  derived and/or modified CDS sequence (opt4) from hemagglutinin__InfluenzaA__ADV69092
augaaggugaagcugcuggugcugcugugcaccuucaccgccaccuacgccgacaccaucugcaucggcuaccacgccaacaacagcaccgacaccguggacaccgugcuggagaagaacgugaccgugacccacagcgugaaccugcuggaggacagccacaacggcaagcugugccugcugaagggcaucgccccccugcagcugggcaacugcaacguggccggcuggauccugggcaaccccgagugcgagcugcugaucagcaaggagagcuggagcuacaucguggagacccccaaccccgagaacggcaccugcuaccccggcuacuucaccgacuacgaggagcugagagagcagcugagcagcgugagcagcuucaagagauucgagaucuuccccaaggagagcagcuggcccaaccacaccgugaccggcgugagcgccagcugcagccacaacggcaagagcagcuucuacagaaaccugcuguggcugaccggcaagaacggccuguaccccaaccugagcaagagcuacaccaacgacaaggagaaggaggugcuggugcuguggggcgugcaccaccccagcaacaucggcgaccagagagcccuguaccacaaggagaacgccuacgugagcguggugagcagccacuacagcagaagauucacccccgagaucgugaagagacccaaggugagagaccaggagggcagaaucaacuacuacuggacccugcuggagcccggcgacaccaucaucuucgaggccaacggcaaccugaucgcccccagauacgccuucgcccugagcagaggcuucggcagcggcaucaucaccagcaacgcccccauggacgagugcaacaccaagugccagaccccccagggcgccaucaacagcagccugcccuuccagaacgugcaccccgugaccaucggcgagugccccaaguacgugaagagcgccaagcugagaauggugaccggccugagaaacacccugagcauccagagcaagggccuguucggcgccaucgccggcuucaucgagggcggcuggaccggcaugguggacggcugguacggcuaccaccaccagaacgagcagggcagcggcuacgccgccgaccagaagagcacccagaacgccaucaacggcaucaccaacaaggugaacagcgugaucgagaagaugaacacccaguucaccgccgugggcaaggaguucaacaagcuggagagaagaauggagaaccugaacaagaagguggacgacggcuuccuggacaucuggaccuacaacgccgagcugcuggugcugcuggagaacgagagaacccuggacuuccacgacagcaacgugaagaaccuguacgagaaggugaagagccagcugaagaacaacgccaaggagaucggcaacggcugcuucgaguucuaccacaagugcaacgacgagugcauggagagcgugaagaacggcaccuacgacuaccccaaguacagcgaggagagcaagcugaacagagagaagaucgacggcgugaagcuggagagcauggagguguaccagauccuggccaucuacagcaccguggccagcagccugguguuccuggugagccugggcgccaucugcuucuggaugugcagcaacggcagccugcagugcagaaucugcaucuga

SEQ ID NO: 166412 - RNA, 1698 nt, Artificial Sequence
  derived and/or modified CDS sequence (opt4) from hemagglutinin__InfluenzaA__ADV69093
augaaggugaagcugauggugcugcugugcaccuucaccgccaccuacgccgacaccaucugcgugggcuaccacgccaacaacagcaccgacaccguggacaccgugcuggagaagaacgugaccgugacccacagcgugaaccugcuggaggacagccacaacggcaagcugugccugcugaagggcaucgccccccugcagcugggcagcugcagcguggccggcuggauccugggcaaccccgagugcgagcugcugaucagcaaggagagcuggagcuacaucguggagacccccaaccccgagaacggcaccugcuaccccggcuacgugaccgacuacgaggagcugagagagcagcugagcagcgugagcagcuucaagagauucgagaucuuccccaaggagagcagcuggcccaaccacaccgugaccggcgugagcagcagcugcagccacaacggcaagagcagcuucuacagaaaccugcuguggcugaccgugaagaacggccuguaccccaaccugagcaagagcuacaccaacaagaaggagaaggaggugcuggugcuguggggcgugcaccaccccagcaacaucggcgaccagagagcccuguaccacaccgagaacgccuacgugagcguggugagcagccacuacagcagaagauucacccccgagaucgccaagagacccaaggugagaaaccaggagggcagaaucaacuacuacuggacccugcuggagcccggcgacaccaucaucuucgaggccaacggcaaccugaucgcccccagauacgccuucgagcugagcaagggcuucggcagcggcaucaucaccagcaacgcccccaugggcgagugcaacgccaagugccagaccccccagggcgccaucaacagcagccugcccuuccagaacgugcaccccgugaccaucggcgagugccccaaguacgugaagagcgccaagcugagaauggugaccggccugagaaacacccccagcauccagagcagaggccuguucggcgccaucgccggcuucaucgagggcggcuggaccggcaugguggacggcugguacggcuaccaccaccagaacgagcagggcagcggcuacgccgccgaccagcagagcacccagaacgccaucaacggcaucaccaacaaggugaacagcgugaucgagaagaugaacacccaguucaccgccgugggcaaggaguucaacaagcuggagagaagaauggagaaccugaacaagagaguggacgacggcuuccuggacaucuggaccuacaacgccgagcugcuggugcugcuggagaacgagagaacccuggacuuccacgacagcaacgugaagaaccuguacgagaaggugaagagccagcugaagaacaacgccaaggagaucggcaacggcugcuucgaguucuaccacaagugcaacgacgagugcauggagagcgugaagaacggcaccuacgacuaccccaaguacagcgaggagagcaagcugaacagagagaagaucgacggcgugaagcuggagagcaugggcguguacaacauccuggccaucuacagcaccguggccagcagccuggugcugcuggugagccugggcgccaucagcuucuggaugugcagcaacggcagccugcagugcagaaucugcaucuga

SEQ ID NO: 166413 - RNA, 1698 nt, Artificial Sequence
  derived and/or modified CDS sequence (opt4) from hemagglutinin__InfluenzaA__ADV69094
augaaggugaagcugauggugcugcugugcaccuucaccgccaccuacgccgacaccaucugcgugggcuaccacgccaacaacagcaccgacaccguggacaccgugcuggagaagaacgugaccgugacccacagcgugaaccugcuggaggacagccacaacggcaagcugugccugcugaagggcaucgccccccugcagcugggcagcugcagcguggccggcuggauccugggcaaccccgagugcgagcugcugaucagcaaggagagcuggagcuacaucguggagacccccaaccccgagaacggcaccugcuaccccggcuacuucaccgacuacgaggagcugagagagcagcugagcagcgugagcagcuucaagagauucgagaucuuccccaaggagagcagcuggcccaaccacaccgugaccggcgugagcagcagcugcagccacaacggcaagagcagcuucuacagaaaccugcuguggcugaccgugaagaacggccuguaccccaaccugagcaagagcuacaccaacaagaaggagaaggaggugcuggugcuguggggcgugcaccaccccagcaacaucggcgaccagagagcccuguaccacaccgagaacgccuacgugagcguggugagcagccacuacagcagaagauucacccccgagaucgccaagagacccaaggugagaaaccaggagggcagaaucaacuacuacuggacccugcuggagcccggcgacaccaucaucuucgaggccaacggcaaccugaucgcccccagauacgccuucgagcugagcaagggcuucggcagcggcaucaucaccagcaacgcccccaugggcgagugcaacgccaagugccagaccccccagggcgccaucaacagcagccugcccuuccagaacgugcaccccgugaccaucggcgagugccccaaguacgugaagagcgccaagcugagaauggugaccggccugagaaacacccccagcauccagagcagaggccuguucggcgccaucgccggcuucaucgagggcggcuggaccggcauggugcacggcugguacggcuaccaccaccagaacgagcagggcagcggcuacgccgccgagcagcagagcacccaguacgccaucaacggcaucaccaacaaggugaacagcgugaucgagaagaugaacacccaguucaccgccgugggcaaggaguucaacaagcuggagagaagaauggagaaccugaacaagagaguggacgacggcuuccuggacaucuggaccuacaacgccgagcugcuggugcugcuggagaacgagagaacccuggacuuccacgacagcaacgugaagaaccuguacgagaaggugaagagccagcugaagaacaacgccaaggagaucggcaacggcugcuucgaguucuaccacaagugcaacgacgagugcauggagagcgugaagaacggcaccuacgacuaccccaaguacagcgaggagagcaagcugaacagagagaagaucgacggcgugaagcuggagagcaugggcguguacaacauccuggccaucuacagcaccguggccagcagccuggugcugcuggugagccugggcgccaucagcuucuggaugugcagcaacggcagccugcagugcagaaucugcaucuga

SEQ ID NO: 166414 - RNA, 1698 nt, Artificial Sequence
  derived and/or modified CDS sequence (opt4) from hemagglutinin__InfluenzaA__ADV69095
augaaggugaagcugauggugcugcugugcaccuucaccgccaccuacgccgacaccaucugcgugggcuaccacgccaacaacagcaccgacaccguggacaccgugcuggagaagaacgugaccgugacccacagcgugaaccugcuggaggacagccacaacggcaagcugugccugcugaagggcaucgccccccugcagcugggcagcugcagcguggccggcuggauccugggcaaccccgagugcgagcugcugaucagcaaggagagcuggagcuacaucguggagccccccaaccccgagaacggcaccugcuaccccggcuacuucaccgacuacgaggagcugagagagcagcugagcagcgugagcagcuucaagagauucgagaucuuccccaaggagagcagcuggcccaaccacaccgugaacggcgugagcagcagcugcagccacaacggcgagagcagcuucuacagaaaccugcuguggcugaccgugaaggacggccuguaccccaaccugagcaagagcuacaccaacaagaaggagaaggaggugcuggugcuguggggcgugcaccaccccagcaacaucggcgaccagagagcccuguaccacaccgagaacgccuacgugagcguggugagcagccacuacagcagaagauucacccccgagaucgccaagagacccaaggugagaaaccaggagggcagaaucaacuacuacuggacccugcuggagcccggcgacaccaucaucuucgaggccaacggcaaccugaucgcccccagauacgccuucgagcugagcaagggcuucggcagcggcaucaucaccagcaacgcccccaugggcgagugcaacgccaagugccagaccccccagggcgccaucaacagcagccugcccuuccagaacgugcaccccgugaccaucggcgagugccccaaguacgugagaagcaccaagcugagaauggugaccggccugagaaacacccccagcauccagagcagaggccuguucggcgccaucgccggcuucaucgagggcggcuggaccggcaugguggacggcugguacggcuaccaccaccagaacgagcagggcagcggcuacgccgccgaccagcagagcacccagaacgccaucaacggcaucaccaacaaggugaacagcgugaucgagaagaugaacacccaguucaccgccgugggcaaggaguucaacaagcuggagagaagaauggagaaccugaacaagaagaucgacgacggcuuccuggacaucuggaccuacaacgccgagcugcuggugcugcuggagaacgagagaacccuggacuuccacgacagcaacgugaagaaccuguacgagaaggugaagagccagcugaagaacaacgccaaggagaucggcaacggcugcuucgaguucuaccacaagugcaacgacgagugcauggagagcgugaagaacggcaccuacgacuaccccaaguacagcgaggagagcaagcugaacagagagaagaucgacggcgugaagcuggagagcaugggcguguacaacauccuggccaucuacagcaccguggccagcagccuggugcugcuggugagccugggcgccaucagcuucuggaugugcagcaacggcagccugcagugcagaaucugcaucuga

SEQ ID NO: 166415 - RNA, 1698 nt, Artificial Sequence
  derived and/or modified CDS sequence (opt4) from hemagglutinin__InfluenzaA__ADV69096
augaaggugaagcugauggugcugcugugcaccuucaccgccaccuacgccgacaccaucugcgugggcuaccacgccaacaacagcaccgacaccguggacaccgugcuggagaagaacgugaccgugacccacagcgugaaccugcuggaggacagccacaacggcaagcugugccugcugaagggcaucgccccccugcagcugggcagcugcagcguggccggcuggauccugggcaaccccgagugcgagcugcugaucagcaaggagagcuggagcuacaucguggagacccccaaccccgagaacggcaccugcuaccccggcuacgugaccgacuacgaggagcugagagagcagcugagcagcgugagcagcuucaagagauucgagaucuuccccaaggagagcagcuggcccaaccacaccgugaccggcgugagcagcagcugcagccacaacggcaagagcagcuucuacagaaaccugcuguggcugaccgugaagaacggccuguaccccaaccugagcaagagcuacaccaacaagaaggagaaggaggugcuggugcuguggggcgugcaccaccccagcaacaucggcgaccagagagcccuguaccacaccgagaacgccuacgugagcguggugagcagccacuacagcagaagauucacccccgagaucgccaagagacccaaggugagaaaccaggagggcagaaucaacuacuacuggacccugcuggagcccggcgacaccaucaucuucgaggccaacggcaaccugaucgcccccagauacgccuucgagcugagcaagggcuucggcagcggcaucaucaccagcaacgcccccaugggcgagugcaacgccaagugccagacccccaagggcgccaucaacagcagccugcccuuccagaacgugcaccccgugaccaucggcgagugccccaaguacgugaagagcgccaagcugagaauggugaccggccugagaaacacccccagcauccagagcagaggccuguucggcgccaucgccggcuucaucgagggcggcuggaccggcaugguggacggcugguacggcuaccaccaccagaacgagcagggcagcggcuacgccgccgaccagcagagcacccagaacgccaucaacggcaucaccaacaaggugaacagcgugaucgagaagaugaacacccaguucaccgccgugggcaaggaguucaacaagcuggagagaagaauggagaaccugaacaagaagguggacgacggcuuccuggacaucuggaccuacaacgccgagcugcuggugcugcuggagaacgagagaacccuggacuuccacgagagcaacgugaagaaccuguacgagaaggugaagagccagcugaagaacaacgccaaggagaucggcaacggcugcuucgaguucuaccacaagugcaacgacgagugcauggagagcgugaagaacggcaccuacgacuaccccaaguacagcgaggagagcaagcugaacagagagaagaucgacggcgugaagcuggagagcaugggcguguacaacauccuggccaucuacagcaccguggccagcagccuggugcugcuggugagccugggcgccaucagcuucuggaugugcagcaacggcagccugcagugcagaaucugcaucuga

SEQ ID NO: 166416 - RNA, 1698 nt, Artificial Sequence
  derived and/or modified CDS sequence (opt4) from hemagglutinin__InfluenzaA__ADV69097
augaaggugaagcugcugauccugcugugcaccuucaccgccaccuacgccgacaccaucugcaucggcuaccacgccaacaacagcaccgacaccguggacaccgugcuggagaagaacgugaccgugacccacagcgugaaccugcuggaggacagccacaacggcaagcugugccugcugaagggcaucgccccccugcagcugggcaacugcagcguggccggcuggauccugggcaaccccgagugcgagcugcugaucagcaagaagagcuggagcuacaucguggagacccccaaccccggcaacggcgccugcuaccccggcuacuucgccgacuacgaggagcugagagagcagcugagcagcgugagcagcuucgagagauucgagaucuuccccaaggagagcagcuggagcaaccacaacgugaacggcgugagcgccagcugcagccacaacggcaagagcagcuucuacagaaaccugcuguggcugaccggcaagaacggccuguaccccacccugaccaagagcuacgccaacgacaaggagaaggaggugcugauccuguggggcgugcaccaccccagcaacaucggcgaccagagaacccuguaccacaccgagaacgccuacgugagcgugaugagcagccacuacagcagaagauucacccccgagaucagcaagagacccaaggugagagaccaggagggcagaaucaacuacuacuggacccugcuggagcccggcgacaccaucaucuucgaggccaacggcaaccugaucgcccccugguacgccuucgcccugagcagaggcuucggcagcggcaucaucaccagcaacgcccccauggacgagugcgacgccaagugccagaccccccagggcgccaucaacagcagccugcccuuccagaacauccaccccgugaccaucggcgagugccccaaguacgugagaagcgccaagcugagaauggugaccggccugagaaacacccccagcauccagagcagaggccuguucggcgccaucgccggcuucaucgagggcggcuggaccggcaugguggacggcugguacggcuaccaccaccagaacgagcagggcagcggcuacgccgccgaccaggagagcacccagaacgccaucaacgagaucaccaacaaggagaacagcgugaucgagaagaugaacacccaguucaccagcgugggcaaggaguucaacaagcuggagagaagaauggagaaccugaacaagaagguggacgacggcuuccuggacaucuggaccuacaacgccgagcugcuggugcugcuggagaacgagagaacccuggacuuccacgacagcaacgugaagagccuguacgagaaggugaagauccagcugaagaacaacgccaaggagaucggcaacggcugcuucgaguucuaccacaagugcaacaacgagugcauggagagcgugagaaacggcaccuacgacuaccccaaguacagcgaggagagcaagcugaacagagagaagaucgacggcgugaagcuggacagcaugggcguguaccagauccuggccaucuacagcaccguggccagcagccuggugcugcuggugagccugggcgccaucagcuucuggaugugcagcaacggcagccugcagugcagaaucugcaucuga

SEQ ID NO: 166417 - RNA, 1698 nt, Artificial Sequence
  derived and/or modified CDS sequence (opt4) from hemagglutinin__InfluenzaA__ADV69098
augaaggugaagcugaucgugcugcugugcaccuucaccgccaccuacgccgacaccaucugcgugggcuaccacgccaacaacagcaccgacaccguggacaccgugcuggagaagaacgugaccgugacccacagcgugaaccugcuggaggacagccacaacggcaagcugugccugcugaagggcaucgccccccugcagcugggcagcugcagcguggccggcuggauccugggcaaccccgagugcgagcugcugaucagcaaggagagcuggagcuacaucguggagacccccaaccccgagaacggcaccugcuaccccggcuacuucaccgacuacgaggagcugagagagcagcugagcagcgugagcagcuucaagagauucgagaucuuccccaaggagagcagcuggcccaaccacaccgugaccggcgugagcagcagcugcagccacaacggcaacagcagcuucuacagaaaccugcuguggcugaccgugaagaacggccuguaccccaaccugagcaagagcuacaccaacaagaaggagaaggaggugcuggugcuguggggcgugcaccaccccagcaacaucgaggaccagagagcccuguaccacaccgagaacgccuacgugagcguggugagcagccacuacagcagaagauucaaccccgagaucgccaagagacccaaggugagaaaccaggagggcagaaucaacuacuacuggacccugcuggagcccggcgacaccaucaucuucgaggccaacggcaaccugaucgcccccagauacgccuucgagcugagcaagggcuucggcagcggcaucaucaccagcaacgcccccaugggcgagugcaacgccaagugccagaccccccagggcgccaucaacagcaaccugcccuuccagaacgugcaccccgugaccaucggcgagugccccaaguacgugagaagcgccaagcugagaauggugaccggccugagaaacacccccagcauccagagcagaggccuguucggcgccaucgccggcuucaucgagggcggcuggaccggcaugguggacggcugguacggcuaccaccaccacaacgagcagggcagcggcuacgccgccaaccagaagagcacccccaacgccaucaacggcaucaccaacaaggugaacagcgugaucgagaagaugaacacccaguucaccgccgugggcaaggaguucaacaagcuggagagaagaauggagaaccugaacaagaagguggacgacggcuuccuggacaucuggaccuacaacgccgagcugcuggugcugcuggagaacgagagaacccuggacuuccacgacagcaacgugaagaaccuguacgagaaggugagaagccagcugaagaacaacgccaaggagaucggcaacggcugcuucgaguucuaccacaagugcaacgacgagugcauggagagcgugaagaacggcaccuacgacuaccccaaguacagcgaggagagcaagcugaacagagagaagaucgacggcgugaagcuggagagcaugggcguguacaacauccuggccaucuacagcaccguggccagcagccuggugcugcuggugagccugggcgccaucagcuucuggaugugcagcaacggcagccugcagugcagaaucugcaucuga

SEQ ID NO: 166418 - RNA, 1698 nt, Artificial Sequence
  derived and/or modified CDS sequence (opt4) from hemagglutinin__InfluenzaA__ADV69099
augaaggugaagcugaucgugcugcugugcaccuucaccgccaccuacgccgacaccaucugcgugggcuaccacgccaacaacagcaccgacaccguggacaccgugcuggagaagaacgugaccgugacccacagcgugaaccugcuggaggacagccacaacggcaagcugugccugcugaagggcaucgccccccugcagcugggcagcugcagcguggccggcuggauccugggcaaccccgagugcgagcugcugaucagcaaggagagcuggagcuacaucguggagacccccaaccccgagaacggcaccugcuaccccggcuacuucaccgacuacgaggagcugagagagcagcugagcagcgugagcagcuucaagagauucgagaucuuccccaaggagagcagcuggcccaaccacaccgugaccggcgugagcagcagcugcagccacaacggcaacagcagcuucuacagaaaccugcuguggcugaccgugaagaacggccuguaccccaaccugagcaagagcuacaccaacaagaaggagaaggaggugcuggugcuguggggcgugcaccaccccagcaacaucgaggaccagagagcccuguaccacaccgagaacgccuacgugagcguggugagcagccacuacagcagaagauucaaccccgagaucgccaagagacccaaggugagaaaccaggagggcagaaucaacuacuacuggacccugcuggagcccggcgacaccaucaucuucgaggccaacggcaaccugaucgcccccagauacgccuucgagcugagcaagggcuucggcagcggcaucaucaccagcaacgcccccaugggcgagugcaacgccaagugccagaccccccagggcgccaucaacagcaaccugcccuuccagaacgugcaccccgugaccaucggcgagugccccaaguacgugagaagcgccaagcugagaauggugaccggccugagaaacacccccagcauccagagcagaggccuguucggcgccaucgccggcuucaucgagggcggcuggaccggcauggugaacggcugguacggcuaccaccaccacaacgagcagggcagcggcuacgccgccaaccagcagagcccccccaacgccaucaacggcaucaccaacaaggugaacagcgugaucgagaagaugaacacccaguucaccgccgugggcaaggaguucaacaagcuggagagaagaauggagaaccugaacaagaagguggacgacggcuuccuggacaucuggaccuacaacgccgagcugcuggugcugcuggagaacgagagaacccuggacuuccacgacagcaacgugaagaaccuguacgagaaggugagaagccagcugaagaacaacgccaaggagaucggcaacggcugcuucgaguucuaccacaagugcaacgacgagugcauggagagcgugaagaacggcaccuacgacuaccccaaguacagcgaggagagcaagcugaacagagagaagaucgacggcgugaagcuggagagcaugggcguguacaacauccuggccaucuacagcaccguggccagcagccuggugcugcuggugagccugggcgccaucagcuucuggaugugcagcaacggcagccugcagugcagaaucugcaucuga

SEQ ID NO: 166419 - RNA, 1698 nt, Artificial Sequence
  derived and/or modified CDS sequence (opt4) from hemagglutinin__InfluenzaA__ADV69100
augaaggugaagcugcugauccugcugugcaccuucaccgccaccuacgccgacaccaucugcaucggcuaccacgccaacaacagcaccgacaccguggacaccgugcuggagaagaacgugaccgugacccacagcgugaaccugcuggaggacagccacaacggcaagcugugccugcugaagggcaucgccccccugcagcugggcaacugcagcguggccggcuggauccugggcaaccccgagugcgagagccugaucagcaagaagagcuggagcuacaucguggagacccccaagcccgagaacggcaccugcuaccccggcgaguucgccgacuacgaggagcugagagagcagcugagcagcgugagcagcuucgagagauucgagaucuuccccaaggagagcagcuggcccaaccacaccgccgccggcgugagcgccagcugcagccacaacggcgagagaagcuucuacaagaaccugaucuggcugaccgugaagaacggccuguaccccaaccugagcaagagcuacaagaacgacaaggagaaggaggugcugauccuguggggcgugcaccacccccccaacaucgagaaccagagaacccuguaccacaccgagaacaccuacgugagcguggugagcagccacuacagcggcagauucacccccgagaucaccaagagacccaaggugagagaccaggagggcagaaucaacuacuacuggacccugcuggagcccggcgacaccaucaucuucgaggccaacggcaaccugaucgcccccugguacgccuucacccugagcagaggccugggcagcggcaucgugaccagcaacgcccccauggacaagugcgacgccaagugccagaccccccacggcgccaucaacagcagccugcccuuccagaacgugcaccccgugaccaucggcgagugccccaaguacgugagaagcgccaagcugagaauggugaccggccugagaaacauccccagcauccagagcagaggccuguucggcgccaucgccggcuucaucgagggcggcuggaccggcaugguggacggcugguacggcuaccaccaccagaacgagcagggcagcggcuacgccgccgaccaggagagcacccagaacgccaucaacggcaucaccaacaaggugaacagcgugaucgagaagaugaacacccaguucaccgccgugggcaaggaguucaacaagcuggagagaagaauggagaaccugaacaagaagguggacgacggcuuccuggacaucuggaccuacaacgccgagcugcuggugcugcuggagaacgagagaacccuggacuuccacgacagcaacgugaagagccuguacgagaaggugaagagccagcugaagaacaacgccaaggagaucggcaacggcugcuucgaguucuaccacaagugcaacaacgagugcauggagagcgugaagaacggcaccuacgacuaccccaaguacagcgaggagagcaagcugaacagagagaagaucgacggcgugaagcuggacagcaugggcguguacagaauccuggccaucuacagcaccguggccagcagccuggugcugcuggugagccugggcgccaucagcuucuggaugugcagcaacggcagccugcagugcagaaucugcaucuga

SEQ ID NO: 166420 - RNA, 1698 nt, Artificial Sequence
  derived and/or modified CDS sequence (opt4) from hemagglutinin__InfluenzaA__ADV69101
augaaggugaagcugcugauccuguucugcaccuucaccgccaccuacgccgacaccaucugcaucggcuaccacgccaacaacagcaccgacaccguggacaccgugcuggagaagaacgugaccgugacccacagcgugaaccugcuggaggacagccacaacggcaagcugugccugcugaagggcaucgccccccugcagcugggcaacugcagcguggccggcuggauccugggcaaccccgagugcgagagccugaucagcaagaagagcuggagcuacaucguggagacccccaaccccgagaacggcgccugcuaccccggcgaguucgccgacuacgaggagcugagagagcagcugagcagcgugagcagcuucgagagauucgagaucuuccccaaggagagcagcuggcccaaccacaccgccaccggcgugagcgccagcugcagccacaacggcgagagaagcuucuacagaaaccugaucuggcugaccgugaagaacggccuguaccccaaccugagcaagagcuacgagaacgacaaggagaaggaggugcugauccuguggggcgugcaccacccccccaacaucgagaaccagagaacccuguaccacaccgagaacgccuacgugagcguggugagcagccacuacagcggcagauucacccccgagaucaccaagagacccaaggugagagaccaggagggcagaaucaacuacuacuggacccugcuggagcccggcgacaccaucaucuucgaggccaacggcaaccugaucgcccccugguacgccuucacccugagcagaggccugggcagcggcaucaucaccagcaacgcccccauggacgagugcgacagcaagugccagaccccccagggcgccaucaacagcagccugcccuuccagaacgugcaccccgugaccaucggcgagugccccaaguacgugagaagcgccaagcugagaauggugaccggccugagaaacauccccagcauccagagcagaggccuguucggcgccaucgccggcuucaucgagggcggcuggaccggcaugguggacggcugguacggcuaccaccaccagaacgagcagggcagcggcuacgccgccgaccaggagagcacccagaacgccaucaacggcaucaccaacaaggugaacagcgugaucgagaagaugaacccccaguucaccgccgugggcaaggaguucaacaagcuggagagaagaauggagaaccugaacaagaagguggacgacggcuuccuggacaucuggaccuacaacgccgagcugcuggugcugcuggagaacgagagaacccuggacuuccacgacagcaacgugaagagccuguacgagaaggugaagagccagcugaagaacaacgccaaggagaucggcaacggcugcuucgaguucuaccacaagugcaacaacgagugcauggagagcgugaagaacggcaccuacgacuaccccaaguacagcgaggagagcaagcugaacagagagaagaucgacggcgugaagcuggacagcaugggcguguacagaauccuggccaucuacagcaccguggccagcagccuggugcugcuggugagccugggcgccaucagcuucuggaugugcagcaacggcagccugcagugcagaaucugcaucuga

SEQ ID NO: 166421 - RNA, 1698 nt, Artificial Sequence
  derived and/or modified CDS sequence (opt4) from hemagglutinin__InfluenzaA__ADV69102
augaaggugaagcugcugauccuguucugcaccuucaccgccaccuacgccgacaccaucugcaucggcuaccacgccaacaacagcaccgacaccguggacaccgugcuggagaagaacgugaccgugacccacagcgugaaccugcuggaggacagccacaacggcaagcugugccugcugaagggcaucgccccccugcagcugggcaacugcagcguggccggcuggauccugggcaaccccgagugcgagagccugaucagcaagaagagcuggagcuacaucguggagacccccaaccccgagaacggcgccugcuaccccggcgaguucgccgacuacgaggagcugagagagcagcugagcagcgugagcagcuucgagagauucgagaucuuccccaaggagagcagcuggcccaaccacaccgccaccggcgugagcgccagcugcagccacaacggcgagagaagcuucuacagaaaccugaucuggcugaccgugaagaacggccuguaccccaaccugagcaagagcuacgagaacgacaaggagaaggaggugcugauccuguggggcgugcaccacccccccaacaucgagaaccagagaacccuguaccacaccgagaacgccuacgugagcguggugagcagccacuacagcggcagauucacccccgagaucaccaagagacccaaggugagagaccaggagggcagaaucaacuacuacuggacccugcuggagcccggcgacaccaucaucuucgaggccaacggcaaccugaucgcccccugguacgccuucacccugagcaccggccugggcagcggcaucaucaccagcaacgcccccauggacgagugcgacagcaagugccagaccccccagggcgccaucaacagcagccugcccuuccagaacgugcaccccgugaccaucggcgagugccccaaguacgugagaagcgccaagcugagaauggugaccggccugagaaacauccccagcauccagagcagaggccuguucggcgccaucgccggcuucaucgagggcggcuggaccggcaugguggacggcugguacggcuaccaccaccagaacgagcagggcagcggcuacgccgccgaccaggagagcacccagaacgccaucaacggcaucaccaacaaggugaacagcgugaucgagaagaugaacacccaguucaccgccgugggcaaggaguucaacaagcuggagagaagaauggagaaccugaacaagaagguggacgacggcuuccuggacaucuggaccuacaacgccgagcugcuggugcugcuggagaacgagagaacccuggacuuccacgacagcaacgugaagagccuguacgagaaggugaagagccagcugaagaacaacgccaaggagaucggcaacggcugcuucgaguucuaccacaagugcaacaacgagugcauggagagcgugaagaacggcaccuacgacuaccccaaguacagcgaggagagcaagcugaacagagagaagaucgacggcgugaagcuggacagcaugggcguguacagaauccuggccaucuacagcaccguggccagcagccuggugcugcuggugagccugggcgccaucagcuucuggaugugcagcaacggcagccugcagugcagaaucugcaucuga

SEQ ID NO: 166422 - RNA, 1698 nt, Artificial Sequence
  derived and/or modified CDS sequence (opt4) from hemagglutinin__InfluenzaA__ADV69103
augaaggugaagcugauggugcugcugugcaccuucaccgccaccuacgccgacaccaucugcgugggcuaccacgccaacaacagcaccgacaccguggacaccgugcuggagaagaacgugaccgugacccacagcgugaaccugcuggaggacagccacaacggcaagcugugccugcugaagggcaucgccccccugcagcugggcagcugcagcguggccggcuggauccugggcaaccccgagugcgagcugcugaucagcaaggagagcuggagcuacaucguggagacccccaaccccgagaacggcaccugcuaccccggcuacuucaccgacuacgaggagcugagagagcagcugagcagcgugagcagcuucaagagauucgagaucuuccccaaggagagcagcuggcccaaccacaacgugaccggcgugagcagcagcugcagccacaacggcaagagcagcuucuacagaaaccugcuguggcugaccgugaagaacggccuguaccccaaccugagcaagagcuacaccaacaagaaggagaaggaggugcuggugcuguggggcgugcaccaccccagcaacaucggcgaccagagagcccuguaccacaccgagaacgccuacgugagcguggugagcagccacuacagcagaagauucacccccgagaucgccaagagacccaaggugagaaaccaggagggcagaaucaacuacuacuggacccugcuggagcccggcgacaccaucaucuucgaggccaacggcaaccugaucgcccccagauacgccuucgagcugagcaagggcuucggcagcggcaucaucaccagcaacgcccccaucggcgagugcaacgccaagugccagaccccccagggcgccaucaacagcagccugcccuuccagaacgugaaccccgugaccaucggcgagugccccaaguacgugaagagcgccaagcugagaauggugaccggccugagaaacacccccagcauccagagcagaggccuguucggcgccaucgccggcuucaucgagggcggcuggaccggcaugguggacggcugguacggcuaccaccaccagaacgagcagggcagcggcuacgccgccgaccagcagagcacccagaacgccaucaacggcaucaccaacaaggugaacagcgugaucgagaagaugaacacccaguucaccgccgugggcaaggaguucaacaagcuggagagaagaauggagaaccugaacaagaagguggacgacggcuuccuggacaucuggaccuacaacgccgagcugcuggugcugcuggagaacgagagaacccuggacuuccacgacagcaacgugaagaaccuguacgagaaggugaagagccagcugaagaacaacgccaaggagaucggcaacggcugcuucgaguucuaccacaagugcaacgacgagugcauggagagcgugaagaacggcaccuacgacuaccccaaguacagcgaggagagcaagcugaacagagagaagaucgacggcgugaagcuggagagcaugggcguguacaacauccuggccaucuacagcaccguggccagcagccuggugcugcuggugagccugggcgccaucagcuucuggaugugcagcaacggcagccugcagugcagaaucugcaucuga

SEQ ID NO: 166423 - RNA, 1698 nt, Artificial Sequence
  derived and/or modified CDS sequence (opt4) from hemagglutinin__InfluenzaA__ADV69104
augaaggugaagcugcugauccuguucugcaccuucaccgccaccuacgccgacaccaucugcaucggcuaccacgccaacaacagcaccgacaccguggacaccgugcuggagaagaacgugaccgugacccacagcgugaaccugcuggaggacagccacaacggcaagcugugccugcugaagggcaucgccccccugcagcugggcaacugcagcguggccggcuggauccugggcaaccccgagugcgagagccugaucagcaagaagagcuggagcuacaucguggagacccccaaccccgagaacggcgccugcuaccccggcgaguucgccgacuacgaggagcugagagagcagcugagcagcgugagcagcuucgagagauucgagaucuuccccaaggagagcagcuggcccaaccacaccgccaccggcgugagcgccagcugcagccacaacggcgagagaagcuucuacagaaaccugaucuggcugaccgugaagaacggccuguaccccaaccugagcaagagcuacgagaacgacaaggagaaggaggugcugauccuguggggcgugcaccacccccccaacaucgagaaccagagaacccuguaccacaccgagaacgccuacgugagcguggugagcagccacuacagcggcagauucacccccgagaucaccaagagacccaaggugagagaccaggagggcagaaucaacuacuacuggacccugcuggagcccggcgacaccaucaucuucgaggccaacggcaaccugaucgcccccugguacgccuucacccugagcagaggccugggcagcggcaucaucaccagcaacgcccccauggacgagugcgacagcaagugccagaccccccagggcgccaucaacagcagccugcccuuccagaacgugcaccccgugaccaucggcgagugccccaaguacgugagaagcgccaagcugagaauggugaccggccugagaaacauccccagcauccagagcagaggccuguucggcgccaucgccggcuucaucgagggcggcuggaccggcaugguggacggcugguacggcuaccaccaccagaacgagcagggcagcggcuacgccgccgaccaggagagcacccagaacgccaucaacggcaucaccaacaaggugaacagcgugaucgagaagaugaacacccaguucaccgccgugggcaaggaguucaacaagcuggagagaagaauggagaaccugaacaagaagguggacgacggcuuccuggacaucuggaccuacaacgccgagcugcuggugcugcuggagaacgagagaacccuggacuuccacgacagcaacgugaagagccuguacgagaaggugaagagccagcugaagaacaacgccaaggagaucggcaacggcugcuucgaguucuaccacaagugcaacaacgagugcauggagagcgugaagaacggcaccuacgacuaccccaaguacagcgaggagagcaagcugaacagagagaagaucgacggcgugaagcuggacagcaugggcguguacagaauccuggccaucuacagcaccguggccagcagccuggugcugcuggugagccugggcgccaucagcuucuggaugugcagcaacggcagccugcagugcagaaucugcaucuga

SEQ ID NO: 166424 - RNA, 1698 nt, Artificial Sequence
  derived and/or modified CDS sequence (opt4) from hemagglutinin__InfluenzaA__ADV69105
augaaggugaagcugcugauccugcugugcaccuucaccgccaccuacgccgacaccaucugcaucggcuaccacgccaacaacagcaccgacaccguggacaccgugcuggagaagaacgugaccgugacccacagcgugaaccugcuggaggacagccacaacggcaagcugugccugcugaagggcaucgccccccugcagcugggcaacugcagcguggccggcuggauccugggcaaccccgagugcgagagccugaucagcaagaagagcuggagcuacaucguggagacccccaaccccgagaacggcgccugcuaccccggcgaguucgccgacuacgaggagcugagagagcagcugagcagcgugagcagcuucgagagauucgagaucuuccccaaggagagcagcuggcccaaccacaccgccgccggcgugagcgccagcugcagccacaacggcgagagaagcuucuacagaaaccugaucuggcugaccgugaagaacggccuguaccccaaccugagcaagagcuacaagaacgacaaggagaaggaggugcugaucaucuggggcgugcaccacccccccaacaucgagaaccagagaacccuguaccacaccgagaacgccuacgugagcguggugagcagccacuacagcggcagauucacccccgagaucaccaagagacccaaggugagagaccaggagggcagaaucaacuacuacuggacccugcuggagcccggcgacaccaucaucuucgaggccaacggcaaccugaucgcccccugguacgccuucacccugagcagaggccugggcagcggcaucaucaccagcaacgcccccauggacgagugcgacgccaagugccagaccccccagggcgccaucaacagcagccugcccuuccagaacgugcaccccgugaccaucggcgagugccccaaguacgugagaagcgccaagcugagaauggugaccggccugagaaacauccccagcauccagagcagaggccuguucggcgccaucgccggcuucaucgagggcggcuggaccggcaugguggacggcugguacggcuaccaccaccagaacgagcagggcagcggcuacgccgccgaccaggagagcacccagaacgccaucaacggcaucaccaacaaggugaacagcgugaucgagaagaugaacacccaguucaccgccgugggcaaggaguucaacaagcuggagagaagaauggagaaccugaacaagaagguggacgacggcuuccuggacaucuggaccuacaacgccgagcugcuggugcugcuggagaacgagagaacccuggacuuccacgacagcaacgugaagagccuguacgagaaggugaagagccagcugaagaacaacgccaaggagaucggcaacggcugcuucgaguucuaccacaagugcaacaacgagugcauggagagcgugaagaacggcaccuacgacuaccccaaguacagcgaggagagcaagcugaacagagagaagaucgacggcgugaagcuggacagcaugggcguguacagaauccuggccaucuacagcaccguggccagcagccuggugcugcuggugagccugggcgccaucagcuucuggaugugcagcaacggcagccugcagugcagaaucugcaucuga

SEQ ID NO: 166425 - RNA, 1698 nt, Artificial Sequence
  derived and/or modified CDS sequence (opt4) from hemagglutinin__InfluenzaA__ADV69106
augaaggugaagcugcugauccugcugugcaccuucaccgccaccuacgccgacaccaucugcaucggcuaccacgccaacaacagcaccgacaccguggacaccgugcuggagaagaacgugaccgugacccacagcgugaaccugcuggaggacagccacaacggcaagcugugccugcugaagggcaucgccccccugcagcugggcaacugcagcguggccggcuggauccugggcaaccccgagugcgagagccugaucagcaagaagagcuggagcuacaucguggagacccccaaccccggcaacggcgccugcuaccccggcuacuucgccgacuacgaggagcugagagagcagcugagcagcgugagcagcuucgagagauucgagauguuccccaaggagagcagcuggcccaaccacaacgugaacggcgugagcgccagcugcagccacaacggcaagagcagcuucuacagaaaccugcuguggcugaccagaaagaacggccuguaccccaaccugaccaagagcuacgccaacaacaacgacaaggaggugcugauccuguggggcgugcaccaccccagcaacaucggcgaccagagaacccuguaccacaccgagaacgccuacgugagcgugaugagcagccacuacagcagaagauucacccccgagaucaccaagagacccaaggugagagaccaggagggcagaaucaacuacuacuggacccugcuggagcccggcgacaccaucaucuucgaggccaacggcaaccugaucgcccccugguacgccuucgcccugagcagaagcuucggcagcggcaucaucaccagcagcgcccccauggacgagugcgacgccaagugccagaccccccagggcgccaucaacagcagccugcccuuccagaacgugcaccccgugaccaucggcgagugccccaaguacgugagaagcgccaagcugaagauggugaccggccugagaaacauccccagcauccagagcagaggccuguucggcgccaucgccggcuucaucgagggcggcuggaccggcaugguggacggcugguacggcuaccaccaccagaacgagcagggcagcggcuacgccgccgaccaggagagcacccagaacgccaucaacggcaucaccaacaaggugaacagcgugaucgagaagaugaacacccaguucaccgccgugggcaaggaguucaacaagcuggagaagagaauggagaaccugaacaagaagguggacgacggcuuccuggacaucuggaccuacaacgccgagcugcuggugcugcuggagaacgagagaacccuggacuuccacgacagcaacgugaagagccuguacgagaaggugaagauccagcugaagaacaacgccaaggagaucggcaacggcugcuucgaguucuaccacaagugcaacaacgagugcauggagagcgugagaaacggcaccuacgacuaccccaaguacagcgaggagagcaagcugaacagagagaagaucgacggcgugaagcuggacagcaugggcguguaccagauccuggccaucuacagcaccguggccagcagccuggugcugcuggugagccugggcgccaucagcuucuggaugugcagcaacggcagccugcagugcagaaucugcaucuga

SEQ ID NO: 166426 - RNA, 1698 nt, Artificial Sequence
  derived and/or modified CDS sequence (opt4) from hemagglutinin__InfluenzaA__ADV69107
augaaggugaagcugcugauccugcugugcaccuucaccgccaccuacgccgacaccaucugcaucggcuaccacgccaacaacagcaccgacaccguggacaccgugcuggagaagaacgugaccgugacccacagcgugaaccugcuggaggacagccacaacggcaagcugugccugcugaagggcaucgccccccugcagcugggcaacugcagcguggccggcuggauccugggcaaccccgagugcgagagccugaucagcaaggagagcuggagcuacaucguggagacccccaacagcgacaacggcgccugcuaccccggccaguucaccgacuacgaggagcugagagagcagcugagcagcgugagcagcuucgagagauucgagaucuuccccaaggagagcagcuggcccaaccacaccgugaccggcgugagcgccagcugcagccacaacggcgagagaagcuucuacagaaaccugaucuggcugaccgugaagaacggccuguaccccaaccugagcaagagcuacgagaacgacaaggagaaggaggugcugauccuguggggcgugcaccacccccccaacaucggcgaccagagaacccuguaccacaccgagaacgccuacaucagcguggugagcagccacuacagcggcagauucacccccgagaucaccaagagacccaaggugagagaccaggagggcagaaucaacuacuacuggacccugcuggagcccggcgacaccaucaucuucgaggccaacggcaaccugaucgcccccugguacgccuucgcccugagcagaggccugggcagcggcaucaucaccagcaacgcccccauggacaagugcgacgccaagugccagaccccccagggcgccaucaacagcagccugcccuuccagaacgugcaccccgugaccaucggcgagugccccaaguacgugagaagcaccaagcugagaauggugaccggccugagaaacauccccagcauccagagcagaggccuguucggcgccaucgccggcuucaucgagggcggcuggaccggcaugguggacggcugguacggcuaccaccaccagaacgagcagggcagcggcuacgccgccgaccaggagagcacccagaacgccaucaacggcaucaccaacaaggugaacagcgugaucgagaagaugaacacccaguucaccgccgugggcaaggaguucaacaagcuggagagaagaauggagaaccugaacaagaagguggacgacggcuuccuggacaucuggaccuacaacgccgagcugcuggugcugcuggagaacgagagaacccuggacuuccacgacagcaacgugaagagccuguacgagaaggugaagagccagcugaagaacaacgccaaggagaucggcaacggcugcuucgaguucuaccacaagugcaacaacgagugcauggagagcgugagaaacggcaccuacgacuaccccaaguacagcgaggagagcaagcugaacagagagaagaucgacggcgugaagcuggacagcaugggcguguacagaauccuggccaucuacagcaccgccgccagcagccuggugcugcuggugagccugggcgccaucagcuucuggaugugcagcaacggcagccugcagugcagaaucugcaucuga

SEQ ID NO: 166427 - RNA, 1698 nt, Artificial Sequence
  derived and/or modified CDS sequence (opt4) from hemagglutinin__InfluenzaA__ADV69108
augaaggugaagcugcuggugcugcugugcaccuucaccgccaccuacgccgacaccaucugcgugggcuaccacgccaacaacagcaccgacaccguggacaccgugcuggagaagaacgugaccgugacccacagcgugaaccugcuggaggacagccacaacggcaagcugugccugcugaagggcaucgccccccugcagcugggcagcugcagcguggccggcuggauccugggcaaccccgagugcgagcugcugaucagcaaggagagcuggagcuacaucguggagacccccaaccccgagaacggcaccugcuaccccggcuacuucaccgacuacgaggagcugagagagcagcugagcagcgugagcagcuucaagagauucgagaucuuccccaaggagagcagcuggcccaaccacaccgugaccggcgugagcagcagcugcagccacaacggcaagagcagcuucuacagaaaccugcuguggcugaccaugaagaacggccuguaccccaaccugagcaagagcuacaccaacaagaaggagaaggaggugcuggugcuguggggcgugcaccaccccagcaacaucggcgaccagagagcccuguaccacaccgagaacgccuacgugagcguggugagcagccacuacagcagaagauucacccccgagaucgccaagagacccaaggugagaaaccaggagggcagaaucaacuacuacuggacccugcuggagcccgaggacaccaucaucuucgaggccaacggcaaccugaucgcccccagauacgccuucgagcugagcaagggcuucggcagcggcaucaucaccagcaacgcccccaugggcgagugcaacgccaagugccagaccccccagggcgccaucaacagcagccugcccuuccagaacgugcaccccgugaccaucggcgagugccccaaguacgugagaagcagcaagcugagaauggugaccggccugagaaacacccccagcauccagagcagaggccuguucggcgccaucgccggcuucaucgagggcggcuggaccggcaugguggacggcugguacggcuaccaccaccagaacgagcagggcagcggcuacgccgccgaccagcagagcacccagaacgccaucaacggcaucaccaacaaggugaacagcgugaucgagaagaugaacacccaguucaccgccgugggcaaggaguucaacaagcuggagagaagaauggagaaccugaacaagaagaucgacgacggcuuccuggacaucuggaccuacaacgccgagcugcuggugcugcuggagaacgagagaacccuggacuuccacgacagcaacgugaagaaccuguacgagaaggugaagagccagcugaagaacaacgccaaggagaucggcaacggcugcuucgaguucuaccacaagugcaacgacgagugcauggagagcgugaagaacggcaccuacgacuaccccaaguacagcgaggagagcaagcugaacagagagaagaucgacggcgugaagcuggagagcaugggcguguacaacauccuggccaucuacagcaccguggccagcagccuggugcugcuggugagccugggcgccaucagcuucuggaugugcagcaacggcagccugcagugcagaaucugcaucuga

SEQ ID NO: 166428 - RNA, 1698 nt, Artificial Sequence
  derived and/or modified CDS sequence (opt4) from hemagglutinin__InfluenzaA__ADV69109
augaaggugaagcugcugauccugcugugcaccuucaaggccaccuacgccgacaccaucugcaucggcuaccacgccaacaacagcaccgagaccguggacaccgugcuggagaagaacgugaccgugacccacagcgugaaccugcuggaggacagccacaacggcaagcugugccugcugaagggcaucgccccccugcagcugggcaacugcagcguggccggcuggauccugggcaaccccgagugcgagagccugaucagcaagaagagcuggagcuacaucguggagacccccaaccccgagaacggcgccugcuaccccggcgaguucgccgacuacgaggagcugagagagcagcugagcagcgugagcagcuucgagagauucgagaucuuccccaaggagagcagcuggcccaaccacaccgccaccggcgugagcgccagcugcagccacaacggcgagagaagcuucuacagaaaccugaucuggcugaccgugaagaacggccuguaccccaaccugagcaagagcuacgagaacgacaagaagaaggaggugcugauccuguggggcgugcaccacccccccaacaucgagaaccagagaacccuguaccacaccgagaacgccuacgugagcguggugagcagccacuacagcggcagauucacccccgagaucaccaagagacccaaggugagagaccaggagggcagaaucaacuacuacuggacccugcuggagcccggcgacaccaucaucuucgaggccaacggcaaccugaucgcccccugguacgccuucacccugagcagaggccugggcagcggcaucaucaccagcaacgcccccauggacgagugcgacgccaagugccagacccccaagggcgccaucaacagcagccugcccuuccagaacgugcaccccgugaccaucggcgagugccccaaguacgugagaagcgccaagcugagaauggugaccggccugagaaacauccccagcauccagagcagaggccuguucggcgccaucgccggcuucaucgagggcggcuggaccggcaugguggacggcugguacggcuaccaccaccagaacgagcagggcagcggcuacgccgccgaccaggagagcacccagaacgccaucaacggcaucaccaacaaggugaacagcgugaucgagaagaugaacacccaguucaccgccgugggcaaggaguucaacaagcuggagagaagaauggagaaccugaacaagaagguggacgacggcuuccuggacaucuggaccuacaacgccgagcugcuggugcugcuggagaacgagagaacccuggacuuccacgacagcaacgugaagagccuguacgagaaggugaagagccagcugaagaacaacgccaaggagaucggcaacggcugcuucgaguucuaccacaagugcaacaacgagugcauggagagcgugaagaacggcaccuacgacuaccccaaguacagcgaggagagcaagcugaacagagagaagaucgacggcgugaagcuggacagcaugggcguguacagaauccuggccaucuacagcaccguggccagcagccuggugcugcuggugagccugggcgccaucagcuucuggaugugcagcaacggcagccugcagugcagaaucugcaucuga

SEQ ID NO: 166429 - RNA, 1701 nt, Artificial Sequence
  derived and/or modified CDS sequence (opt4) from hemagglutinin__InfluenzaA__ADV76579
augaagaccaucaucgcccugagcuacauccugugccugguguucgcccagaagcugcccggcaacgacgacagcaccgccacccugugccugggccaccacgccgugcccaacggcaccaucgugaagaccaucaccaacgaccagaucgaggugaccaacgccaccgagcuggugcagagcagcagcaccggcgagaucugcgacagcccccaccagauccuggacggcgagaacugcacccugaucgacgcccugcugggcgacccccagugcgacggcuuccagaacaagaagugggaccuguucguggagagaagcaaggccuacagcaacugcuaccccuacgacgugcccgacuacgccagccugagaagccugguggccagcagcggcacccuggaguucaacaacgagagcuucaacuggaccggcgugacccagaacggcaccagcagcgccugcaucagaagaagcaacaacagcuucuucagcagacugaacuggcugacccaccugagauucaaguaccccgcccugaacgugaccaugcccaacaacgagcaguucgacaagcuguacaucuggggcgugcaccaccccggcaccgacaacgaccagaucuuccuguacgcccaggccagcggcagaaucaccgugagcaccaagagaagccagcagaccgugauccccaacaucggcagcagacccagagugagaaacauccccagcagaaucagcaucuacuggaccaucgugaagcccggcgacauccugcugaucaacagcaccggcaaccugaucgcccccagaggcuacuucaagaucagaagcggcaagagcagcaucaugagaagcgacgcccccaucggcaagugcaacagcgagugcaucacccccaacggcagcauccccaacgacaagcccuuccagaacgugaacagaaucaccuacggcgccugccccagauacgugaagcagaacacccugaagcuggccaccggcaugagaaacgugcccgagaagcagaccagaggcaucuucggcgccaucgccggcuucaucgagaacggcugggagggcaugguggacggcugguacggcuucagacaccagaacagcgagggcagaggccaggccgccgaccugaagagcacccaggccgccaucgaccagaucaacggcaagcugaacagacugaucggcaagaccaacgagaaguuccaccagaucgagaaggaguucagcgagguggagggcagaauccaggaccuggagaaguacguggaggacaccaagaucgaccuguggagcuacaacgccgagcugcugguggcccuggagaaccagcacaccaucgaccugaccgacagcgagaugaacaagcuguucgagaagaccaagaagcagcugagagagaacgccgaggacaugggcaacggcugcuucaagaucuaccacaagugcgacaacgccugcaucggcagcaucagaaacggcaccuacgaccacgacguguacagagacgaggcccugaacaacagauuccagaucaagggcguggagcugaagagcggcuacaaggacuggauccuguggaucagcuucgccaucagcugcuuccugcugugcguggcccugcugggcuucaucaugugggccugccagaagggcaacaucagaugcaacaucugcaucuga

SEQ ID NO: 166430 - RNA, 1701 nt, Artificial Sequence; identical to SEQ ID NO: 163648
  derived and/or modified CDS sequence (opt4) from hemagglutinin__InfluenzaA__ADV76587

SEQ ID NO: 166431 - RNA, 1701 nt, Artificial Sequence; identical to SEQ ID NO: 163648
  derived and/or modified CDS sequence (opt4) from hemagglutinin__InfluenzaA__ADV76598

SEQ ID NO: 166432 - RNA, 1701 nt, Artificial Sequence; identical to SEQ ID NO: 163471
  derived and/or modified CDS sequence (opt4) from hemagglutinin__InfluenzaA__ADV76609

SEQ ID NO: 166433 - RNA, 1701 nt, Artificial Sequence; identical to SEQ ID NO: 163648
  derived and/or modified CDS sequence (opt4) from hemagglutinin__InfluenzaA__ADV76620

SEQ ID NO: 166434 - RNA, 1701 nt, Artificial Sequence
  derived and/or modified CDS sequence (opt4) from hemagglutinin__InfluenzaA__ADV76631
augaagaccaucaucgcccugagcuacauccugugccugguguucgcccagaagcugcccggcaacgacaacagcaccgccacccugugccugggccaccacgccgugcccaacggcaccaucgugaagaccaucaccaacgaccagaucgaggugaccaacgccaccgagcuggugcagagcagcagcaccggcgagaucugcgacagcccccaccagauccuggacggcaagaacugcacccugaucgacgcccugcugggcgacccccagugcgacggcuuccagaacaagaagugggaccuguucguggagagaagcaaggccuacagcaacugcuaccccuacgacgugcccgacuacgccagccugagaagccugguggccagcagcggcacccuggaguucaacaacgagagcuucaacuggaccggcgugacccagaacggcaccagcagcgccugcaucagaagaagcaagaacagcuucuucagcagacugaacuggcugacccaccugaacuucaaguaccccgcccugaacgugaccaugcccaacaacgagcaguucgacaagcuguacaucuggggcgugcaccaccccggcaccgacaaggaccagaucuuccuguacgcccaggccagcggcagaaucaccgugagcaccaagagaagccagcagaccgugauccccaacaucggcagcagacccagagugagaaacauccccagcagaaucagcaucuacuggaccauggugaagcccggcgacauccugcugaucaacagcaccggcaaccugaucgcccccagaggcuacuucaagaucagaagcggcaagagcagcaucaugagaagcgacacccccaucggcaagugcaacagcgagugcaucacccccaacggcagcauccccaacgacaagcccuuccagaacgugaacagaaucaccuacggcgccugccccagauacgugaagcagaacacccugaagcuggccaccggcaugagaaacgugcccgagaagcagaccagaggcaucuucggcgccaucgccggcuucaucgagaacggcugggagggcaugguggacggcugguacggcuucagacaccagaacagcgagggcagaggccaggccgccgaccugaagagcacccaggccgccaucgaccagaucaacggcaagcugaacagacugaucggcaaggccaacgagaaguuccaccagaucgagaaggaguucagcgagguggagggcagaauccaggaccuggagaaguacguggaggacaccaagaucgaccuguggagcuacaacgccgagcugcugguggcccuggagaaccagcacaccaucgaccugaccgacagcgagaugaacaagcuguucgagaagaccaagaagcagcugagagagaacgccgaggacaugggcaacggcugcuucaagaucuaccacaagugcgacaacgccugcaucggcagcaucagaaacggcaccuacgaccacgacguguacagagacgaggcccugaacaacagauuccagaucaagggcguggagcugaagagcggcuacaaggacuggauccuguggaucagcuucgccaucagcugcuuccugcugugcguggcccugcugggcuucaucaugugggccugccagaagggcaacaucagaugcaacaucugcaucuga

SEQ ID NO: 166435 - RNA, 1701 nt, Artificial Sequence; identical to SEQ ID NO: 165652
  derived and/or modified CDS sequence (opt4) from hemagglutinin__InfluenzaA__ADV76642

SEQ ID NO: 166436 - RNA, 1701 nt, Artificial Sequence; identical to SEQ ID NO: 165656
  derived and/or modified CDS sequence (opt4) from hemagglutinin__InfluenzaA__ADV76664

SEQ ID NO: 166437 - RNA, 1701 nt, Artificial Sequence
  derived and/or modified CDS sequence (opt4) from hemagglutinin__InfluenzaA__ADV76673
augaagaccaucaucgcccugagcuacaucuucugccuggcccugggccaggaccugcccggcaacgacaacagcaccgccacccugugccugggccaccacgccgugcccaacggcacccuggugaagaccaucaccgacgaccagaucgaggugaccaacgccaccgagcuggugcagagcagcagcaccggcaagaucugcaacaacccccacagaauccuggacggcaucgacugcacccugaucgacgcccugcugggcgacccccacugcgacguguuccagaacgagaccugggaccuguucguggagagaagcaaggccuucagcaacugcuaccccuacgacgugcccgacuacgccagccugagaagccugguggccagcagcggcacccuggaguucaucaccgagggcuucaccuggaccggcgugacccagaacggcggcagcaacgccugcaagagaggccccggcagcggcuucuucagcagacugaacuggcugaccaagagcggcagcaccuaccccgugcugaacgugaccaugcccaacaacgacaacuucgacaagcuguacaucuggggcgugcaccaccccagcaccaaccaggagcagaccagccuguacgugcaggccagcggcagagugaccgugagcaccagaagaagccagcagaccaucauccccaacaucgagagcagacccugggugagaggccugagcagcagaaucagcaucuacuggaccaucgugaaccccggcgacgugcuggugaucaacagcaacggcaaccugaucgcccccagaggcuacuucaagaugagaaccggcaagagcagcaucaugagaagcgacgcccccaucgacaccugcaucagcgagugcaucacccccaacggcagcauccccaacgacaagcccuuccagaacgugaacaagaucaccuacggcgccugccccaaguacgugaagcagaacacccugaagcuggccaccggcaugagaaacgugcccgagaagcagaccagaggccuguucggcgccaaggccggcuucaucgagaacggcugggagggcaugaucgacggcugguacggcuucagacaccagaacagcgagggcaccggccaggccgccgaccugaagagcacccaggccgccaucgaccagaucaacggcaagcugaacagagugaucgagaagaccaacgagaaguuccaccagaucgagaaggaguucagcgagguggagggcagaauccaggaccuggagaaguacguggaggacaccaagaucgaccuguggagcuacaacgccgagcugcugguggcccuggagaaccagcacaccaucgaccugaccgacagcgagaugaacaagcuguucgagaagaccagaagacagcugagagagaacgccgaggacaugggcaacggcugcuucaagaucuaccacaagugcgacaacgccugcaucgagagcaucagaaacggcaccuacgaccacgacguguacagagacgaggcccugaacaacagauuccagaucaagggcguggagcugaagagcggcuacaaggacuggauccuguggaucagcuucgccaucagcugcuuccugcugugcguggugcugcugggcuucaucaugugggccugccagagaggcaacaucagaugcaacaucugcaucuga

SEQ ID NO: 166438 - RNA, 1701 nt, Artificial Sequence
  derived and/or modified CDS sequence (opt4) from hemagglutinin__InfluenzaA__ADV76682
augaagaccaucaucgcccugagcuacauccugugccugguguucgcccagaagcugcccggcaacgacaacagcaccgccacccugugccugggccaccacgccgugcccaacggcaccaucgugaagaccaucaccaacgaccagaucgaggugaccaacgccaccgagcuggugcagagcagcagcaccggcgagaucugcgacagcccccaccagauccuggacggcgagaacugcacccugaucgacgcccugcugggcgacccccagugcgacggcuuccagaacaagaagugggaccuguucguggagagaagcaaggccuacagcaacugcuaccccuacgacgugcccgacuacgccagccugagaagccugguggccagcagcggcacccuggaguucaacaacgagagcuucaacuggaccggcgugacccagaacggcaccagcagcgccugcaucagaagaagcaacaacagcuucuucagcagacugaacuggcugacccaccugaacuucaaguaccccgcccugaacgugaccaugcccaacaacgagcaguucgacaagcuguacaucuggggcgugcaccaccccggcaccgacaaggaccagaucuuccuguacgcccaggccagcggcagaaucaccgugagcaccaagagaagccagcaggccgugauccccaacaucggcagcagacccagagugagaaacauccccagcagaaucagcaucuacuggaccaucgugaagcccggcgacauccugcugaucaacagcaccggcaaccugaucgcccccagaggcuacuucaagaucagaagcggcgagagcagcaucaugagaagcgacgcccccaucggcaagugcaacagcgagugcaucacccccaacggcagcauccccaacgacaagcccuuccagaacgugaacagaaucaccuacggcgccugccccagauacgugaagcagaacacccugaagcuggccaccggcaugagaaacgugcccgagaagcagaccagaggcaucuucggcgccaucgccggcuucaucgagaacggcugggagggcaugguggacggcugguacggcuucagacaccagaacagcgagggcagaggccaggccgccgaccugaagagcacccaggccgccaucgaccagaucaacggcaagcugaacagacugaucggcaagaccaacgagaaguuccaccagaucgagaaggaguucagcgagguggagggcagaauccaggaccuggagaaguacguggaggacaccaagaucgaccuguggagcuacaacgccgagcugcugguggcccuggagaaccagcacaccaucgaccugaccgacagcgagaugaacaagcuguucgagaagaccaagaagcagcugagagagaacgccgaggacaugggcaacggcugcuucaagaucuaccacaagugcgacaacgccugcaucggcagcaucagaaacggcaccuacgaccacgacguguacagagacgaggcccugaacaacagauuccagaucaagggcguggagcugaagagcggcuacaaggacuggauccuguggaucagcuucgccaucagcugcuuccugcugugcguggcccugcugggcuucaucaugugggccugccagaagggcaacaucagaugcaacaucugcaucuga

SEQ ID NO: 166439 - RNA, 1701 nt, Artificial Sequence; identical to SEQ ID NO: 163673
  derived and/or modified CDS sequence (opt4) from hemagglutinin__InfluenzaA__ADV76694

SEQ ID NO: 166440 - RNA, 1701 nt, Artificial Sequence; identical to SEQ ID NO: 163471
  derived and/or modified CDS sequence (opt4) from hemagglutinin__InfluenzaA__ADV76705

SEQ ID NO: 166441 - RNA, 1701 nt, Artificial Sequence; identical to SEQ ID NO: 163673
  derived and/or modified CDS sequence (opt4) from hemagglutinin__InfluenzaA__ADV76716

SEQ ID NO: 166442 - RNA, 1701 nt, Artificial Sequence
  derived and/or modified CDS sequence (opt4) from hemagglutinin__InfluenzaA__ADV76727
augaagaccaucaucgcccugagcuacauccugugccugguguucgcccagaagcugcccggcaacgacaacagcaccgccacccugugccugggccaccacgccgugcccaacggcaccaucgugaagaccaucaccaacgaccagaucgaggugaccaacgccaccgagcuggugcagagcagcagcaccggcgagaucugcgacagcccccaccagauccuggacggcaagaacugcacccugaucgacgcccugcugggcgacccccagugcgacggcuuccagaacaagaagugggaccuguucguggagagaagcaaggccuacagcaacugcuaccccuacgacgugcccgacuacgccagccugagaagccugguggccagcagcggcacccuggaguucaacaacgagagcuucaacuggaccggcgugacccagaacggcaagagcagcgccugcaucagaagaagcaagaacagcuucuucagcagacugaacuggcugacccaccugaacuucaaguaccccgcccugaacgugaccaugcccaacaacgagcaguucgacaagcuguacaucuggggcgugcaccaccccggcaccgacaaggaccagaucuuccuguacgcccaggccagcggcagaaucaccgugagcaccaagagaagccagcagaccgugauccccaacaucggcagcagacccagagugagaaacauccccagcagaaucagcaucuacuggaccaucgugaagcccggcgacauccugcugaucaacagcaccggcaaccugaucgcccccagaggcuacuucaagaucagaagcggcaagagcagcaucaugagaagcgacgcccccaucggcaagugcaacagcgagugcaucacccccaacggcagcauccccaacgacaagcccuuccagaacgugaacagaaucaccuacggcgccugccccagauacgugaagcagaacacccugaagcuggccaccggcaugagaaacgugcccgagaagcagaccagaggcaucuucggcgccaucgccggcuucaucgagaacggcugggagggcaugguggacggcugguacggcuucagacaccagaacagcgagggcagaggccaggccgccgaccugaagagcacccaggccgccaucgaccagaucaacggcaagcugaacagacugaucggcaagaccaacgagaaguuccaccagaucgagaaggaguucagcgagguggagggcagaauccaggaccuggagaaguacguggaggacaccaagaucgaccuguggagcuacaacgccgagcugcugguggcccuggagaaccagcacaccaucgaccugaccgacagcgagaugaacaagcuguucgagaagaccaagaagcagcugagagagaacgccgaggacaugggcaacggcugcuucaagaucuaccacaagugcgacaacgccugcaucggcagcaucagaaacggcaccuacgaccacgacguguacagagacgaggcccugaacaacagauuccagaucaagggcguggagcugaagagcggcuacaaggacuggauccuguggaucagcuucgccaucagcugcuuccugcugugcguggcccugcugggcuucaucaugugggccugccagaagggcaacaucagaugcaacaucugcaucuga

SEQ ID NO: 166443 - RNA, 1701 nt, Artificial Sequence
  derived and/or modified CDS sequence (opt4) from hemagglutinin__InfluenzaA__ADV91009
augaaggccauccuggccgugcugcuguacaccuucgccaccgccaacgccgacacccugugcaucggcuaccacgccaacaacagcaccgacaccguggacaccgugcuggagaagaacgugaccgugacccacagcgugaaccugcuggaggacaagcacaacggcaagcugugcaagcugagaggcaucgccccccugcaccugggcaagugcaacaucgccggcuggauccugggcaaccccgagugcgagagccugagcaccgccagcagcuggagcuacaucguggagacccccagcagcgacaacggcaccugcuaccccggcgacuucaucgacuacgaggagcugagagagcagcugagcagcgugagcagcuucgagagauucgagaucuuccccaagaccagcagcuggcccaaccacgacagcaacaagggcgugaccgccgccugcccccacgccggcgccaagagcuucuacaagaaccugaucuggcuggugaagaagggcaacagcuaccccaagcugagcaagagcuacaucaacgacaagggcaagaaggugcuggugcuguggggcauccaccaccccagcaccagcgccgaccagcagagccuguaccagaacgccgacgccuacguguucgugggcaccagcagauacagcaagaaguucaagcccgagaucgccaucagacccaaggugagagaccaggagggcagaaugaacuacuacuggacccugguggagcccggcgacaagaucaccuucgaggccaccggcaaccugguggugcccagauacgccuucgccauggagagaaacgccggcagcggcaucaucaucagcgacacccccgugcacgacugcaacaccaccugccagacccccaagggcgccaucaacaccagccugcccuuccagaacauccaccccaucaccaucggcaagugccccaaguacguggagagcaccaagcugagacuggccaccggccugagaaacgugcccagcauccagagcagaggccuguucggcgccaucgccggcuucaucgagggcggcuggaccggcaugguggacggcugguacggcuaccaccaccagaacgagcagggcagcggcuacgccgccgaccugaagagcacccagaacgccaucgacaagaucaccaacaaggugaacagcgugaucgagaagaugaacacccaguucaccgccgugggcaaggaguucaaccaccuggagaagagaaucgagaaccugaacaagaagguggacgacggcuuccuggacaucuggaccuacaacgccgagcugcuggugcugcuggagaacgagagaacccuggacuaccacgacagcaacgugaagaaccuguacgagaaggugagaagccagcugaagaacaacgccaaggagaucggcaacggcugcuucgaguucuaccacaagugcgacaacaccugcauggagagcgugaagaacggcaccuacgacuaccccaaguacagcgaggaggccaagcugaacagagaggagaucgacggcgugaagcuggagagcaccagaaucuaccagauccuggccaucuacagcaccguggccagcagccuggugcugguggugagccugggcgccaucagcuucuggaugugcagcaacggcagccugcagugcagaaucugcaucuga

SEQ ID NO: 166444 - RNA, 1701 nt, Artificial Sequence
  derived and/or modified CDS sequence (opt4) from hemagglutinin__InfluenzaA__ADV91010
augaaggccauccugguggugcugcuguacaccuucgccaccgccaacgccgacacccugugcaucggcuaccacgccaacaacagcaccgacaccguggacaccgugcuggagaagaacgugaccgugacccacagcgugaaccugcuggaggacaagcacaacggcaagcugugcaagcugagaggcguggccccccugcaccugggcaagugcaacaucgccggcuggauccugggcaaccccgagugcgagagccugagcaccgccagcagcuggagcuacaucguggagaccagcagcagcgacaacggcaccugcuaccccggcgacuucaccgacuacgaggagcugagagagcagcugagcagcgugagcagcuucgagagauucgagaucuuccccaagaccagcagcuggcccaaccacgacagcaacaagggcgugaccaccgccugcccccacgccggcgccaagagcuucuacaagaaccugaucuggcuggugaagaagggcaacagcuaccccaagcugagcaagagcuacaucaacgacaagggcaaggaggugcuggugcuguggggcauccaccacccccccaccagcgccgaccagcagagccuguaccagaacgccgacgccuacguguucgugggcaccagcagauacagcaagaaguucaagcccgagaucgccaucagacccaaggugagagaccaggagggcagaaugaacuacuacuggacccugguggagcccggcgacaagaucaccuucgaggccaccggcaaccugguggugcccagauacgccuucgccauggagagaaacgccggcagcggcaucaucaucagcgacacccccgugcacgacugcaacaccaccugccagacccccaagggcgccaucaacaccagccugcccuuccagaacauccaccccaucaccaucggcaagugccccaaguacgugaagagcaccaagcugagacuggccaccggccugagaaacgugcccagcauccagagcagaggccuguucggcgccaucgccggcuucaucgagggcggcuggaccggcaugguggacggcugguacggcuaccaccaccagaacgagcagggcagcggcuacgccgccgaccugaagagcacccagaacgccaucgacgagaucaccaacaaggugaacagcgugaucgagaagaugaacacccaguucaccgccgugggcaaggaguucaaccaccuggagaagagaaucgagaaccugaacaagaagguggacgacggcuuccuggacaucuggaccuacaacgccgagcugcuggugcugcuggagaacgagagaacccuggacuaccacgacagcaacgugaagaaccuguacgagaaggugagaagccagcugaagaacaacgccaaggagaucggcaacggcugcuucgaguucuaccacaagugcgacaacaccugcauggagagcgugaagaacggcaccuacgacuaccccaaguacagcgaggaggccaagcugaacagagaggagaucgacggcgugaagcuggagagcaccagaaucuaccagauccuggccaucuacagcaccguggccagcagccuggugcugguggugagccugggcgccaucagcuucuggaugugcagcaacggcagccugcagugcagaaucugcaucuga

SEQ ID NO: 166445 - RNA, 1701 nt, Artificial Sequence
  derived and/or modified CDS sequence (opt4) from hemagglutinin__InfluenzaA__ADW01407
auggaggccaagcuguucgugcuguucugcgccuucaccgcccugaaggccgacaccaucugcgugggcuaccacgccaacaacagcaccgacaccguggacaccauccuggagaagaacgugaccgugacccacagcgugaaccugcuggagaacagccacaacggcaagcugugcagccugaacggcaagaucccccugcagcugggcaacugcaacguggccggcuggauccugggcaaccccaagugcgaccugcugcugaccgccaacagcuggagcuacaucaucgagaccagcaacagcaagaacggcgccugcuaccccggcgaguucgccgacuacgaggagcugaaggagcagcugagcaccgugagcagcuucgagagauucgagaucuuccccaaggccaccagcuggcccaaccacgacaccaccagaggcaccaccguggccugcagccacagcggcgccaacagcuucuacagaaaccugcuguggaucgugaagaagggcaacagcuaccccaagcugagcaagagcuacaccaacaacaagggcaaggaggugcuggugaucuggggcgugcaccacccccccaccgacagcgaccagcagacccuguaccagaacaaccacaccuacgugagcgugggcagcagcaaguacuacaagagacugacccccgagaucguggccagacccaaggugagagagcaggccggcagaaugaacuacuacuggacccugcuggaccagggcgacaccaucaccuucgaggccaccggcaaccugaucgcccccuggcacgccuucgcccugaagaagggcagcagcagcggcaucaugagaagcgacgcccaggugcacaacugcaccaccaagugccagaccccccacggcgcccugaagggcaaccugcccuuccagaacgugcaccccgugaccaucggcgagugccccaaguacgugaagagcacccagcugagaauggccaccggccugagaaacauccccagcauccagagcagaggccuguucggcgccaucgccggcuucaucgagggcggcuggaccggcaugguggacggcugguacggcuaccaccacagaaacgagcagggcagcggcuacgccgccgaccagaagagcacccagaucgccaucgacggcaucagcaacaaggugaacagcgugaucgagaagaugaacauccaguucaccagcgugggcaaggaguucaacagccuggagaagagaauggagaaccugaacaagaagguggacgacggcuuccuggacguguggaccuacaacgccgagcugcugauccugcuggagaacgagagaacccuggacuuccacgaccugaacgugaagaaccuguacgagaaggugaagagccagcugagaaacaacgccaaggagaucggcaacggcugcuucgaguucuaccacaagugcgacaacgagugcauggagagcgugaagaacggcaccuacaacuaccccaaguacagcgaggagagcaagcugaacagagaggagaucgacggcgugaagcuggagagcaugggcauccaccagauccuggccaucuacagcaccguggccagcagccuggugcugcuggugagccugggcgccaucagcuucuggaugugcagcaacggcagccugcagugcagagugugcaucuga

SEQ ID NO: 166446 - RNA, 1698 nt, Artificial Sequence; identical to SEQ ID NO: 163191
  derived and/or modified CDS sequence (opt4) from hemagglutinin__InfluenzaA__ADW09101

SEQ ID NO: 166447 - RNA, 1698 nt, Artificial Sequence
  derived and/or modified CDS sequence (opt4) from hemagglutinin__InfluenzaA__ADW09111
augaaggugaagcugcuggugcugcugugcaccuucaccgccaccuacgccgacaccaucugcaucggcuaccacgccaacaacagcaccgacaccguggacaccgugcuggagaagaacgugaccgugacccacagcgugaaccugcuggagaacagccacaacggcaagcugugccugcugaagggcaucgccccccugcagcugggcaacugcagcguggccggcuggauccugggcaaccccgagugcgagcugcugaucagcaaggagagcuggagcuacaucguggagaagcccaaccccgagaacggcaccugcuaccccggccacuucgccgacuacgaggagcugagagagcagcugagcagcgugagcagcuucgagagauucgagaucuuccccaaggagagcagcuggcccaaccacaccgugaccggcgugagcgccagcugcagccacaacggcgagagcagcuucuacagaaaccugcuguggcugaccggcaagaacggccuguaccccaaccugagcaagagcuacgccaacaacaaggagaaggaggugcuggugcuguggggcgugcaccacccccccaacaucguggaccagaagacccuguacagaaccgagaacgccuacgugagcguggugagcagccacuacagcagaaaguucacccccgagaucgccaagagacccaaggugagagaccaggagggcagaaucaacuacuacuggacccugcuggagcccggcgacaccaucaucuucgaggccaacggcaaccugaucgcccccagauacgccuucgcccugagcagaggcuucggcagcggcaucaucaacagcaacgcccccauggacaagugcgacgccaagugccagacccccagaggcgccaucaacagcagccugcccuuccagaacgugcaccccgugaccaucggcgagugccccaaguacgugagaagcgccaagcugagaauggugaccggccugagaaacauccccagcauccagagcagaggccuguucggcgccaucgccggcuucaucgagggcggcuggaccggcaugguggacggcugguacggcuaccaccaccagaacgaccagggcagcggcuacgccgccgaccagaagagcacccagaacgccaucaacggcaucaccaacaaggugaacagcgugaucgagaagaugaacacccaguucaccgccgugggcaaggaguucaacaagcuggagagaagaauggagaaccugaacaagaagguggacgacggcuucaucgacaucuggaccuacaacgccgagcugcuggugcugcuggagaacgagagaacccuggacuuccacgacagcaacgugaagaaccuguacgagaaggugaagagccagcugaagaacaacgccaaggagaucggcaacggcugcuucgaguucuaccacaagugcaacgacgagugcauggagagcgugaagaacggcaccuacgacuaccccaaguacagcgaggagagcaagcugaacagagagaagaucgacggcgugaagcuggagagcaugggcguguaccagauccuggccaucuacagcaccguggccagcagccuggugcugcuggugagccugggcgccaucagcuucuggaugugcagcaacggcagccugcagugcagaaucugcaucuga

SEQ ID NO: 166448 - RNA, 1698 nt, Artificial Sequence
  derived and/or modified CDS sequence (opt4) from hemagglutinin__InfluenzaA__ADW09120
augaaggugaagcugcuggugcugcugugcaccuucaccgccaccuacgccgacaccaucugcaucggcuaccacgccaacaacagcaccgacaccguggacaccgugcuggagaagaacgugaccgugacccacagcgugaaccugcuggagaacagccacaacggcaagcugugccugcugaagggcaucgccccccugcagcugggcaacugcagcguggccggcuggauccugggcaaccccgagugcgagcugcugaucagcaaggagagcuggagcuacaucguggagaagcccaaccccgagaacggcaccugcuaccccggccacuucgccgacuacgaggagcugagagagcagcugagcagcgugagcagcuucgagagauucgagaucuuccccaaggagagcagcuggcccaaccacaccgugaccggcgugagcgccagcugcagccacaacggcgagagcagcuucuacagaaaccugcuguggcugaccgugaagaacggccuguaccccaaccugagcaagagcuacgccaacaacaaggagaaggaggugcuggugcuguggggcgugcaccacccccccaacaucguggaccagaagacccuguaccacaccgagaacgccuacgugagcguggugagcagccacuacagcagaaaguucacccccgagaucgccaagagacccaaggugagagaccaggagggcagaaucaacuacuacuggacccugcuggagcccggcgacaccaucaucuucgaggccaacggcaaccugaucgcccccagauacgccuucgcccugagcaagggcuucggcagcggcaucaucaacagcaacgcccccauggacaagugcgacgccaagugccagacccccagaggcgccaucaacagcagccugcccuuccagaacgugcaccccgugaccaucggcgagugccccaaguacgugagaagcgccaagcugagaauggugaccggccugagaaacauccccagcauccagagcagaggccuguucggcgccaucgccggcuucaucgagggcggcuggaccggcaugguggacggcugguacggcuaccaccaccagaacgagcagggcagcggcuacgccgccgaccagaagagcacccagaacgccaucaacggcaucaccaacaaggugaacagcgugaucgagaagaugaacacccaguucaccgccgugggcaaggaguucaacaagcuggagagaagaauggagaaccugaacaagaagguggacgacggcuucaucgacaucuggaccuacaacgccgagcugcuggugcugcuggagaacgagagaacccuggacuuccacgacagcaacgugaagaaccuguacgagaaggugaagagccagcugaagaacaacgccaaggagaucggcaacggcugcuucgaguucuaccacaagugcaacgacgagugcauggagagcgugaagaacggcaccuacgacuaccccaaguacagcgaggagagcaagcugaacagagagaagaucgacggcgugaagcuggagagcaugggcguguaccagauccuggccaucuacagcaccguggccagcagccuggugcugcuggugagccugggcgccaucagcuucuggaugugcagcaacggcagccugcagugcagaaucugcaucuga

SEQ ID NO: 166449 - RNA, 1698 nt, Artificial Sequence; identical to SEQ ID NO: 163676
  derived and/or modified CDS sequence (opt4) from hemagglutinin__InfluenzaA__ADW09131

SEQ ID NO: 166450 - RNA, 1698 nt, Artificial Sequence
  derived and/or modified CDS sequence (opt4) from hemagglutinin__InfluenzaA__ADW09153
augaaggugaagcugcuggugcugcugugcaccuucaccgccaccuacgccgacaccaucugcaucggcuaccacgccaacaacagcaccgacaccguggacaccgugcuggagaagaacgugaccgugacccacagcgugaaccugcuggagaacagccacaacggcaagcugugccugcugaagggcaucgccccccugcagcugggcaacugcagcguggccggcuggauccugggcaaccccgagugcgagcugcugaucagcaaggagagcuggagcuacaucguggagaagcccaaccccgagaacggcaccugcuaccccggccacuucgccgacuacgaggagcugagagagcagcugagcagcgugagcagcuucgagagauucgagaucuuccccaaggagagcagcuggcccaaccacaccgugaccggcgugagcgccagcugcagccacaacggcgagagcagcuucuacagaaaccugcuguggcugaccgugaagaacggccuguaccccaaccugagcaagagcuacgccaacaacaaggagaaggaggugcuggugcuguggggcgugcaccacccccccaacaucguggaccagaagacccuguacagaaccgagaacgccuacgugagcguggugagcagccacuacagcagaaaguucacccccgagaucgccaagagacccaaggugagagaccaggagggcagaaucaacuacuacuggacccugcuggagcccggcgacaccaucaucuucgaggccaacggcaaccugaucgcccccagauacgccuucgcccugagcagaggcuucggcagcggcaucaucaacagcaacgcccccauggacaagugcgacgccaagugccagacccccagaggcgccaucaacagcagccugcccuuccagaacgugcaccccgugaccaucggcgagugccccaaguacgugagaagcgccaagcugagaauggugaccggccugagaaacauccccagcauccagagcagaggccuguucggcgccaucgccggcuucaucgagggcggcuggaccggcaugguggacggcugguacggcuaccaccaccagaacgagcagggcagcggcuacgccgccgaccagaagagcacccaggacgccaucaacggcaucaccaacaaggugaacagcgugaucgagaagaugaacacccaguucaccgccgugggcaaggaguucaacaagcuggagagaagaauggagaaccugaacaagaagguggacgacggcuucaucgacaucuggaccuacaacgccgagcugcuggugcugcuggagaacgagagaacccuggacuuccacgacagcaacgugaagaaccuguacgagaaggugaagagccagcugaagaacaacgccaaggagaucggcaacggcugcuucgaguucuaccacaagugcaacgacgagugcauggagagcgugaagaacggcaccuacgacuaccccaaguacagcgaggagagcaagcugaacagagagaagaucgacggcgugaagcuggagagcaugggcguguaccagauccuggccaucuacagcaccguggccagcagccuggugcugcuggugagccugggcgccaucagcuucuggaugugcagcaacggcagccugcagugcagaaucugcaucuga

SEQ ID NO: 166451 - RNA, 1698 nt, Artificial Sequence; identical to SEQ ID NO: 163676
  derived and/or modified CDS sequence (opt4) from hemagglutinin__InfluenzaA__ADW09164

SEQ ID NO: 166452 - RNA, 1698 nt, Artificial Sequence
  derived and/or modified CDS sequence (opt4) from hemagglutinin__InfluenzaA__ADW09186
augaaggugaagcugcuggugcugcugugcaccuucaccgccaccuacgccgacaccaucugcaucggcuaccacgccaacaacagcaccgacaccguggacaccgugcuggagaagaacgugaccgugacccacagcgugaaccugcuggagaacagccacaacggcaagcugugccugcugaagggcaucgccccccugcagcugggcaacugcagcguggccggcuggauccugggcaaccccgagugcgagcugcugaucagcaaggagagcuggagcuacaucguggagaagcccaaccccgagaacggcaccugcuaccccggccacuucgccgacuacgaggagcugagagagcagcugagcagcgugagcagcuucgagagauucgagaucuuccccaaggagagcagcuggcccaaccacaccgugaccggcgugagcgccagcugcagccacaacggcgagagcagcuucuacagaaaccugcuguggcugaccggcaagaacggccuguaccccaaccugagcaagagcuacgccaacaacaaggagaaggaggugcuggugcuguggggcgugcaccacccccccaacaucguggaccagaagacccuguacagaaccgagaacgccuacgugagcguggugagcagccacuacagcagaaaguucacccccgagaucgccaagagacccaaggugagagaccaggagggcagaaucaacuacuacuggacccugcuggagcccggcgacaccaucaucuucgaggccaacggcaaccugaucgcccccagauacgccuucgcccugagcagaggcuucggcagcggcaucaucaacagcaacgcccccauggacaagugcgacgccaagugccagaccccccagggcgccaucaacagcagccugcccuuccagaacgugcaccccgugaccaucggcgagugccccaaguacgugagaagcgccaagcugagaauggugaccggccugagaaacacccccagcauccagagcagaggccuguucggcgccaucgccggcuucaucgagggcggcuggaccggcaugguggacggcugguacggcuaccaccaccagaacgagcagggcagcggcuacgccgccgaccagaagagcacccagaacgccaucaacggcaucaccaacaaggugaacagcgugaucgagaagaugaacacccaguucaccgccgugggcaaggaguucaacaagcuggagagaagaauggagaaccugaacaagaagguggacgacggcuucaucgacaucuggaccuacaacgccgagcugcuggugcugcuggagaacgagagaacccuggacuuccacgacagcaacgugaagaaccuguacgagaaggugaagagccagcugaagaacaacgccaaggagaucggcaacggcugcuucgaguucuaccacaagugcaacgacgagugcauggagagcgugaagaacggcaccuacgacuaccccaaguacagcgaggagagcaagcugaacagagagaagaucgacggcgugaagcuggagagcaugggcguguaccagauccuggccaucuacagcaccguggccagcagccuggugcugcuggugagccugggcgccaucagcuucuggaugugcagcaacggcagccugcagugcagaaucugcaucuga

SEQ ID NO: 166453 - RNA, 1698 nt, Artificial Sequence; identical to SEQ ID NO: 163191
  derived and/or modified CDS sequence (opt4) from hemagglutinin__InfluenzaA__ADW09197

SEQ ID NO: 166454 - RNA, 1698 nt, Artificial Sequence; identical to SEQ ID NO: 163676
  derived and/or modified CDS sequence (opt4) from hemagglutinin__InfluenzaA__ADW09208

SEQ ID NO: 166455 - RNA, 1698 nt, Artificial Sequence; identical to SEQ ID NO: 163676
  derived and/or modified CDS sequence (opt4) from hemagglutinin__InfluenzaA__ADW09219

SEQ ID NO: 166456 - RNA, 1698 nt, Artificial Sequence; identical to SEQ ID NO: 163191
  derived and/or modified CDS sequence (opt4) from hemagglutinin__InfluenzaA__ADW09230

SEQ ID NO: 166457 - RNA, 1698 nt, Artificial Sequence
  derived and/or modified CDS sequence (opt4) from hemagglutinin__InfluenzaA__ADW09241
augaaggugaagcugcuggugcugcugugcaccuucaccgccaccuacgccgacaccaucugcaucggcuaccacgccaacaacagcaccgacaccguggacaccgugcuggagaagaacgugaccgugacccacagcgugaaccugcuggagaacagccacaacggcaagcugugccugcugaagggcaucgccccccugcagcugggcaacugcagcguggccggcuggauccugggcaaccccgagugcgagcugcugaucagcaaggagagcuggagcuacaucguggagaagcccaaccccgagaacggcaccugcuaccccggccacuucgccgacuacgaggagaugagagagcagcugagcagcgugagcagcuucgagagauucgagaucuuccccaaggagagcagcuggcccaaccacaccgugaccggcgugagcgccagcugcagccacaacggcgagagcagcuucuacagaaaccugcuguggcugaccgugaagaacggccuguaccccaaccugagcaagagcuacgccaacaacaaggagaaggaggugcuggugcuguggggcgugcaccacccccccaacaucguggaccagaagacccuguacagaaccgagaacgccuacgugagcguggugagcagccacuacagcagaaaguucacccccgagaucgccaagagacccaaggugagagaccaggagggcagaaucaacuacuacuggacccugcuggagcccggcgacaccaucaucuucgaggccaacggcaaccugaucgcccccagauacgccuucgcccugagcagaggcuucggcagcggcaucaucaacagcaacgcccccauggacaagugcgacgccaagugccagacccccagaggcgccaucaacagcagccugcccuuccagaacgugcaccccgugaccaucggcgagugccccaaguacgugagaagcgccaagcugagaauggugaccggccugagaaacauccccagcauccagagcagaggccuguucggcgccaucgccggcuucaucgagggcggcuggaccggcaugguggacggcugguacggcuaccaccaccagaacgagcagggcagcggcuacgccgccgaccagaagagcacccagaacgccaucaacggcaucaccaacaaggugaacagcgugaucgagaagaugaacacccaguucaccgccgugggcaaggaguucaacaagcuggagagaagaauggagaaccugaacaagaagguggacgacggcuucaucgacaucuggaccuacaacgccgagcugcuggugcugcuggagaacgagagaacccuggacuuccacgacagcaacgugaagaaccuguacgagaaggugaagagccagcugaagaacaacgccaaggagaucggcaacggcugcuucgaguucuaccacaagugcaacgacgagugcauggagagcgugaagaacggcaccuacgacuaccccaaguacagcgaggagagcaagcugaacagagagaagaucgacggcgugaagcuggagagcaugggcguguaccagauccuggccaucuacagcaccguggccagcagccuggugcugcuggugagccugggcgccaucagcuucuggaugugcagcaacggcagccugcagugcagaaucugcaucuga

SEQ ID NO: 166458 - RNA, 1698 nt, Artificial Sequence; identical to SEQ ID NO: 163676
  derived and/or modified CDS sequence (opt4) from hemagglutinin__InfluenzaA__ADW09252

SEQ ID NO: 166459 - RNA, 1698 nt, Artificial Sequence
  derived and/or modified CDS sequence (opt4) from hemagglutinin__InfluenzaA__ADW09274
augaaggugaagcugcuggugcugcugugcaccuucaccgccaccuacgccgacaccaucugcaucggcuaccacgccaacaacagcaccgacaccguggacaccgugcuggagaagaacgugaccgugacccacagcgugaaccugcuggagaacagccacaacggcaagcugugccugcugaagggcaucgccccccugcagcugggcaacugcagcguggccggcuggauccugggcaaccccgagugcgagcugcugaucagcaaggagagcuggagcuacaucguggagaagcccaaccccgagaacggcaccugcuaccccggccacuucgccgacuacgaggagcugagagagcagcugagcagcgugagcagcuucgagagauucgagaucuuccccaaggagagcagcuggcccaaccacaccgugaccggcgugagcgccagcugcagccacaacggcgagagcagcuucuacagaaaccugcuguggcugaccgugaagaacggccuguaccccaaccugagcaagcccuacgccaacaacaaggagaaggaggugcuggugcuguggggcgugcaccacccccccaacaucguggaccagaagacccuguacagaaccgagaacgccuacgugagcguggugagcagccacuacagcagaaaguucacccccgagaucgccaagagacccaaggugagagaccaggagggcagaaucaacuacuacuggacccugcuggagcccggcgacaccaucaucuucgaggccaacggcaaccugaucgcccccagauacgccuucgcccugagcagaggcuucggcagcggcaucaucaacagcaacgcccccauggacaagugcgacgccaagugccagacccccagaggcgccaucaacagcagccugcccuuccagaacgugcaccccgugaccaucggcgagugccccaaguacgugagaagcgccaagcugagaauggugaccggccugagaaacauccccagcauccagagcagaggccuguucggcgccaucgccggcuucaucgagggcggcuggaccggcaugguggacggcugguacggcuaccaccaccagaacgagcagggcagcggcuacgccgccgaccagaagagcacccagaacgccaucaacggcaucaccaacaaggugaacagcgugaucgagaagaugaacacccaguucaccgccgugggcaaggaguucaacaagcuggagagaagaauggagaaccugaacaagaagguggacgacggcuucaucgacaucuggaccuacaacgccgagcugcuggugcugcuggagaacgagagaacccuggacuuccacgacagcaacgugaagaaccuguacgagaaggugaagagccagcugaagaacaacgccaaggagaucggcaacggcugcuucgaguucuaccacaagugcaacgacgagugcauggagagcgugaagaacggcaccuacgacuaccccaaguacagcgaggagagcaagcugaacagagagaagaucgacggcgugaagcuggagagcaugggcguguaccagauccuggccaucuacagcaccguggccagcagccuggugcugcuggugagccugggcgccaucagcuucuggaugugcagcaacggcagccugcagugcagaaucugcaucuga

SEQ ID NO: 166460 - RNA, 1698 nt, Artificial Sequence
  derived and/or modified CDS sequence (opt4) from hemagglutinin__InfluenzaA__ADW09285
augaaggugaagcugcuggugcugcugugcaccuucaccgccaccuacgccgacaccaucugcaucggcuaccacgccaacaacagcaccgacaccguggacaccgugcuggagaagaacgugaccgugacccacagcgugaaccugcuggagaacagccacaacggcaagcugugccugcugaagggcaucgccccccugcagcugggcaacugcagcguggccggcuggauccugggcaaccccgagugcgagcugcugaucagcaaggagagcuggagcuacaucguggagaagcccaaccccgagaacggcaccugcuaccccggccacuucgccgacuacgaggagcugagagagcagcugagcagcgugagcagcuucgagagauucgagaucuuccccaaggagagcagcuggcccaaccacaccgugaccggcgugagcgccagcugcagccacaacggcgagagcagcuucuacagaaaccugcuguggcugaccggcaagaacggccuguaccccaaccugagcaagagcuacgccaacaacaaggagaaggaggugcuggugcuguggggcgugcaccacccccccaacaucguggaccagaagacccuguacagaaccgagaacgccuacgugagcguggugagcagccacuacagcagaaaguucacccccgagaucgccaagagacccaaggugagagaccaggagggcagaaucaacuacuacuggacccugcuggagcccggcgacaccaucaccuucgaggccaacggcaaccugaucgcccccagauacgccuucgcccugagcagaggcuucggcagcggcaucaucaacagcaacgcccccauggacaagugcgacgccaagugccagaccccccagggcgccaucaacagcagccugcccuuccagaacgugcaccccgugaccaucggcgagugccccaaguacgugagaagcgccaagcugagaauggugaccggccugagaaacauccccagcauccagagcagaggccuguucggcgccaucgccggcuucaucgagggcggcuggaccggcaugguggacggcugguacggcuaccaccaccagaacgagcagggcagcggcuacgccgccgaccagaagagcacccagaacgccaucaacggcaucaccaacaaggugaacagcgugaucgagaagaugaacacccaguucaccgccgugggcaaggaguucaacaagcuggagagaagaauggagaaccugaacaagaagguggacgacggcuucaucgacaucuggaccuacaacgccgagcugcuggugcugcuggagaacgagagaacccuggacuuccacgacagcaacgugaagaaccuguacgagaaggugaagagccagcugaagaacaacgccaaggagaucggcaacggcugcuucgaguucuaccacaagugcaacgacgagugcauggagagcgugaagaacggcaccuacgacuaccccaaguacagcgaggagagcaagcugaacagagagaagaucgacggcgugaagcuggagagcaugggcguguaccagauccuggccaucuacagcaccguggccagcagccuggugcugcuggugagccugggcgccaucagcuucuggaugugcagcaacggcagccugcagugcagaaucugcaucuga

SEQ ID NO: 166461 - RNA, 1698 nt, Artificial Sequence; identical to SEQ ID NO: 163676
  derived and/or modified CDS sequence (opt4) from hemagglutinin__InfluenzaA__ADW09296

SEQ ID NO: 166462 - RNA, 1698 nt, Artificial Sequence; identical to SEQ ID NO: 163191
  derived and/or modified CDS sequence (opt4) from hemagglutinin__InfluenzaA__ADW09307

SEQ ID NO: 166463 - RNA, 1698 nt, Artificial Sequence
  derived and/or modified CDS sequence (opt4) from hemagglutinin__InfluenzaA__ADW09327
augaaggugaagcugcuggugcugcugugcaccuucaccgccaccuacgccgacaccaucugcaucggcuaccacgccaacaacagcaccgacaccguggacaccgugcuggagaagaacgugaccgugacccacagcgugaaccugcuggagaacagccacaacggcaagcugugccugcugaagggcaucgccccccugcagcugggcaacugcagcguggccggcuggauccugggcaaccccgagugcgagcugcugaucagcaaggagagcuggagcuacaucguggagaagcccaaccccgagaacggcaccugcuaccccggccacuucgccgacuacgaggagcugagagagcagcugagcagcgugagcagcuucgagagauucgagaucuuccccaaggagagcagcuggcccaaccacaccgugaccggcgugagcgccagcugcagccacaacggcgagagcagcuucuacagaaaccugcuguggcugaccggcaagaacggccuguaccccaaccugagcaagagcuacgccaacaacaaggagaaggaggugcuggugcuguggggcgugcaccacccccccaacaucguggaccagaagacccuguacagaaccgagaacgccuacgugagcguggugagcagccacuacagcagaaaguucacccccgagaucgccaagagacccaaggugagagaccaggagggcagaaucaacuacuacuggacccugcuggagcccggcgacaccaucaucuucgaggccaacggcaaccugaucgcccccagauacgccuucgcccugagcagaggcuucggcagcggcaucaucaacagcaacgcccccauggacaagugcgacgccaagugccagaccccccagggcgccaucaacagcagccugcccuuccagaacgugcaccccgugaccaucggcgagugccccaaguacgugagaagcgccaagcugagaauggugaccggccugagaaacauccccagcauccagagcagaggccuguucggcgccaucgccggcuucaucgagggcggcuggaccggcaugguggacggcugguacggcuaccaccaccagaacgagcagggcagcggcuacgccgccgaccagaagagcacccagaacgccaucaacggcaucaccaacaaggugaacagcgugaucgagaagaugaacacccaguucaccgccgugggcaaggaguucaacaagcuggagagaagaauggagaaccugaacaagaagguggacgacggcuucaucgacaucuggaccuacaacgccgagcugcuggugcugcuggagaacgagagaacccuggacuuccacgacagcaacgugaagaaccuguacgagaaggugaagagccagcugaagaacaacgccaaggagaucggcaacggcugcuucgaguucuaccacaagugcaacaacgagugcauggagagcgugaagaacggcaccuacgacuaccccaaguacagcgaggagagcaagcugaacagagagaagaucgacggcgugaagcuggagagcaugggcguguaccagauccuggccaucuacagcaccguggccagcagccuggugcugcuggugagccugggcgccaucagcuucuggaugugcagcaacggcagccugcagugcagaaucugcaucuga

SEQ ID NO: 166464 - RNA, 1698 nt, Artificial Sequence; identical to SEQ ID NO: 163676
  derived and/or modified CDS sequence (opt4) from hemagglutinin__InfluenzaA__ADW10483

SEQ ID NO: 166465 - RNA, 1698 nt, Artificial Sequence
  derived and/or modified CDS sequence (opt4) from hemagglutinin__InfluenzaA__ADW10494
augaaggugaagcugcuggugcugcugugcaccuucaccgccaccuacgccgacaccaucugcaucggcuaccacgccaacaacagcaccgacaccguggacaccgugcuggagaagaacgugaccgugacccacagcgugaaccugcuggagaacagccacaacggcaagcugugccugcugaagggcaucgccccccugcagcugggcaacugcagcguggccggcuggauccugggcaaccccgagugcgagcugcugaucagcaaggagagcuggagcuacaucguggagaagcccaaccccgagaacggcaccugcuaccccggccacuucgccgacuacgaggagcugagagagcagcugagcagcgugagcagcuucgagagauucgagaucuuccccaaggagagcagcuggcccaaccacaccgugaccggcgugagcgccagcugcagccacaacggcgagagcagcuucuacagaaaccugcuguggcugaccggcaagaacggccuguaccccaaccugagcaagagcuacgccaacaacaaggagaaggaggugcuggugcuguggggcgugcaccacccccccaacaucguggaccagaagacccuguacagaaccgagaacgccuacgugagcguggugagcagccacuacagcagaaaguucacccccgagaucgccaagagacccaaggugagagaccaggagggcagaaucaacuacuacuggacccugcuggagcccggcgacaccaucaucuucgaggccaacggcaaccugaucgcccccagauacgccuucgcccugagcagaggcuucggcagcggcaucaucaacagcaacgcccccauggacaagugcgacgccaagugccagaccccccagggcgccaucaacagcagccugcccuuccagaacgugcaccccgugaccaucggcgagugccccaaguacgugagaagcgccaagcugagaauggugaccggccugagaaacauccccagcauccagagcagaggccuguucggcgccaucgccggcuucaucgagggcggcuggaccggcaugguggacggcugguacggcuaccaccaccagaacgagcagggcagcggcuacgccgccgaccagaagagcacccagaacgccaucaacggcaucaccaacaaggugaacagcgugaucgagaagaugaacacccaguucaccgccgugggcaaggaguucaacaagcuggagagaagaauggagaaccugaacaagaagguggacgacggcuucaucgacaucuggaccuacaacgccgagcugcuggugcugcuggagaacgagagaacccuggacuuccacgacagcaacgugaagaaccuguacgagaaggugaagaaccagcugaagaacaacgccaaggagaucggcaacggcugcuucgaguucuaccacaagugcaacgacgagugcauggagagcgugaagaacggcaccuacgacuaccccaaguacagcgaggagagcaagcugaacagagagaagaucgacggcgugaagcuggagagcaugggcguguaccagauccuggccaucuacagcaccguggccagcagccuggugcugcuggugagccugggcgccaucagcuucuggaugugcagcaacggcagccugcagugcagaaucugcaucuga

SEQ ID NO: 166466 - RNA, 1698 nt, Artificial Sequence; identical to SEQ ID NO: 163676
  derived and/or modified CDS sequence (opt4) from hemagglutinin__InfluenzaA__ADW10505

SEQ ID NO: 166467 - RNA, 1698 nt, Artificial Sequence; identical to SEQ ID NO: 163676
  derived and/or modified CDS sequence (opt4) from hemagglutinin__InfluenzaA__ADW10516

SEQ ID NO: 166468 - RNA, 1698 nt, Artificial Sequence
  derived and/or modified CDS sequence (opt4) from hemagglutinin__InfluenzaA__ADW10527
augaaggugaagcugcuggugcugcugugcaccuucaccgccaccuacgccgacaccaucugcaucggcuaccacgccaacaacagcaccgacaccguggacaccgugcuggagaagaacgugaccgugacccacagcgugaaccugcuggagaacagccacaacggcaagcugugccugcugaagggcaucgccccccugcagcugggcaacugcagcguggccggcuggauccugggcaaccccgagugcgagcugcugaucagcaaggagagcuggagcuacaucguggagaagcccaaccccgagaacggcaccugcuaccccggccacuucgccgacuacgaggagcugagagagcagcugagcagcgugagcagcuucgagagauucgagaucuuccccaaggagagcagcuggcccaaccacaccgugaccggcgugagcgccagcugcagccacaacggcgagagcagcuucuacagaaaccugcuguggcugaccggcaagaacggccuguaccccaaccugagcaagagcuacgccaacaacaaggagaaggaggugcuggugcuguggggcgugcaccacccccccaacaucguggaccagaagacccuguacagaaccgagaacgccuacgugagcguggugagcagccacuacagcagaaaguucacccccgagaucgccaagagacccaaggugagagaccaggagggcagaaucaacuacuacuggacccugcuggagcccggcgacaccaucaucuucgaggccaacggcaaccugaucgcccccagauacgccuucgcccugagcagaggcuucggccugggcaucaucaacagcaacgcccccauggacaagugcgacgccaagugccagaccccccagggcgccaucaacagcagccugcccuuccagaacgugcaccccgugaccaucggcgagugccccaaguacgugagaagcgccaagcugagaauggugaccggccugagaaacauccccagcauccagagcagaggccuguucggcgccaucgccggcuucaucgagggcggcuggaccggcaugguggacggcugguacggcuaccaccaccagaacgagcagggcagcggcuacgccgccgaccagaagagcacccagaacgccaucaacggcaucaccaacaaggugaacagcgugaucgagaagaugaacacccaguucaccgccgugggcaaggaguucaacaagcuggagagaagaauggagaaccugaacaagaagguggacgacggcuucaucgacaucuggaccuacaacgccgagcugcuggugcugcuggagaacgagagaacccuggacuuccacgacagcaacgugaagaaccuguacgagaaggugaagagccagcugaagaacaacgccaaggagaucggcaacggcugcuucgaguucuaccacaagugcaacgacgagugcauggagagcgugaagaacggcaccuacgacuaccccaaguacagcgaggagagcaagcugaacagagagaagaucgacggcgugaagcuggagagcaugggcguguaccagauccuggccaucuacagcaccguggccagcagccuggugcugcuggugagccugggcgccaucagcuucuggaugugcagcaacggcagccugcagugcagaaucugcaucuga

SEQ ID NO: 166469 - RNA, 1698 nt, Artificial Sequence
  derived and/or modified CDS sequence (opt4) from hemagglutinin__InfluenzaA__ADW10538
augaaggugaagcugcuggugcugcugugcaccuucaccgccaccuacgccgacaccaucugcaucggcuaccacgccaacaacagcaccgacaccguggacaccgugcuggagaagaacgugaccgugacccacagcgugaaccugcuggagaacagccacaacggcaagcugugccugcugaagggcaucgccccccugcagcugggcaacugcagcguggccggcuggauccugggcaaccccgagugcgagcugcugaucagcaaggagagcuggagcuacaucguggagaagcccaaccccgagaacggcaccugcuaccccggccacuucgccgacuacgaggagcugagagagcagcugagcagcgugagcagcuucgagagauucgagaucuuccccaaggagagcagcuggcccaaccacaccgugaccggcgugagcgccagcugcagccacaacggcgagagcagcuucuacagaaaccugcuguggcugaccggcaagaacggccuguaccccaaccugagcaagagcuacgccaacaacaaggagaaggaggugcuggugcuguggggcgugcaccacccccccaacaucguggaccagaagacccuguacagaaccgagaacgccuacgugagcgugaugagcagccacuacagcagaaaguucacccccgagaucgccaagagacccaaggugagagaccaggagggcagaaucaacuacuacuggacccugcuggagcccggcgacaccaucaucuucgaggccaacggcaaccugaucgcccccagauacgccuucgcccugagcagaggcuucggcagcggcaucaucaacagcaacgcccccauggacaagugcgacgccaagugccagaccccccagggcgccaucaacagcagccugcccuuccagaacgugcaccccgugaccaucggcgagugccccaaguacgugagaagcgccaagcugagaauggugaccggccugagaaacauccccagcauccagagcagaggccuguucggcgccaucgccggcuucaucgagggcggcuggaccggcaugguggacggcugguacggcuaccaccaccagaacgagcagggcagcggcuacgccgccgaccagaagagcacccagaacgccaucaacggcaucaccaacaaggugaacagcgugaucgagaagaugaacacccaguucaccgccgugggcaaggaguucaacaagcuggagagaagaauggagaaccugaacaagaagguggacgacggcuucaucgacaucuggaccuacaacgccgagcugcuggugcugcuggagaacgagagaacccuggacuuccacgacagcaacgugaagaaccuguacgagaaggugaagagccagcugaagaacaacgccaaggagaucggcaacggcugcuucgaguucuaccacaagugcaacgacgagugcauggagagcgugaagaacggcaccuacgacuaccccaaguacagcgaggagagcaagcugaacagagagaagaucgacggcgugaagcuggagagcaugggcguguaccagauccuggccaucuacagcaccguggccagcagccuggugcugcuggugagccugggcgccaucagcuucuggaugugcagcaacggcagccugcagugcagaaucugcaucuga

SEQ ID NO: 166470 - RNA, 1698 nt, Artificial Sequence; identical to SEQ ID NO: 163676
  derived and/or modified CDS sequence (opt4) from hemagglutinin__InfluenzaA__ADW10549

SEQ ID NO: 166471 - RNA, 1698 nt, Artificial Sequence
  derived and/or modified CDS sequence (opt4) from hemagglutinin__InfluenzaA__ADW10560
augaaggugaagcugcuggugcugcugugcaccuucaccgccaccuacgccgacaccaucugcaucggcuaccacgccaacaacagcaccgacaccguggacaccguguucgagaagaacgugaccgugacccacagcgugaaccugcuggagaacagccacaacggcaagcugugccugcugaagggcaucgccccccugcagcugggcaacugcagcguggccggcuggauccugggcaaccccgagugcgagcugcugaucagcaaggagagcuggagcuacaucguggagaagcccaaccccgagaacggcaccugcuaccccggccacuucgccgacuacgaggagcugagagagcagcugagcagcgugagcagcuucgagagauucgagaucuuccccaaggagagcagcuggcccaaccacaccgugaccggcgugagcgccagcugcagccacaacggcgagagaagcuucuacagaaaccugcuguggcugaccggcaagaacggccuguaccccaaccugagcaagagcuacgccaacaacaaggagaaggaggugcuggugcuguggggcgugcaccacccccccgacaucggcgaccagaagacccuguaccacaccgagaacgccuacgugagcguggugagcagccacuacagcagaaaguucacccccgagaucgccaagagacccaaggugagagaccaggagggcagaaucaacuacuacuggacccugcuggagcccggcgacaccaucaucuucgaggccaacggcaaccugaucgcccccagauacgccuucgcccugagcagaggcuucggcagcggcaucaucaacagcaacgcccccauggacaagugcgacgccaagugccagaccccccagggcgccaucaacagcagccugcccuuccagaacgugcaccccgugaccaucggcgagugccccaaguacgugagaagcgccaagcugagaauggugaccggccugagaaacauccccagcauccagagcagaggccuguucggcgccaucgccggcuucaucgagggcggcuggaccggcaugguggacggcugguacggcuaccaccaccagaacgagcagggcagcggcuacgccgccgaccagaagagcacccagaacgccaucaacggcaucaccaacaaggugaacagcgugaucgagaagaugaacacccaguucaccgccgugggcaaggaguucaacaagcuggagagaagaauggagaaccugaacaagaagguggacgacggcuucaucgacaucuggaccuacaacgccgagcugcuggugcugcuggagaacgagagaacccuggacuuccacgacagcaacgugaagaaccuguacgagaaggugaagagccagcugaagaacaacgccaaggagaucggcaacggcugcuucgaguucuaccacaagugcaacgacgagugcauggagagcgugaagaacggcaccuacgacuaccccaaguacagcgaggagagcaagcugaacagagagaagaucgacggcgugaagcuggagagcaugggcguguaccagauccuggccaucuacagcaccguggccagcagccuggugcugcuggugagccugggcgccaucagcuucuggaugugcagcaacggcagccugcagugcagaaucugcaucuga

SEQ ID NO: 166472 - RNA, 1698 nt, Artificial Sequence; identical to SEQ ID NO: 166013
  derived and/or modified CDS sequence (opt4) from hemagglutinin__InfluenzaA__ADW10571

SEQ ID NO: 166473 - RNA, 1698 nt, Artificial Sequence; identical to SEQ ID NO: 163191
  derived and/or modified CDS sequence (opt4) from hemagglutinin__InfluenzaA__ADW10582

SEQ ID NO: 166474 - RNA, 1698 nt, Artificial Sequence; identical to SEQ ID NO: 163676
  derived and/or modified CDS sequence (opt4) from hemagglutinin__InfluenzaA__ADW10593

SEQ ID NO: 166475 - RNA, 1698 nt, Artificial Sequence; identical to SEQ ID NO: 163676
  derived and/or modified CDS sequence (opt4) from hemagglutinin__InfluenzaA__ADW10604

SEQ ID NO: 166476 - RNA, 1698 nt, Artificial Sequence; identical to SEQ ID NO: 163676
  derived and/or modified CDS sequence (opt4) from hemagglutinin__InfluenzaA__ADW10615

SEQ ID NO: 166477 - RNA, 1698 nt, Artificial Sequence
  derived and/or modified CDS sequence (opt4) from hemagglutinin__InfluenzaA__ADW10626
augaaggugaagcugcuggugcugcugugcaccuucaccgccaccuacgccgacaccaucugcaucggcuaccacgccaacaacagcaccgacaccguggacaccgugcuggagaagaacgugaccgugacccacagcgugaaccugcuggagaacagccacaacggcaagcugugccugcugaagggcaucgccccccugcagcugggcaacugcagcguggccggcuggauccugggcaaccccgagugcgagcugcugaucagcaaggagagcuggagcuacaucguggagaagcccaaccccgagaacggcaccugcuaccccggccacuucgccgacuacgaggagcugagagagcagcugagcagcgugagcagcuucgagagauucgagaucuuccccaaggagagcagcuggcccaaccacaccgugaccggcgugagcgccagcugcagccacaacggcgagagcagcuucuacagaaaccugcuguggcugaccgugaagaacggccuguaccccaaccugagcaagagcuacgccaacaacaaggagaaggaggugcuggugcuguggggcgugcaccacccccccagcaucguggaccagaagacccuguacagaaccgagaacgccuacgugagcguggugagcagccacuacagcagaaaguucacccccgagaucgccaagagacccaaggugagagaccaggagggcagaaucaacuacuacuggacccugcuggagcccggcgacaccaucaucuucgaggccaacggcaaccugaucgcccccagauacgccuucgcccugagcagaggcuucggcagcggcaucaucaacagcaacgcccccauggacaagugcgacgccaagugccagacccccagaggcgccaucaacagcagccugcccuuccagaacgugcaccccgugaccaucggcgagugccccaaguacgugagaagcgccaagcugagaauggugaccggccugagaaacauccccagcauccagagcagaggccuguucggcgccaucgccggcuucaucgagggcggcuggaccggcaugguggacggcugguacggcuaccaccaccagaacgagcagggcagcggcuacgccgccgaccagaagagcacccagaacgccaucaacggcaucaccaacaaggugaacagcgugaucgagaagaugaacacccaguucaccgccgugggcaaggaguucaacaagcuggagagaagaauggagaaccugaacaagaagguggacgacggcuucaucgacaucuggaccuacaacgccgagcugcuggugcugcuggagaacgagagaacccuggacuuccacgacagcaacgugaagaaccuguacgagaaggugaagagccagcugaagaacaacgccaaggagaucggcaacggcugcuucgaguucuaccacaagugcaacgacgagugcauggagagcgugaagaacggcaccuacgacuaccccaaguacagcgaggagagcaagcugaacagagagaagaucgacggcgugaagcuggagagcaugggcguguaccagauccuggccaucuacagcaccguggccagcagccuggugcugcuggugagccugggcgccaucagcuucuggaugugcagcaacggcagccugcagugcagaaucugcaucuga

SEQ ID NO: 166478 - RNA, 1698 nt, Artificial Sequence
  derived and/or modified CDS sequence (opt4) from hemagglutinin__InfluenzaA__ADW10721
augaaggugaagcugcuggugcugcugugcaccuucaccgccaccuacgccgacaccaucugcaucggcuaccacgccaacaacagcaccgacaccguggacaccgugcuggagaagaacgugaccgugacccacagcgugaaccugcuggagaacagccacaacggcaagcugugccugcugaagggcaucgccccccugcagcugggcaacugcagcguggccggcuggauccugggcaaccccgagugcgagcugcugaucagcaaggagagcuggagcuacaucguggagaagcccaaccccgagaacggcaccugcuaccccggccacuucgccgacuacgaggagcugagagagcagcugagcagcgugagcagcuucaagagauucgagaucuuccccaaggagagcagcuggcccaaccacaccgugaccggcgugagcgccagcugcagccacaacggcgagagcagcuucuacagaaaccugcuguggcugaccgugaagaacggccuguaccccaaccugagcaagagcuacgccaacaacaaggagaaggaggugcuggugcuguggggcgugcaccacccccccaacaucguggaccagagaacccuguaccacaccgagaacgccuacgugagcguggugagcagccacuacagcagaaaguucacccccgagaucgccaagagacccaaggugagaaaccaggagggcagaaucaacuacuacuggacccugcuggagcccggcgacaccaucaucuucgaggccaacggcaaccugaucgcccccagauacgccuucgcccugagcagaggcuucggcagcggcaucaucaacagcaacgcccccauggacaagugcgacgccaagugccagacccccagaggcgccaucaacagcagccugcccuuccagaacgugcaccccgugaccaucggcgagugccccaaguacgugagaagcgccaagcugagaauggugaccggccugagaaacauccccagcauccagagcagaggccuguucggcgccaucgccggcuucaucgagggcggcuggaccggcaugguggacggcugguacggcuaccaccaccagaacgagcagggcagcggcuacgccgccgaccagaagagcacccagaacgccaucaacggcaucaccaacaaggugaacagcgugaucgagaagaugaacacccaguucaccgccgugggcaaggaguucaacaagcuggagagaagaauggagaaccugaacaagaagguggacgacggcuucaucgacaucuggaccuacaacgccgagcugcuggugcugcuggagaacgagagaacccuggacuuccacgacagcaacgugaagaaccuguacgagaaggugaagagccagcugaagaacaacgccaaggagaucggcaacggcugcuucgaguucuaccacaagugcaacgacgagugcauggagagcgugaagaacggcaccuacgacuaccccaaguacagcgaggagagcaagcugaacagagagaagaucgacggcgugaagcuggagagcaugggcguguaccagauccuggccaucuacagcaccguggccagcagccuggugcugcuggugagccugggcgccaucagcuucuggaugugcagcaacggcagccugcagugcagaaucugcaucuga

SEQ ID NO: 166479 - RNA, 1698 nt, Artificial Sequence
  derived and/or modified CDS sequence (opt4) from hemagglutinin__InfluenzaA__ADW10743
augaaggugaagcugcuggugcugcugugcaccuucaccgccaccuacgccgacaccaucugcaucggcuaccacgccaacaacagcaccgacaccguggacaccgugcuggagaagaacgugaccgugacccacagcgugaaccugcuggagaacagccacaacggcaagcugugccugcugaagggcaucgccccccugcagcugggcaacugcagcguggccggcuggauccugggcaaccccgagugcgagcugcugaucagcaaggagagcuggagcuacaucguggagaagcccaaccccgagaacggcaccugcuaccccggccacuucgccgacuacgaggagcugagagagcagcugagcagcgugagcagcuucgagagauucgagaucuuccccaaggagagcagcuggcccaaccacaccgugaccggcgugagcgccagcugcagccacaacggcgagagcagcuucuacagaaaccugcuguggcugaccgugaagaacggccuguaccccaaccugagcaagagcuacgccaacaacaaggagaaggaggugcuggugcuguggggcgugcaccacccccccaacaucguggaccagaagacccuguacagaaccgagaacaccuacgugagcguggugagcagccacuacagcagaaaguucacccccgagaucgccaagagacccaagaucagagaccaggagggcagaaucaacuacuacuggacccugcuggagcccggcgacaccaucaucuucgaggccaacggcaaccugaucgcccccagauacgccuucgcccugagcagaggcuucggcagcggcaucaucaacagcaacgcccccauggacaagugcgacgccaagugccagacccccagaggcgccaucaacagcagccugcccuuccagaacgugcaccccgugaccaucggcgagugccccaaguacgugagaagcgugaagcugagaauggugaccggccugagaaacauccccagcauccagagcagaggccuguucggcgccaucgccggcuucaucgagggcggcuggaccggcaugguggacggcugguacggcuaccaccaccagaacgagcagggcagcggcuacgccgccgaccagaagagcacccagaacgccaucaacggcaucaccaacaaggugaacagcgugaucgagaagaugaacacccaguucaccgccgugggcaaggaguucaacaagcuggagagaagaauggagaaccugaacaagaagguggacgacggcuucaucgacaucuggaccuacaacgccgagcugcuggugcugcuggagaacgagagaacccuggacuuccacgacagcaacgugaagaaccuguacgagaaggugaagagccagcugaagaacaacgccaaggagaucggcaacggcugcuucgaguucuaccacaagugcaacgacgagugcauggagagcgugaagaacggcaccuacgacuaccccaaguacagcgaggagagcaagcugaacagagagaagaucgacggcgugaagcuggagagcaugggcguguaccagauccuggccaucuacagcaccguggccagcagccuggugcugcuggugagccugggcgccaucagcuucuggaugugcagcaacggcagccugcagugcagaaucugcaucuga

SEQ ID NO: 166480 - RNA, 1698 nt, Artificial Sequence
  derived and/or modified CDS sequence (opt4) from hemagglutinin__InfluenzaA__ADW10754
augaaggugaagcugcuggugcugcugugcaccuucaccgccaccuacgccgacaccaucugcaucggcuaccacgccaacaacagcaccgacaccguggacaccgugcuggagaagaacgugaccgugacccacagcgugaaccugcuggagaacagccacaacggcaagcugugccugcugaagggcaucgccccccugcagcugggcaacugcagcguggccggcuggauccugggcaaccccgagugcgagcugcugaucagcaaggagagcuggagcuacaucguggagaagcccaaccccgagaacggcaccugcuaccccggccacuucgccgacuacgaggagcugagagagcagcugagcagcgugagcagcuucgagagauucgagaucuuccccaaggagagcagcuggcccaaccacaccgugaccggcgugagcgccagcugcagccacaacggcgagaacagcuucuacagaaaccugcuguggcugaccggcaagaacggccuguaccccaaccugagcaagagcuacgccaacaacaaggagaaggaggugcuggugcuguggggcgugcaccacccccccaacaucgccgaccagaagacccuguaccacaccgagaacgccuacgugagcguggugagcagccacuacagcagaaaguucacccccgagaucgccaagagacccaaggugagagaccaggagggcagaaucaacuacuacuggacccugcuggagcccggcgacaccaucaucuucgaggccaacggcaaccugaucgcccccagauacgccuucgcccugagcagaggcuucggcagcggcaucaucaacagcaacgcccccauggacaagugcgacgccaagugccagaccccccagggcgccaucaacagcagccugcccuuccagaacgugcaccccgugaccaucggcgagugccccaaguacgugagaagcgccaagcugagaauggugaccggccugagaaacauccccagcgugcagagcagaggccuguucggcgccaucgccggcuucaucgagggcggcuggaccggcaugguggacggcugguacggcuaccaccaccagaacgagcagggcagcggcuacgccgccgaccagaagagcacccagaacgccaucaacggcaucaccaacaaggugaacagcgugaucgagaagaugaacacccaguucaccgccgugggcaaggaguucaacaagcuggagagaagaauggagaaccugaacaagaagguggacgacggcuucaucgacaucuggaccuacaacgccgagcugcuggugcugcuggagaacgagagaacccuggacuuccacgacagcaacgugaagaaccuguacgagaaggugaagagccagcugaagaacaacgccaaggagaucggcaacggcugcuucgaguucuaccacaagugcaacgacgagugcauggagagcgugaagaacggcaccuacgacuaccccaaguacagcgaggagagcaagcugaacagagagaagaucgacggcgugaagcuggagagcaugggcguguaccagauccuggccaucuacagcaccguggccagcagccuggugcugcuggugagccugggcgccaucagcuucuggaugugcagcaacggcagccugcagugcagaaucugcaucuga

SEQ ID NO: 166481 - RNA, 1698 nt, Artificial Sequence
  derived and/or modified CDS sequence (opt4) from hemagglutinin__InfluenzaA__ADW10765
augaaggugaagcugcuggugcugcugugcaccuucaccgccaccuacgccgacaccaucugcaucggcuaccacgccaacaacagcaccgacaccguggacaccgugcuggagaagaacgugaccgugacccacagcgugaaccugcuggagaacagccacaacggcaagcugugccugcugaagggcaucgccccccugcagcugggcaacugcagcguggccggcuggauccugggcaaccccgagugcgagcugcugaucagcaaggagagcuggagcuacaucguggagaagcccaaccccgagaacggcaccugcuaccccggccacuucgccgacuacgaggagcugagagagcagcugagcagcgugagcagcuucgagagauucgagaucuuccccaaggagagcagcuggcccaaccacaccgugaccggcgugagcgccagcugcagccacaacggcgagagcagcuucuacagaaaccugcuguggcugaccgugaagaacggccuguaccccaaccugagcaagagcuacgccaacaacaaggagaaggaggugcuggugcuguggggcgugcaccacccccccaacaucguggaccagaagacccuguaccacaccgagaacgccuacgugagcguggugagcagccacuacagcagaaaguucacccccgagaucgccaagagacccaaggugagaaaccaggagggcagaaucaacuacuacuggacccugcuggagcccggcgacaccaucaucuucgaggccaacggcaaccugaucgcccccagauacgccuucgcccugagcagaggcuucggcagcggcaucaucaacagcaacgcccccauggacaagugcgacgccaagugccagacccccagaggcgccaucaacagcagccugcccuuccagaacgugcaccccgugaccaucggcgagugccccaaguacgugagaagcgccaagcugagaauggugaccggccugagaaacauccccagcauccagagcagaggccuguucggcgccaucgccggcuucaucgagggcggcuggaccggcaugguggacggcugguacggcuaccaccaccagaacgagcagggcagcggcuacgccgccgaccagaagagcacccagaacgccaucaacggcaucaccaacaaggugaacagcgugaucgagaagaugaacacccaguucaccgccgugggcaaggaguucaacaagcuggagagaagaauggagaaccugaacaagaagguggacgacggcuucaucgacaucuggaccuacaacgccgagcugcuggugcugcuggagaacgagagaacccuggacuuccacgacagcaacgugaagaaccuguacgagaaggugaagagccagcugaagaacaacgccaaggagaucggcaacggcugcuucgaguucuaccacaagugcaacgacgagugcauggagagcgugaagaacggcaccuacgacuaccccaaguacagcgaggagagcaagcugaacagagagaagaucgacggcgugaagcuggagagcaugggcguguaccagauccuggccaucuacagcaccguggccagcagccuggugcugcuggugagccugggcgccaucagcuucuggaugugcagcaacggcagccugcagugcagaaucugcaucuga

SEQ ID NO: 166482 - RNA, 1698 nt, Artificial Sequence
  derived and/or modified CDS sequence (opt4) from hemagglutinin__InfluenzaA__ADW10776
augaaggugaagcugcuggugcugcugugcaccuucaccgccaccuacgccgacaccaucugcaucggcuaccacgccaacaacagcaccgacaccguggacaccgugcuggagaagaacgugaccgugacccacagcgugaaccugcuggagaacagccacaacggcaagcugugccugcugaagggcaucgccccccugcagcugggcaacugcagcguggccggcuggauccugggcaaccccgagugcgagcugcugaucagcaaggagagcuggagcuacaucguggagaagcccaaccccgagaacggcaccugcuaccccggccacuucgccgacuacgaggagcugagagagcagcugagcagcgugagcagcuucgagagauucgagaucuuccccaaggagagcagcuggcccaaccacaccgugaccggcgugagcgccagcugcagccacaacggcgagagcagcuucuacagaaaccugcuguggcugaccggcaagaacggccuguaccccaaccugagcaagagcuacgccaacgacaaggagaaggaggugcuggugcuguggggcgugcaccacccccccaacaucguggaccagaagacccuguacagaaccgagaacgccuacgugagcguggugagcagccacuacagcagaaaguucacccccgagaucgccaagagacccaaggugagagaccaggagggcagaaucaacuacuacuggacccugcuggagcccggcgacaccaucaucuucgaggccaacggcaaccugaucgcccccagauacgccuucgcccugagcagaggcuucggcagcggcaucaucaacagcaacgcccccauggacaagugcgacgccaagugccagaccccccagggcgccaucaacagcagccugcccuuccagaacgugcaccccgugaccaucggcgagugccccaaguacgugagaagcgccaagcugagaauggugaccggccugagaaacauccccagcauccagagcagaggccuguucggcgccaucgccggcuucaucgagggcggcuggaccggcaugguggacggcugguacggcuaccaccaccagaacgagcagggcagcggcuacgccgccgaccagaagagcacccagaacgccaucaacggcaucaccaacaaggugaacagcgugaucgagaagaugaacacccaguucaccgccgugggcaaggaguucaacaagcuggagagaagaauggagaaccugaacaagaagguggacgacggcuucaucgacaucuggaccuacaacgccgagcugcuggugcugcuggagaacgagagaacccuggacuuccacgacagcaacgugaagaaccuguacgagaaggugaagagccagcugaagaacaacgccaaggagaucggcaacggcugcuucgaguucuaccacaagugcaacgacgagugcauggagagcgugaagaacggcaccuacgacuaccccaaguacagcgaggagagcaagcugaacagagagaagaucgacggcgugaagcuggagagcaugggcguguaccagauccuggccaucuacagcaccguggccagcagccuggugcugcuggugagccugggcgccaucagcuucuggaugugcagcaacggcagccugcagugcagaaucugcaucuga

SEQ ID NO: 166483 - RNA, 1698 nt, Artificial Sequence
  derived and/or modified CDS sequence (opt4) from hemagglutinin__InfluenzaA__ADW10787
augaaggugaagauccuggugcugcugugcaccuucaccgccaccuacgccgacaccaucugcaucggcuaccacgccaacaacagcaccgacaccguggacaccgugcuggagaagaacgugaccgugacccacagcgugaaccugcuggagaacagccacaacggcaagcugugccugcugaagggcaucgccccccugcagcugggcaacugcagcguggccggcuggauccugggcaaccccgagugcgagcugcugaucagcaaggagagcuggagcuacaucguggagaagcccaaccccgagaacggcaccugcuaccccggccacuucgccgacuacgaggagcugagagagcagcugagcagcgugagcagcuucgagagauucgagaucuuccccaaggagagcagcuggcccaaccacaccgugaccggcgugagcgccagcugcagccacaacggcgagagcagcuucuacagaaaccugcuguggcugaccgugaagaacggccuguaccccaaccugagcaagagcuacgccaacaacaaggagaaggaggugcuggugcuguggggcgugcaccacccccccaacaucguggaccagaagacccuguacagaaccgagaacgccuacgugagcguggugagcagccacuacagcagaaaguucacccccgagaucgccaagagacccaaggugagagaccaggagggcagaaucaacuacuacuggacccugcuggagcccggcgacaccaucaucuucgaggccaacggcaaccugaucgcccccagauacgccuucgcccugagcagaggcuucggcagcggcaucaucaacagcaacgcccccauggacaagugcgacgccaagugccagacccccagaggcgccaucaacagcagccugcccuuccagaacgugcaccccgugaccaucggcgagugccccaaguacgugagaagcgccaagcugagaauggugaccggccugagaaacauccccagcauccagagcagaggccuguucggcgccaucgccggcuucaucgagggcggcuggaccggcaugguggacggcugguacggcuaccaccaccagaacgagcagggcagcggcuacgccgccgaccagaagagcacccagaacgccaucaacggcaucaccaacaaggugaacagcgugaucgagaagaugaacacccaguucaccgccgugggcaaggaguucaacaagcuggagagaagaauggagaaccugaacaagaagguggacgacggcuucaucgacaucuggaccuacaacgccgagcugcuggugcugcuggagaacgagagaacccuggacuuccacgacagcaacgugaagaaccuguacgagaaggugaagagccagcugaagaacaacgccaaggagaucggcaacggcugcuucgaguucuaccacaagugcaacgacgagugcauggagagcgugaagaacggcaccuacgacuaccccaaguacagcgaggagagcaagcugaacagagagaagaucgacggcgugaagcuggagagcaugggcguguaccagauccuggccaucuacagcaccguggccagcagccuggugcugcuggugagccugggcgccaucagcuucuggaugugcagcaacggcagccugcagugcagaaucugcaucuga

SEQ ID NO: 166484 - RNA, 1698 nt, Artificial Sequence
  derived and/or modified CDS sequence (opt4) from hemagglutinin__InfluenzaA__ADW10798
augaaggugaagcugcuggugcugcugugcaccuucaccgccaccuacgccgacaccaucugcaucggcuaccacgccaacaacagcaccgacaccguggacaccgugcuggagaagaacgugaccgugacccacagcgugaaccugcuggagaacagccacaacggcaagcugugccugcugaagggcaucgccccccugcagcugggcaacugcagcguggccggcuggauccugggcaaccccgagugcgagcugcugaucagcaaggagagcuggagcuacaucguggagaagcccaaccccgagaacggcaccugcuaccccggccacuucgccgacuacgaggagcugagagagcagcugagcagcgugagcagcuucgagagauucgagaucuuccccaaggagagcagcuggcccaaccacaccgugaccggcgugagcgccagcugcagccacaacggcgagagcagcuucuacagaaaccugcuguggcugaccggcaagaacggccuguaccccaaccugagcaagagcuacgccaacaacaaggagaaggaggugcuggugcuguggggcgugcaccacccccccaacaucguggaccagaagacccuguacagaaccgagaacgccuacgugagcguggugagcagccacuacagcagaaaguucacccccgagaucgccaagagacccaaggugagagaccaggagggcagaaucaacuacuacuggacccugcuggagcccggcgacaccaucaucuucgaggccaacggcaaccugaucgcccccagauacgccuucgcccugagcagaggcuucggcagcggcaucaucaacagcaacgcccccaugggcaagugcgacgccaagugccagaccccccagggcgccaucaacagcagccugcccuuccagaacgugcaccccgugaccaucggcgagugccccaaguacgugagaagcgccaagcugagaauggugaccggccugagaaacauccccagcauccagagcagaggccuguucggcgccaucgccggcuucaucgagggcggcuggaccggcaugguggacggcugguacggcuaccaccaccagaacgagcagggcagcggcuacgccgccgaccagaagagcacccagaacgccaucaacggcaucaccaacaaggugaacagcgugaucgagaagaugaacacccaguucaccgccgugggcaaggaguucaacaagcuggagagaagaguggagaaccugaacaagaagguggacgacggcuucaucgacaucuggaccuacaacgccgagcugcuggugcugcuggagaacgagagaacccuggacuuccacgacagcaacgugaagaaccuguacgagaaggugaagagccagcugaagaacaacgccaaggagaucggcaacggcugcuucgaguucuaccacaagugcaacgacgagugcauggagagcgugaagaacggcaccuacgacuaccccaaguacagcgaggagagcaagcugaacagagagaagaucgacggcgugaagcuggagagcaugggcguguaccagauccuggccaucuacagcaccguggccagcagccuggugcugcuggugagccugggcgccaucagcuucuggaugugcagcaacggcagccugcagugcagaaucugcaucuga

SEQ ID NO: 166485 - RNA, 1698 nt, Artificial Sequence; identical to SEQ ID NO: 166481
  derived and/or modified CDS sequence (opt4) from hemagglutinin__InfluenzaA__ADW10809

SEQ ID NO: 166486 - RNA, 1698 nt, Artificial Sequence; identical to SEQ ID NO: 163676
  derived and/or modified CDS sequence (opt4) from hemagglutinin__InfluenzaA__ADW10820

SEQ ID NO: 166487 - RNA, 1698 nt, Artificial Sequence; identical to SEQ ID NO: 163191
  derived and/or modified CDS sequence (opt4) from hemagglutinin__InfluenzaA__ADW10831

SEQ ID NO: 166488 - RNA, 1698 nt, Artificial Sequence
  derived and/or modified CDS sequence (opt4) from hemagglutinin__InfluenzaA__ADW10842
augaaggugaagcugcuggugcugcugugcaccuucaccgccaccuacgccgacaccaucugcaucggcuaccacgccaacaacagcaccgacaccguggacaccgugcuggagaagaacgugaccgugacccacagcgugaaccugcuggagaacagccacaacggcaagcugugccugcugaagggcaucgccccccugcagcugggcaacugcagcguggccggcuggauccugggcaaccccgagugcgagcugcugaucagcaaggagagcuggagcuacaucguggagaagcccaaccccgagaacggcaccugcuaccccggccacuucgccgacuacgaggagcugagagagcagcugagcagcgugagcagcuucgagagauucgagaucuuccccaaggagagcagcuggcccaaccacaccgugaccggcgugagcgccagcugcagccacaacggcgagagcagcuucuacagaaaccugcuguggcugaccgugaagaacggccuguaccccaaccugagcaagagcuacgccaacaacaaggagaaggaggugcuggugcuguggggcgugcaccacccccccaacaucguggaccagaagacccuguacagaaccgagaacgccuacgugagcguggugagcagccacuacagcagaaaguucgcccccgagaucgccaagagacccaaggugagagaccaggagggcagaaucaacuacuacuggacccugcuggagcccggcgacaccaucaucuucgaggccaacggcaaccugaucgcccccagauacgccuucgcccugagcagaggcuucggcagcggcaucaucaacagcaacgcccccauggacaagugcgacgccaagugccagacccccagaggcgccaucaacagcagccugcccuuccagaacgugcaccccgugaccaucggcgagugccccaaguacgugagaagcgccaagcugagaauggugaccggccugagaaacauccccagcauccagagcagaggccuguucggcgccaucgccggcuucaucgagggcggcuggaccggcaugguggacggcugguacggcuaccaccaccagaacgagcagggcagcggcuacgccgccgaccagaagagcacccagaacgccaucaacggcaucaccaacaaggugaacagcgugaucgagaagaugaacacccaguucaccgccgugggcaaggaguucaacaagcuggagagaagaauggagaaccugaacaagaagguggacgacggcuucaucgacaucuggaccuacaacgccgagcugcuggugcugcuggagaacgagagaacccuggacuuccacgacagcaacgugaagaaccuguacgagaaggugaagagccagcugaagaacaacgccaaggagaucggcaacggcugcuucgaguucuaccacaagugcaacgacgagugcauggagagcgugaagaacggcaccuacgacuaccccaaguacagcgaggagagcaagcugaacagagagaagaucgacggcgugaagcuggagagcaugggcguguaccagauccuggccaucuacagcaccguggccagcagccuggugcugcuggugagccugggcgccaucagcuucuggaugugcagcaacggcagccugcagugcagaaucugcaucuga

SEQ ID NO: 166489 - RNA, 1698 nt, Artificial Sequence; identical to SEQ ID NO: 166032
  derived and/or modified CDS sequence (opt4) from hemagglutinin__InfluenzaA__ADW10853

SEQ ID NO: 166490 - RNA, 1698 nt, Artificial Sequence; identical to SEQ ID NO: 166481
  derived and/or modified CDS sequence (opt4) from hemagglutinin__InfluenzaA__ADW10864

SEQ ID NO: 166491 - RNA, 1698 nt, Artificial Sequence; identical to SEQ ID NO: 166481
  derived and/or modified CDS sequence (opt4) from hemagglutinin__InfluenzaA__ADW10875

SEQ ID NO: 166492 - RNA, 1698 nt, Artificial Sequence; identical to SEQ ID NO: 163676
  derived and/or modified CDS sequence (opt4) from hemagglutinin__InfluenzaA__ADW10886

SEQ ID NO: 166493 - RNA, 1698 nt, Artificial Sequence
  derived and/or modified CDS sequence (opt4) from hemagglutinin__InfluenzaA__ADW10897
augaaggugaagcugcuggugcugcugugcaccuucaccgccaccuacgccgacaccaucugcaucggcuaccacgccaacaacagcaccgacaccguggacaccgugcuggagaagaacgugaccgugacccacagcgugaaccugcuggagaacagccacaacggcaagcugugccugcugaagggcaucgccccccugcagcugggcaacugcagcguggccggcuggauccugggcaaccccgagugcgagcugcugaucagcaaggagagcuggagcuacaucguggagaagcccaaccccgagaacggcaccugcuaccccggccacuucgccgacuacgaggagcugagagagcagcugagcagcgugagcagcuucgagagauucgagaucuuccccaaggagagcagcuggcccaaccacaccgugaccggcgugagcgccagcugcagccacaacggcgagagcagcuucuacagaaaccugcuguggcugaccggcaagaacggccuguaccccaaccugagcaagagcuacgccaacaacaaggagaaggaggugcuggugcuguggggcgugcaccacccccccagcaucagcgaccagaagacccuguaccacaccgagaacgccuacgugagcguggugagcagccacuacagcagaaaguucacccccgagaucgccaagagacccaaggugagagaccaggagggcagaaucaacuacuacuggacccugcuggagcccggcgacaccaucaucuucgaggccaacggcaaccugaucgcccccagauacgccuucgcccugagcagaggcuucggcagcggcaucaucaacagcaacgcccccauggacaagugcgacaccaagugccagaccccccagggcgccaucaacagcagccugcccuuccagaacgugcaccccgugaccaucggcgagugccccaaguacgugagaagcgccaagcugagaauggugaccggccugagaaacauccccagcauccagagcagaggccuguucggcgccaucgccggcuucaucgagggcggcuggaccggcaugguggacggcugguacggcuaccaccaccagaacgagcagggcagcggcuacgccgccgaccagaagagcacccagaacgccaucaacggcaucaccaacaaggugaacagcgugaucgagaagaugaacacccaguucaccgccgugggcaaggaguucaacaagcuggagagaagaauggagaaccugaacaagaagguggacgacggcuucaucgacaucuggaccuacaacgccgagcugcuggugcugcuggagaacgagagaacccuggacuuccacgacagcaacgugaagaaccuguacgagaaggugaagagccagcugaagaacaacgccaaggaggugggcaacggcugcuucgaguucuaccacaagugcaacgacgagugcauggagagcgugaagaacggcaccuacgacuaccccaaguacagcgaggagagcaagcugaacagagagaagaucgacggcgugaagcuggagagcaugggcguguaccagauccuggccaucuacagcaccguggccagcagccuggugcugcuggugagccugggcgccaucagcuucuggaugugcagcaacggcagccugcagugcagaaucugcaucuga

SEQ ID NO: 166494 - RNA, 1701 nt, Artificial Sequence
  derived and/or modified CDS sequence (opt4) from hemagglutinin__InfluenzaA__ADW23115
augaagaccaucaucgcccugagcuacauccugugccugguguucgcccagaagcugcccggcaacggcaacagcaccgccacccugugccugggccaccacgccgugcccaacggcaccaucgugaagaccaucaccaacgaccagaucgaggugaccaacgccaccgagcuggugcagagcagcagcaccggcgagaucugcgacagcccccaccagauccuggacggcgagaacugcacccugaucgacgcccugcugggcgacccccagugcgacggcuuccagaacaagaagugggaccuguucguggagagaagcaaggccuacagcaacugcuaccccuacgacgugcccgacuacgccagccugagaagccugguggccagcagcggcacccuggaguucaacaacgagagcuucaacuggaccggcgugacccagaacggcaccagcagcgccugcaucagaagaagcaacaacagcuucuucagcagacugaacuggcugacccacagcaaguucaaguaccccgcccugaacgugaccaugcccaacaacgagcaguucgacaagcuguacaucuggggcgugcaccaccccggcaccgacaacgaccagaucuuccuguacgcccaggccagcggcagaaucaccgugagcaccaagagaagccagcagaccgugauccccaacaucggcagcagacccagagugagaaacauccccagcagaaucagcaucuacuggaccaucgugaagcccggcgacauccugcugaucaacagcaccggcaaccugaucgcccccagaggcuacuucaagaucagaagcggcaagagcagcaucaugagaagcgacgcccccaucggcaagugcaacagcgagugcaucacccccaacggcagcauccccaacgacaagcccuuccagaacgugaacagaaucaccuacggcgccugccccagauacgugaagcagaacacccugaagcuggccaccggcaugagaaacgugcccgagaagcagaccagaggcaucuucggcgccaucgccggcuucaucgagaacggcugggagggcaugguggacggcugguacggcuucagacaccagaacagcgagggcagaggccaggccgccgaccugaagagcacccaggccgccaucgaccagaucaacggcaagcugaacagacugaucggcaagaccaacgagaaguuccaccagaucgagaaggaguucagcgagguggagggcagaauccaggaccuggagaaguacguggaggacaccaagaucgaccuguggagcuacaacgccgagcugcugguggcccuggagaaccagcacaccaucgaccugaccgacagcgagaugaacaagcuguucgagaagaccaagaagcagcugagagagaacgccgaggacaugggcaacggcugcuucaagaucuaccacaagugcgacaacgccugcaucggcagcaucagaaacggcaccuacgaccacgacguguacagagacgaggcccugaacaacagauuccagaucaagggcguggagcugaagagcggcuacaaggacuggauccuguggaucagcuucgccaucagcugcuuccugcugugcguggcccugcugggcuucaucaugugggccugccagaagggcaacaucagaugcaacaucugcaucuga

SEQ ID NO: 166495 - RNA, 1701 nt, Artificial Sequence
  derived and/or modified CDS sequence (opt4) from hemagglutinin__InfluenzaA__ADW54481
augaaggccauccugguggugcugcuguacaccuucgccaccgccaacgccgacacccugugcaucggcuaccacgccaacaacagcaccgacaccguggacaccgugcuggagaagaacgugaccgugacccacagcgugaaccugcuggaggacaagcacaacggcaagcugugcaagcugagaggcguggccccccugcaccugggcaagugcaacaucgccggcuggauccugggcaaccccgagugcgagagccugagcaccgccagcagcuggagcuacaucguggagaccagcagcagcgacaacggcaccugcuaccccggcgacuucaucgacuacgaggagcugagagagcagcugagcagcgugagcagcuucgagagauucgagaucuuccccaagaccagcagcuggcccaaccacgacagcaacaagggcgugaccgccgccugcccccacgccggcgccaagagcuucuacaagaaccugaucuggcuggugaagaagggcaacagcuaccccaagcugagcaagagcuacaucaacgacaagggcaaggaggugcuggugcuguggggcauccaccaccccagcaccaccgccgaccagcagagccuguaccagaacgccgacaccuacguguucgugggcaccagcagauacagcaagaaguucaagcccgagaucgccaucagacccaaggugagagaccaggagggcagaaugaacuacuacuggacccugguggagcccggcgacaagaucaccuucgaggccaccggcaaccugguggugcccagauacgccuucgccauggagagaaacgccggcagcggcaucaucaucagcgacacccccgugcacgacugcaacaccaccugccagacccccaagggcgccaucaacaccagccugcccuuccagaacauccaccccaucaccaucggcaagugccccaaguacgugaagagcaccaagcugagacuggccaccggccugagaaacgugcccagcauccagagcagaggccuguucggcgccaucgccggcuucaucgagggcggcuggaccggcaugguggacggcugguacggcuaccaccaccagaacgagcagggcagcggcuacgccgccgaccugaagagcacccagaacgccaucgacaagaucaccaacaaggugaacagcgugaucgagaagaugaacacccaguucaccgccgugggcaaggaguucaaccaccuggagaagagaaucgagaaccugaacaagaagguggacgacggcuuccuggacaucuggaccuacaacgccgagcugcuggugcugcuggagaacgagagaacccuggacuaccacgacagcaacgugaagaaccuguacgagaaggugagaaaccagcugaagaacaacgccaaggagaucggcaacggcugcuucgaguucuaccacaagugcgacaacaccugcauggagagcgugaagaacggcaccuacgacuaccccaaguacagcgaggaggccaagcugaacagagaggagaucgacggcgugaagcuggagagcaccagaaucuaccagauccuggccaucuacagcaccguggccagcagccuggugcugguggugagccugggcgccaucagcuucuggaugugcagcaacggcagccugcagugcagaaucugcaucuga

SEQ ID NO: 166496 - RNA, 1701 nt, Artificial Sequence
  derived and/or modified CDS sequence (opt4) from hemagglutinin__InfluenzaA__ADW54512
augaaggccauccugguggugcugcuguacaccuucgccaccgccaacgccgacacccugugcaucggcuaccacgccaacaacagcaccgacaccguggacaccgugcuggagaagaacgugaccgugacccacagcgugaaccugcuggaggacaagcacaacggcaagcugugcaagcugagaggcguggccccccugcaccugggcaagugcaacaucgccggcuggauccugggcaaccccgagugcgagagccugagcaccgccagcagcuggagcuacaucguggagaccagcagcagcgacaacggcaccugcuaccccggcgacuucaucgacuacgaggagcugagagagcagcugagcagcgugagcagcuucaagagauucgagaucuuccccaagaccagcagcuggcccaaccacgacagcaacaagggcgugaccaccgccugcccccacgccggcgccaagagcuucuacaagaaccugaucuggcuggugaagaagggcaacagcuaccccaagcugagcaagagcuacaucaacgacaagggcaaggaggugcuggugcuguggggcauccaccacccccccaccagcgccgaccagcagagccuguaccagaacgccgacgccuacguguucgugggcaccagcagauacagcaagaaguucaagcccgagaucgccaucagacccaaggugagagaccaggagggcagaaugaacuacuacuggacccugguggagcccggcgacaagaucaccuucgaggccaccggcaaccugguggugcccagauacgccuucgccauggagagaaacgccggcagcggcaucaucaucagcgacacccccgugcacgacugcaacaccaccugccagacccccaagggcgccaucaacaccagccugcccuuccagaacauccaccccaucaccaucggcaagugccccaaguacgugaagagcaccaagcugagacuggccaccggccugagaaacgugcccagcauccagagcagaggccuguucggcgccaucgccggcuucaucgagggcggcuggaccggcaugguggacggcugguacggcuaccaccaccagaacgagcagggcagcggcuacgccgccgaccugaagagcacccagaacgccaucgacgagaucaccaacaaggugaacagcgugaucgagaagaugaacacccaguucaccgccgugggcaaggaguucaaccaccuggagaagagaaucgagaaccugaacaagaagguggacgacggcuuccuggacaucuggaccuacaacgccgagcugcuggugcugcuggagaacgagagaacccuggacuaccacgacagcaacgugaagaaccuguacgagaaggugagaagccagcugaagaacaacgccaaggagaucggcaacggcugcuucgaguucuaccacaagugcgacaacaccugcauggagagcgugaagaacggcaccuacgacuaccccaaguacagcgaggaggccaagcugaacagagaggagaucgacggcgugaagcuggagagcaccagaaucuaccagauccuggccaucuacagcaccguggccagcagccuggugcugguggugagccugggcgccaucagcuucuggaugugcagcaacggcagccugcagugcagaaucugcaucuga

SEQ ID NO: 166497 - RNA, 1701 nt, Artificial Sequence
  derived and/or modified CDS sequence (opt4) from hemagglutinin__InfluenzaA__ADW54527
augaaggccauccugguggugcugcuguacaccuucgccaccgccagcgccgacacccugugcaucggcuaccacgccaacaacagcaccgacaccguggacaccgugcuggagaagaacgugaccgugacccacagcgugaaccugcuggaggacaagcacaacggcaagcugugcaagcugagaggcguggccccccugcaccugggcaagugcaacaucgccggcuggauccugggcaaccccgagugcgagagccugagcaccgccagcagcuggagcuacaucguggagaccagcagcagcgacaacggcaccugcuaccccggcgacuucaucgacuacgaggagcugagagagcagcugagcagcgugagcagcuucgagagauucgagaucuuccccaagaccagcagcuggcccaaccacgacagcaacaagggcgugaccaccgccugcccccacgccggcgccaagagcuucuacaagaaccugaucuggcuggugaagaagggcaacagcuaccccaagcugagcaagagcuacaucaacgacaagggcaaggaggugcuggugcuguggggcauccaccacccccccaccagcgccgaccagcagagccuguaccagaacgccgacgccuacguguucgugggcaccagcagauacagcaagaaguucaagcccgagaucgccaucagacccaaggugagagaccaggagggcagaaugaacuacuacuggacccugguggagcccggcgacaagaucaccuucgaggccaccggcaaccugguggugcccagauacgccuucgccauggagagaaacgccggcagcggcaucaucaucagcgacacccccgugcacgacugcaacaccaccugccagacccccaacggcgccaucaacaccagccugcccuuccagaacauccaccccaucaccaucggcaagugccccaaguacgugaagagcaccaagcugagacuggccaccggccugagaaacgugcccagcauccagagcagaggccuguucggcgccaucgccggcuucaucgagggcggcuggaccggcaugguggacggcugguacggcuaccaccaccagaacgagcagggcagcggcuacgccgccgaccugaagagcacccagaacgccaucgacgagaucaccaacaaggugaacagcgugaucgagaagaugaacacccaguucaccgccgugggcaaggaguucaaccaccuggagaagagaaucgagaaccugaacaagaagguggacgacggcuuccuggacaucuggaccuacaacgccgagcugcuggugcugcuggagaacgagagaacccuggacuaccacgacagcaacgugaagaaccuguacgagaaggugagaagccagcugaagaacaacgccaaggagaucggcaacggcugcuucgaguucuaccacaagugcgacaacaccugcauggagagcgugaagaacggcaccuacgacuaccccaaguacagcgaggaggccaagcugaacagagaggagaucgacggcgugaagcuggagagcaccagaaucuaccagauccuggccaucuacagcaccguggccagcagccuggugcugguggugagccugggcgccaucagcuucuggaugugcagcaacggcagccugcagugcagaaucugcaucuga

SEQ ID NO: 166498 - RNA, 1701 nt, Artificial Sequence; identical to SEQ ID NO: 166495
  derived and/or modified CDS sequence (opt4) from hemagglutinin__InfluenzaA__ADW65825

SEQ ID NO: 166499 - RNA, 1701 nt, Artificial Sequence
  derived and/or modified CDS sequence (opt4) from hemagglutinin__InfluenzaA__ADW82135
augaagaccaucaucgcccugagcuacauccugugccugguguucgcccagaagcugcccggcaacgacaacagcaccgccacccugugccugggccaccacgccgugcccaacggcaccguggugaagaccaucaccaacgaccagaucgaggugaccaacgccaccgagcuggugcagagcagcagcaccggcgagaucugcgacagcccccaccagauccuggacggcaagaacugcacccugaucgacgcccugcugggcgacccccagugcgacggcuuccagaacaagaagugggaccuguucguggagagaagcaaggccuacagcaacugcuaccccuacgacgugcccgacuacgccagccugagaagccugguggccagcagcggcacccuggaguucaacaacgagagcuucaacuggaccggcgugacccagaacggcaccagcagcgccugcaucagaagaagcaagaacagcuucuucagcagacugaacuggcugacccaccugaacuucaaguacaccgcccugaacgugaccaugcccaacaacgagcaguucgacaagcuguacaucuggggcgugcaccaccccggcaccgacaaggaccagaucuuccuguacgcccaggccagcggcagaaucaccgugagcaccaagagaagccagcagaccgugauccccaacaucggcagcagacccagagugagaaacauccccagcagaaucagcaucuacuggaccaucgugaagcccggcgacauccugcugaucaacagcaccggcaaccugaucgcccccagaggcuacuucaagaucagaagcggcaagagcagcaucaugagaagcgacgcccccaucggcaagugcaacagcgagugcaucacccccaacggcagcauccccaacgacaagcccuuccagaacgugaacagaaucaccuacggcgccugccccagauacgugaagcagaacacccugaagcuggccaccggcaugagaaacgugcccgagaagcagaccagaggcaucuucggcgccaucgccggcuucaucgagaacggcugggagggcaugguggacggcugguacggcuucagacaccagaacagcgagggcagaggccaggccgccgaccugaagagcacccaggccgccaucgaccagaucaacggcaagcugaacagacugaucggcaagaccaacgagaaguuccaccagaucgagaaggaguucagcgagguggagggcagaauccaggaccuggagaaguacguggaggacaccaagaucgaccuguggagcuacaacgccgagcugcugguggcccuggagaaccagcacaccaucgaccugaccgacagcgagaugaacaagcuguucgagaagaccaagaagcagcugagagagaacgccgaggacaugggcaacggcugcuucaagaucuaccacaagugcgacaacgccugcaucggcagcaucagaaacggcaccuacgaccacgacguguacagagacgaggcccugaacaacagauuccagaucaagggcguggagcugaagagcggcuacaaggacuggauccuguggaucagcuucgccaucagcugcuuccugcugugcguggcccugcugggcuucaucaugugggccugccagaagggcaacaucagaugcaacaucugcaucuga

SEQ ID NO: 166500 - RNA, 1701 nt, Artificial Sequence; identical to SEQ ID NO: 166499
  derived and/or modified CDS sequence (opt4) from hemagglutinin__InfluenzaA__ADW82155

SEQ ID NO: 166501 - RNA, 1701 nt, Artificial Sequence; identical to SEQ ID NO: 166499
  derived and/or modified CDS sequence (opt4) from hemagglutinin__InfluenzaA__ADW82166

SEQ ID NO: 166502 - RNA, 1701 nt, Artificial Sequence; identical to SEQ ID NO: 166499
  derived and/or modified CDS sequence (opt4) from hemagglutinin__InfluenzaA__ADW82177

SEQ ID NO: 166503 - RNA, 1701 nt, Artificial Sequence; identical to SEQ ID NO: 162729
  derived and/or modified CDS sequence (opt4) from hemagglutinin__InfluenzaA__ADW82188

SEQ ID NO: 166504 - RNA, 1701 nt, Artificial Sequence; identical to SEQ ID NO: 162729
  derived and/or modified CDS sequence (opt4) from hemagglutinin__InfluenzaA__ADW82198

SEQ ID NO: 166505 - RNA, 1701 nt, Artificial Sequence; identical to SEQ ID NO: 162729
  derived and/or modified CDS sequence (opt4) from hemagglutinin__InfluenzaA__ADW82208

SEQ ID NO: 166506 - RNA, 1701 nt, Artificial Sequence; identical to SEQ ID NO: 162729
  derived and/or modified CDS sequence (opt4) from hemagglutinin__InfluenzaA__ADW82218

SEQ ID NO: 166507 - RNA, 1701 nt, Artificial Sequence; identical to SEQ ID NO: 162729
  derived and/or modified CDS sequence (opt4) from hemagglutinin__InfluenzaA__ADW82228

SEQ ID NO: 166508 - RNA, 1701 nt, Artificial Sequence; identical to SEQ ID NO: 162729
  derived and/or modified CDS sequence (opt4) from hemagglutinin__InfluenzaA__ADW82238

SEQ ID NO: 166509 - RNA, 1701 nt, Artificial Sequence; identical to SEQ ID NO: 162729
  derived and/or modified CDS sequence (opt4) from hemagglutinin__InfluenzaA__ADW82248

SEQ ID NO: 166510 - RNA, 1701 nt, Artificial Sequence; identical to SEQ ID NO: 162729
  derived and/or modified CDS sequence (opt4) from hemagglutinin__InfluenzaA__ADW82258

SEQ ID NO: 166511 - RNA, 1701 nt, Artificial Sequence
  derived and/or modified CDS sequence (opt4) from hemagglutinin__InfluenzaA__ADW82268
augaaggccauccugguggugcugcuguacaccuucgccaccgccaacgccgacacccugugcaucggcuaccacgccaacaacagcaccgacaccguggacaccgugcuggagaagaacgugaccgugacccacagcgugaaccugcuggaggacaagcacaacggcaagcugugcaagcugagaggcguggccccccugcaccugggcaagugcaacaucgccggcuggauccugggcaaccccgagugcgagagccugagcaccgccagcagcuggagcuacaucguggagaccagcagcagcgacaacggcaccugcuaccccggcgacuucaucgacuacgaggagcugagagagcagcugagcagcgugagcagcuucgagagauucgagaucuuccccaagaccagcagcuggcccaaccacgacagcaacaagggcgugaccgccgccugcccccacgccggcgccaagagcuucuacaagaaccugaucuggcuggugaagaagggcaacagcuaccccaagcugagcaagagcuacaucaacgacaagggcaaggaggugcuggugcuguggggcauccaccaccccagcaccagcgccgaccagcagagccuguaccagaacgccgacgccuacguguucgugggcaccagcagauacagcaagaaguucaagcccgagaucgccaucagacccaaggugagagaccaggagggcagaaugaacuacuacuggacccugguggagcccggcgacaagaucaccuucgaggccaccggcaaccugguggugcccagauacgccuucgccauggagagaaacgccggcagcggcaucaucaucagcgacacccccgugcacgacugcaacaccaccugccagacccccaagggcgccaucaacaccagccugcccuuccagaacauccaccccaucaccaucggcaagugccccaaguacgugaagagcaccaagcugagacuggccaccggccugagaaacgugcccagcauccagagcagaggccuguucggcgccaucgccggcuucaucgagggcggcuggaccggcaugguggacggcugguacggcuaccaccaccagaacgagcagggcagcggcuacgccgccgaccugaagagcacccagaacgccaucgacgagaucaccaacaaggugaacagcgugaucgagaagaugaacacccaguucaccgccgugggcaaggaguucaaccaccuggagaagagaaucgagaaccugaacaagaagguggacgacggcuuccuggacaucuggaccuacaacgccgagcugcuggugcugcuggagaacgagagaacccuggacuaccacgacagcaacgugaagaaccuguacgagaaggugagaagccagcugaagaacaacgccaaggagaucggcaacggcugcuucgaguucuaccacaagugcgacaacaccugcauggagagcgugaagaacggcaccuacgacuaccccaaguacagcgaggaggccaagcugaacagagaggagaucgacggcgugaagcuggagagcaccagaauccaccagauccuggccaucuacagcaccguggccagcagccuggugcugguggugagccugggcgccaucagcuucuggaugugcagcaacggcagccugcagugcagaaucugcaucuga

SEQ ID NO: 166512 - RNA, 1701 nt, Artificial Sequence; identical to SEQ ID NO: 166499
  derived and/or modified CDS sequence (opt4) from hemagglutinin__InfluenzaA__ADW93760

SEQ ID NO: 166513 - RNA, 1701 nt, Artificial Sequence
  derived and/or modified CDS sequence (opt4) from hemagglutinin__InfluenzaA__ADW95319
augaaggccauccugguggugcugcuguacaccuucgccaccgccaacgccgacacccugugcaucggcuaccacgccaacaacagcaccgacaccguggacaccgugcuggagaagaacgugaccgugacccacagcgugaaccugcuggaggacaagcacaacggcaagcugugcaagcugagaggcguggccccccugcaccugggcaagugcaacaucgccggcuggauccugggcaaccccgagugcgagagccugagcaccgccagcagcuggagcuacaucguggagaccagcagcagcgacaacggcaccugcuaccccggcgacuucaucgacuacgaggagcugagagagcagcugagcagcgugagcagcuucgagagauucgagaucuuccccaagaccagcagcuggcccaaccacgacagcaacaagggcgugaccgccgccugcccccacgccggcgccaagggcuucuacaagaaccugaucuggcuggugaagaagggcaacagcuaccccaagcugagcaagagcuacaucaacgacaagggcaaggaggugcuggugcuguggggcauccaccaccccagcaccaccgccgaccagcagagccuguaccagaacgccgacaccuacguguucgugggcaccagcagauacagcaagaaguucaagcccgagaucgccaucagacccaaggugagagaccaggagggcagaaugaacuacuacuggacccugguggagcccggcgacaagaucaccuucgaggccaccggcaaccugguggugcccagauacgccuucgccauggagagaaacgccggcagcggcaucaucaucagcgacacccccgugcacgacugcaacaccaccugccagacccccaagggcgccaucaacaccagccugcccuuccagaacauccaccccaucaccaucggcaagugccccaaguacgugaagagcaccaagcugagacuggccaccggccugagaaacgugcccagcauccagagcagaggccuguucggcgccaucgccggcuucaucgagggcggcuggaccggcaugguggacggcugguacggcuaccaccaccagaacgagcagggcagcggcuacgccgccgaccugaagagcacccagaacgccaucgacgagaucaccaacaaggugaacagcgugaucgagaagaugaacacccaguucaccgccgugggcaaggaguucaaccaccuggagaagagaaucgagaaccugaacaagaagguggacgacggcuuccuggacaucuggaccuacaacgccgagcugcuggugcugcuggagaacgagagaacccuggacuaccacgacagcaacgugaagaaccuguacgagaaggugagaaaccagcugaagaacaacgccaaggagaucggcaacggcugcuucgaguucuaccacaagugcgacaacaccugcauggagagcgugaagaacggcaccuacgacuaccccaaguacagcgaggaggccaagcugaacagagaggagaucgacggcgugaagcuggagagcaccagaaucuaccagauccuggccaucuacagcaccguggccagcagccuggugcugguggugagccugggcgccaucagcuucuggaugugcagcaacggcagccugcagugcagaaucugcaucuga

SEQ ID NO: 166514 - RNA, 1701 nt, Artificial Sequence
  derived and/or modified CDS sequence (opt4) from hemagglutinin__InfluenzaA__ADW95332
augaaggccauccugguggugcugcuguacaccuucgccaccgccaacgccgacacccugugcaucggcuaccacgccaacaacagcaccgacaccguggacaccgugcuggagaagaacgugaccgugacccacagcgugaaccugcuggaggacaagcacaacggcaagcugugcaagcugagaggcguggccccccugcaccugggcaagugcaacaucgccggcuggauccugggcaaccccgagugcgagagccugagcaccgccagcagcuggagcuacaucguggagaccagcagcagcgacaacggcaccugcuaccccggcgacuucaucgacuacgaggagcugagagagcagcugagcagcgugagcagcuucgagagauucgagaucuuccccaagaccagcagcuggcccaaccacgacagcaacaagggcgugaccgccgccugcccccacgccggcgccaagggcuucuacaagaaccugaucuggcuggugaagaagggcaacagcuaccccaagcugagcaagagcuacaucaacgacaagggcaaggaggugcuggugcuguggggcauccaccaccccagcaccaccgccgaccagcagagccuguaccagaacgccgacaccuacguguucgugggcaccagcagauacagcaagaaguucaagcccgagaucgccaucagacccaaggugagagaccaggagggcagaaugaacuacuacuggacccugguggagcccggcgacaagaucaccuucgaggccaccggcaaccugguggugcccagauacgccuucgccauggagagaaacgccggcagcggcaucaucaucagcgacacccccgugcacgacugcaacaccaccugccagacccccaagggcgccaucaacaccagccugcccuuccagaacauccaccccaucaccaucggcaagugccccaaguacgugaagagcaccaagcugagacuggccaccggccugagaaacgugcccagcauccagagcagaggccuguucggcgccaucgccggcuucaucgagggcggcuggaccggcaugguggacggcugguacggcuaccaccaccagaacgagcagggcagcggcuacgccgccgaccugaagagcacccagaacgccaucgacaagaucaccaacaaggugaacagcgugaucgagaagaugaacacccaguucaccgccgugggcaaggaguucaaccaccuggagaagagaaucgagaaccugaacaagaagguggacgacggcuuccuggacaucuggaccuacaacgccgagcugcuggugcugcuggagaacgagagaacccuggacuaccacgacagcaacgugaagaaccuguacgagaaggugagaaaccagcugaagaacaacgccaaggagaucggcaacggcugcuucgaguucuaccacaagugcgacaacaccugcauggagagcgugaagaacggcaccuacgacuaccccaaguacagcgaggaggccaagcugaacagagaggagaucgacggcgugaagcuggagagcaccagaaucuaccagauccuggccaucuacagcaccguggccagcagccuggugcugguggugagccugggcgccaucagcuucuggaugugcagcaacggcagccugcagugcagaaucugcaucuga

SEQ ID NO: 166515 - RNA, 1701 nt, Artificial Sequence
  derived and/or modified CDS sequence (opt4) from hemagglutinin__InfluenzaA__ADX21078
augaagaccaucaucgcccugagcuacauccugugccugguguucgcccagaagcugcccggcaacgacaacagcaccgccacccugugccugggccaccacgccgugcccaacggcaccguggugaagaccaucaccaacgaccagaucgaggugaccaacgccaccgagcuggugcagagcagcagcaccggcgagaucugcgacagcccccaccagauccuggacggcaagaacugcacccugaucgacgcccugcugggcgacccccagugcgacggcuuccagaacaagaagugggaccuguucguggagagaagcaaggccuacagcaacugcuaccccuacgacgugcccgacuacgccagccugagaagccugguggccagcagcggcacccuggaguucaacaacgagagcuucaacuggaccggcgugacccagaacggcaccagcagcgccugcaucagaagaagcaagaacagcuucuucagcagacugaacuggcugacccaccugaacuucaaguacaccgcccugaacgugaccaugcccaacaacgagcaguucgacaagcuguacaucuggggcgugcaccaccccggcaccgacaaggaccagaucuuccuguacgcccaggccagcggcagaaucaccgugagcaccaagagaagccagcagaccgugauccccaacaucggcagcagacccagagugagaaacauccccagcagaaucagcaucuacuggaccaucgugaagcccggcgacauccugcugaucaacagcaccggcaaccugaucgcccccagaggcuacuucaagaucagaagcggcaagagcagcaucaugagaagcgacgcccccaucggcaagugcaacagcgagugcaucacccccaacggcagcauccccaacgacaagcccuuccagaacgugaacagaaucaccuacggcgccugccccagauacgugaagcagaacacccugaagcuggccaccggcaugagaaacgugcccgagaagcagaccagaggcaucuucggcgccaucgccggcuucaucgagaacggcugggagggcaugguggacggcugguacggcuucagacaccagaacagcgagggcagaggccaggccgccgaccugaagagcacccaggccgccaucgaccagaucaacggcaagcugaacagacugaucagaaagaccaacgagaaguuccaccagaucgagaaggaguucagcgagguggagggcagaauccaggaccuggagaaguacguggaggacaccaagaucgaccuguggagcuacaacgccgagcugcugguggcccuggagaaccagcacaccaucgaccugaccgacagcgagaugaacaagcuguucgagaagaccaagaagcagcugagagagaacgccgaggacaugggcaacggcugcuucaagaucuaccacaagugcgacaacgccugcaucggcagcaucagaaacggcaccuacgaccacgacguguacagagacgaggcccugaacaacagauuccagaucaagggcguggagcugaagagcggcuacaaggacuggauccuguggaucagcuucgccaucagcugcuuccugcugugcguggcccugcugggcuucaucaugugggccugccagaagggcaacaucagaugcaacaucugcaucuga

SEQ ID NO: 166516 - RNA, 1701 nt, Artificial Sequence; identical to SEQ ID NO: 166515
  derived and/or modified CDS sequence (opt4) from hemagglutinin__InfluenzaA__ADX21088

SEQ ID NO: 166517 - RNA, 1701 nt, Artificial Sequence
  derived and/or modified CDS sequence (opt4) from hemagglutinin__InfluenzaA__ADX21098
augaaggccauccugguggugcugcuguacaccuucgccaccgccaacgccgacacccugugcaucggcuaccacgccaacaacagcaccgacaccguggacaccgugcuggagaagaacgugaccgugacccacagcgugaaccugcuggaggacaagcacaacggcaagcugugcaagcugagaggcguggccccccugcaccugggcaagugcaacaucgccggcuggauccugggcaaccccgagugcgagagccugagcaccgccagcagcuggagcuacaucguggagaccagcagcagcgacaacggcaccugcuaccccggcgacuucaucgacuacgaggagcugagagagcagcugagcagcgugagcagcuucgagagauucgagaucuuccccaagaccagcagcuggcccaaccacgacagcaacaagggcgugaccgccgccugcccccacgccggcgccaagagcuucuacaagaaccugaucuggcuggugaagaagggcaacagcuaccccaagcugagcaagagcuacaucaacgacaagggcaaggaggugcuggugcuguggggcauccaccaccccagcaccagcgccgaccagcagagccuguaccagaacgccgacgccuacguguucgugggcaccagcagauacagcaagaaguucaagcccgagaucgccaucagacccaaggugagagaccaggagggcagaaugaacuacuacuggacccugguggagcccggcgacaagaucaccuucgaggccaccggcaaccugguggugcccagauacgccuucgccauggagagaaacgccggcagcggcaucaucaucagcgacacccccgugcacgacugcagcaccaccugccagacccccaagggcgccaucaacaccagccugcccuuccagaacauccaccccaucaccaucggcaagugccccaaguacgugaagagcaccaagcugagacuggccaccggccugagaaacgugcccagcauccagagcagaggccuguucggcgccaucgccggcuucaucgagggcggcuggaccggcaugguggacggcugguacggcuaccaccaccagaacgagcagggcagcggcuacgccgccgaccugaagagcacccagaacgccaucgacgagaucaccaacaaggugaacagcgugaucgagaagaugaacacccaguucaccgccgugggcaaggaguucaaccaccuggagaagagaaucgagaaccugaacaagaagguggacgacggcuuccuggacaucuggaccuacaacgccgagcugcuggugcugcuggagaacgagagaacccuggacuaccacgacagcaacgugaagaaccuguacgagaaggugagaagccagcugaagaacaacgccaaggagaucggcaacggcugcuucgaguucuaccacaagugcgacaacaccugcauggagagcgugaagaacggcaccuacgacuaccccaaguacagcgaggaggccaagcugaacagagaggagaucgacggcgugaagcuggagagcaccagaauccaccagauccuggccaucuacagcaccguggccagcagccuggugcugguggugagccugggcgccaucagcuucuggaugugcagcaacggcagccugcagugcagaaucugcaucuga

SEQ ID NO: 166518 - RNA, 1701 nt, Artificial Sequence; identical to SEQ ID NO: 163648
  derived and/or modified CDS sequence (opt4) from hemagglutinin__InfluenzaA__ADX36109

SEQ ID NO: 166519 - RNA, 1701 nt, Artificial Sequence
  derived and/or modified CDS sequence (opt4) from hemagglutinin__InfluenzaA__ADX96278
augaaggccauccugguggugcugcuguacaccuucgccaccgccaacgccgacacccugugcaucggcuaccacgccaacaacagcaccgacaccguggacaccgugcuggagaagaacgugaccgugacccacagcgugaacauccuggaggacaagcacaacggcaagcugugcaagcugagaggcguggccccccugcaccugggcaagugcaacaucgccggcuggauccugggcaaccccgagugcgagagccugagcaccgccagcagcuggagcuacaucguggagaccagcagcagcgacaacggcaccugcuaccccggcgacuucaucgacuacgaggagcugagagagcagcugagcagcgugagcagcuucgagagauucgagaucuuccccaagaccagcagcuggcccaaccacgacagcaacaagggcgugaccgccgccugcccccacgccggcgccaagggcuucuacaagaaccugaucuggcuggugaagaagggcaacagcuaccccaagcugagcaagagcuacaucaacgacaagggcaaggaggugcuggugcuguggggcauccaccaccccagcaccagcgccgaccagcagagccuguaccagaacgccgacgccuacguguucgugggcagcagcagauacagcaagaaguucaagcccgagaucgccaucagacccaaggugagagaccaggagggcagaaugaacuacuacuggacccugguggagcccggcgacaagaucaccuucgaggccaccggcaaccugguggugcccagauacgccuucgccauggagagaaacgccggcagcggcaucaucaucagcgacacccccgugcacgacugcaacaccaccugccagacccccaagggcgccgugaacaccagccugcccuuccagaacauccaccccaucaccaucggcaagugccccaaguacgugaagagcaccaagcugagacuggccaccggccugagaaacgugcccagcauccagagcagaggccuguucggcgccaucgccggcuucaucgagggcggcuggaccggcaugguggacggcugguacggcuaccaccaccagaacgagcagggcagcggcuacgccgccgaccugaagagcacccagaacgccaucgacgagaucaccaacaaggugaacagcgugaucgagaagaugaacacccaguucaccgccgugggcaaggaguucaaccaccuggagaagagaaucgagaaccugaacaagaagguggacgacggcuuccuggacaucuggaccuacaacgccgagcugcuggugcugcuggagaacgagagaacccuggacuaccacgacagcaacgugaagaaccuguacgagaaggugagaagccagcugaagaacaacgccaaggaggugggcaacggcugcuucgaguucuaccacaagugcgacaacaccugcauggagagcgugaagaacggcaccuacgacuaccccaaguacagcgaggaggccaagcugaacagagaggagaucgacggcgugaagcuggagagcaccagaaucuaccagauccuggccaucuacagcaccgccgccagcagccuggugcugguggugagccugggcgccaucagcuucuggaugugcagcaacggcagccugcagugcagaaucugcaucuga

SEQ ID NO: 166520 - RNA, 1701 nt, Artificial Sequence
  derived and/or modified CDS sequence (opt4) from hemagglutinin__InfluenzaA__ADX96288
augaaggccauccugguggugcugcuguacaccuucgccaccgccaacgccgacacccugugcaucggcuaccacgccaacaacagcaccgacaccguggacaccgugcuggagaagaacgugaccgugacccacagcgugaacauccuggaggacaagcacaacggcaagcugugcaagcugagaggcguggccccccugcaccugggcaagugcaacaucgccggcuggauccugggcaaccccgagugcgagagccugagcaccgccagcagcuggagcuacaucguggagaccagcagcagcgacaacggcaccugcuaccccggcgacuucaucgacuacgaggagcugagagagcagcugagcagcgugagcagcuucgagagauucgagaucuuccccaagaccagcagcuggcccaaccacgacagcaacaagggcgugaccgccgccugcccccacgccggcgccaagagcuucuacaagaaccugaucuggcuggugaagcagggcaacagcuaccccaagcugagcaagagcuacaucaacgacaagggcaaggaggugcuggugcuguggggcauccaccaccccagcaccagcgccgaccagcagagccuguaccagaacgccgacgccuacguguucgugggcagcagcagauacagcaagaaguucaagcccgagaucgccaucagacccaaggugagagaccaggagggcagaaugaacuacuacuggacccugguggagcccggcgacaagaucaccuucgaggccaccggcaaccugguggugcccagauacgccuucgccauggagagaaacgccggcagcggcaucaucaucagcgacacccccgugcacgacugcaacaccaccugccagacccccaagggcgccaucaacaccagccugcccuuccagaacauccaccccaucaccaucggcaagugccccaaguacgugaagagcaccaagcugagacuggccaccggccugagaaacgugcccagcauccagagcagaggccuguucggcgccaucgccggcuucaucgagggcggcuggaccggcaugguggacggcugguacggcuaccaccaccagaacgagcagggcagcggcuacgccgccgaccugaagagcacccagaacgccaucgacgagaucaccaacaaggugaacagcgugaucgagaagaugaacacccaguucaccgccgugggcaaggaguucaaccaccuggagaagagaaucgagaaccugaacaagaagguggacgacggcuuccuggacaucuggaccuacaacgccgagcugcuggugcugcuggagaacgagagaacccuggacuaccacgacagcaacgugaagaaccuguacgagaaggugagaagccagcugaagaacaacgccaaggaggugggcaacggcugcuucgaguucuaccacaagugcgacaacaccugcauggagagcgugaagaacggcaccuacgacuaccccaaguacagcgaggaggccaagcugaacagagaggagaucgacggcgugaagcuggagagcaccagaaucuaccagauccuggccaucuacagcaccgccgccagcagccuggugcugguggugagccugggcgccaucagcuucuggaugugcagcaacggcagccugcagugcagaaucugcaucuga

SEQ ID NO: 166521 - RNA, 1701 nt, Artificial Sequence
  derived and/or modified CDS sequence (opt4) from hemagglutinin__InfluenzaA__ADX96298
augaaggccauccugguggugcugcuguacaccuucgccaccgccaacgccgacacccugugcaucggcuaccacgccaacaacagcaccgacaccguggacaccgugcuggagaagaacgugaccgugacccacagcgugaacauccuggaggacaagcacaacggcaagcugugcaagcugagaggcguggccccccugcaccugggcaagugcaacaucgccggcuggauccugggcaaccccgagugcgagagccugagcaccgccagcagcuggagcuacaucguggagaccagcagcagcgacaacggcaccugcuaccccggcgacuucaucgacuacgaggagcugagagagcagcugagcagcgugagcagcuucgagagauucgagaucuuccccaagaccagcagcuggcccaaccacgacagcaacaagggcgugaccgccgccugcccccacgccggcgccaagagcuucuacaagaaccugaucuggcuggugaagaagggcaacagcuaccccaagcugagcaagagcuacaucaacgacaagggcaaggaggugcuggugcuguggggcauccaccaccccagcaccagcgccgaccagcagagccuguaccagaacgccgacgccuacguguucgugggcaccagcagauacagcaagaaguucaagcccgagaucgugaucagacccaaggugagagaccaggagggcagaaugaacuacuacuggacccugguggagcccggcgacaagaucaccuucgaggccaccggcaaccugguggugcccagauacgccuucgccauggagagaaacgccggcagcggcaucaucaucagcgacacccccgugcacgacugcaacaccaccugccagacccccaagggcgccaucaacaccagccugcccuuccagaacauccaccccaucaccaucggcaagugccccaaguacgugaagagcaccaagcugagacuggccaccggccugagaaacgugcccagcauccagagcagaggccuguucggcgccaucgccggcuucaucgagggcggcuggaccggcaugguggacggcugguacggcuaccaccaccagaacgagcagggcagcggcuacgccgccgaccugaagagcacccagaacgccaucgacgagaucaccaacaaggugaacagcgugaucgagaagaugaacacccaguucaccgccgugggcaaggaguucaaccaccuggagaagagaaucgagaaccugaacaagaagguggacgacggcuuccuggacaucuggaccuacaacgccgagcugcuggugcugcuggagaacgagagaacccuggacuaccacgacagcaacgugaagaaccuguacgagaaggugagaagccagcugaagaacaacgccaaggagaucggcaacggcugcuucgaguucuaccacaagugcgacaacaccugcauggagagcgugaagaacggcaccuacgacuaccccaaguacagcgaggaggccaagcugaacagagaggagaucgacggcgugaagcuggagagcaccagaaucuaccagauccuggccaucuacagcaccguggccagcagccuggugcugguggugagccugggcgccaucagcuucuggaugugcagcaccggcagccugcagugcagaaucugcaucuga

SEQ ID NO: 166522 - RNA, 1701 nt, Artificial Sequence; identical to SEQ ID NO: 164326
  derived and/or modified CDS sequence (opt4) from hemagglutinin__InfluenzaA__ADX96308

SEQ ID NO: 166523 - RNA, 1701 nt, Artificial Sequence
  derived and/or modified CDS sequence (opt4) from hemagglutinin__InfluenzaA__ADX96318
augaaggccauccugguggugcugcuguacaccuucgccaccgccaacgccgacacccugugcaucggcuaccacgccaacaacagcaccgacaccguggacaccgugcuggagaagaacgugaccgugacccacagcgugaaccugcuggaggacaagcacaacggcaagcugugcaagcugagaggcguggccccccugcaccugggcaagugcaacaucgccggcuggauccugggcaaccccgagugcgagagccugagcaccgccagcagcuggagcuacaucguggagaccagcagcagcgacaacggcaccugcuaccccggcgacuucaucgacuacgaggagcugagagagcagcugagcagcgugagcagcuucgagagauucgagaucuuccccaagaccagcagcuggcccaaccacgacagcaacaagggcgugaccgccgccugcccccacgccggcgccaagagcuucuacaagaaccugaucuggcuggugaagaagggcaacagcuaccccaagcugagcaagagcuacaucaacgacaagggcaaggaggugcuggugcuguggggcauccaccaccccagcaccagcgccgaccagcagagccuguaccagaacgccgacagcuacguguucgugggcaccagcagauacagcaagaaguucaagcccgagaucgccaucagacccaaggugagagaccaggagggcagaaugaacuacuacuggacccugguggagcccggcgacaagaucaccuucgaggccaccggcaaccugguggugcccagauacgccuucgccauggagagaaacgccggcagcggcaucaucaucagcgacacccccgugcacgacugcaacaccaccugccagacccccaagggcgccaucaacaccagccugcccuuccagaacauccaccccaucaccaucggcaagugccccaaguacgugaagagcaccaagcugagacuggccaccggccugagaaacgugcccagcauccagagcagaggccuguucggcgccaucgccggcuucaucgagggcggcuggaccggcaugguggacggcugguacggcuaccaccaccagaacgagcagggcagcggcuacgccgccgaccugaagagcacccagaacgccaucgacaagaucaccaacaaggugaacagcgugaucgagaagaugaacacccaguucaccgccgugggcaaggaguucaaccaccuggagaagagaaucgagaaccugaacaagaagguggacgacggcuuccuggacaucuggaccuacaacgccgagcugcuggugcugcuggagaacgagagaacccuggacuaccacgacagcaacgugaagaaccuguacgagaaggugagaagccagcugaagaacaacgccaaggagaucggcaacggcugcuucgaguucuaccacaagugcgacaacaccugcauggagagcgugaagaacggcaccuacgacuaccccaaguacagcgaggaggccaagcugaacagagaggagaucgacggcgugaagcuggagagcaccagaaucuaccagauccuggccaucuacagcaccguggccagcagccuggugcugguggugagccugggcgccaucagcuucuggaugugcagcaacggcagccugcagugcagaaucugcaucuga

SEQ ID NO: 166524 - RNA, 1701 nt, Artificial Sequence
  derived and/or modified CDS sequence (opt4) from hemagglutinin__InfluenzaA__ADX96328
augaaggccauccugguggugcugcuguacaccuucgccaccgccaacgccgacacccugugcaucggcuaccacgccaacaacagcaccgacaccguggacaccgugcuggagaagaacgugaccgugacccacagcgugaaccugcuggaggacaagcacaacggcaagcugugcaagcugagaggcguggccccccugcaccugggcaagugcaacaucgccggcuggauccugggcaaccccgagugcgagagccugagcaccgccagcagcuggagcuacaucguggagaccagcagcagcgacaacggcaccugcuaccccggcgacuucaucgacuacgaggagcugagagagcagcugagcagcgugagcagcuucgagagauucgagaucuuccccaagaccagcagcuggcccaaccacgacagcaacaagggcgugaccgccgccugcccccacgccggcgccaagagcuucuacaagaaccugaucuggcuggugaagaagggcaacagcuaccccaagcugagcaagagcuacaucaacgacaagggcaaggaggugcuggugcuguggggcauccaccaccccagcaccagcgccgaccagcagagccuguaccagaacgccgacgccuacguguucgugggcaccagcagauacagcaagaaguucaagcccgagaucgccaucagacccaaggugagagaccaggagggcagaaugaacuacuacuggacccugguggagcccggcgacaagaucaccuucgaggccaccggcaaccugguggcccccagauacgccuucgccauggagagaaacgccggcagcggcaucaucaucagcgacacccccgugcacgacugcaacaccaccugccagacccccaagggcgccaucaacaccagccugcccuuccagaacauccaccccaucaccaucggcaagugccccaaguacgugaagagcaccaagcugagacuggccaccggccugagaaacgugcccagcauccagagcagaggccuguucggcgccaucgccggcuucaucgagggcggcuggaccggcaugguggacggcugguacggcuaccaccaccagaacgagcagggcagcggcuacgccgccgaccugaagagcacccagaacgccaucgacaagaucaccaacaaggugaacagcgugaucgagaagaugaacacccaguucaccgccgugggcaaggaguucaaccaccuggagaagagaaucgagaaccugaacaagaagguggacgacggcuuccuggacaucuggaccuacaacgccgagcugcuggugcugcuggagaacgagagaacccuggacuaccacgacagcaacgugaagaaccuguacgagaaggugagaagccagcugaagaacaacgccaaggagaucggcaacggcugcuucgaguucuaccacaagugcgacaacaccugcauggagagcgugaagaacggcaccuacgacuaccccaaguacagcgaggaggccaagcugaacagagaggagaucgacggcgugaagcuggagagcaccagaaucuaccagauccuggccaucuacagcaccguggccagcagccuggugcugguggugagccugggcgccaucagcuucuggaugugcagcaacggcagccugcagugcagaaucugcaucuga

SEQ ID NO: 166525 - RNA, 1701 nt, Artificial Sequence
  derived and/or modified CDS sequence (opt4) from hemagglutinin__InfluenzaA__ADX96347
augaaggccauccugguggugcugcuguacaccuucgccaccgccaacgccgacacccugugcaucggcuaccacgccaacaacagcaccgacaccguggacaccgugcuggagaagaacgugaccgugacccacagcgugaaccugcuggaggacaagcacaacggcaagcugugcaagcugagaggcguggccccccugcaccugggcaagugcaacaucgccggcuggauccugggcaaccccgagugcgagagccugagcaccgccagcagcuggagcuacaucguggagaccagcagcagcgacaacggcaccugcuaccccggcgacuucaucgacuacgaggagcugagagagcagcugagcagcgugagcagcuucgagagauucgagaucuuccccaagaccagcagcuggcccaaccacgacagcaacaagggcgugaccgccgccugcccccacgccggcgccaagagcuucuacaagaaccugaucuggcuggugaagaagggcaacagcuaccccaagcugagcaagagcuacaucaacgacaagggcaaggaggugcuggugcuguggggcauccaccaccccagcaccagcgccgaccagcagagccuguaccagaacgccgacgccuacguguucgugggcaccagcagauacagcaagaaguucaagcccgagaucgccaucagacccaaggugagagaccaggagggcagaaugaacuacuacuggacccugguggagcccggcgacaagaucaccuucgaggccaccggcaaccugguggugcccagauacgccuucgccauggagagaaacgccggcagcggcaucaucaucagcgacacccccgugcacaacugcaacaccaccugccagacccccaagggcgccaucaacaccagccugcccuuccagaacauccaccccaucaccaucggcaagugccccaaguacgugaagagcaccaagcugagacuggccaccggccugagaaacgugcccagcauccagagcagaggccuguucggcgccaucgccggcuucaucgagggcggcuggaccggcaugguggacggcugguacggcuaccaccaccagaacgagcagggcagcggcuacgccgccgaccugaagagcacccagaacgccaucgacaagaucaccaacaaggugaacagcgugaucgagaagaugaacacccaguucaccgccgugggcaaggaguucaaccaccuggagaagagaaucgagaaccugaacaagaagguggacgacggcuuccuggacaucuggaccuacaacgccgagcugcuggugcugcuggagaacgagagaacccuggacuaccacgacagcaacgugaagaaccuguacgagaaggugagaagccagcugaagaacaacgccaaggagaucggcaacggcugcuucgaguucuaccacaagugcgacaacaccugcauggagagcgugaagaacggcaccuacgacuaccccaaguacagcgaggaggccaagcugaacagagaggagaucgacggcgugaagcuggagagcaccagaaucuaccagauccuggccaucuacagcaccguggccagcagccuggugcugguggugagccugggcgccaucagcuucuggaugugcagcaacggcagccugcagugcagaaucugcaucuga

SEQ ID NO: 166526 - RNA, 1701 nt, Artificial Sequence
  derived and/or modified CDS sequence (opt4) from hemagglutinin__InfluenzaA__ADX96357
augaaggccauccugguggugcugcuguacaccuucgccaccgccaacgccgacacccugugcaucggcuaccacgccaacaacagcaccgacaccguggacaccgugcuggagaagaacgugaccgugacccacagcgugaacauccuggaggacaagcacaacggcaagcugugcaagcugagaggcguggccccccugcaccugggcaagugcaacaucgccggcuggauccugggcaaccccgagugcgagagccugagcaccgccagcagcuggagcuacaucguggagaccagcagcagcgacaacggcaccugcuaccccggcgacuucaucgacuacgaggagcugagagagcagcugagcagcgugagcagcuucgagagauucgagaucuuccccaagaccagcagcuggcccaaccacgacagcaacaagggcgugaccgccgccugcccccacgccggcgccaagagcuucuacaagaaccugaucuggcuggugaagaagggcaacagcuaccccaagcugagcaagagcuacaucaacgacaagggcaaggaggugcuggugcuguggggcauccaccaccccagcaccagcgccgaccagcagagccuguaccagaacgccgacgccuacguguucgugggcaccagcagauacagcaagaaguucaagcccgagaucgugaucagacccaaggugagagaccaggagggcagaaugaacuacuacuggacccugguggagcccggcgacaagaucaccuucgaggccaccggcaaccugguggugcccagauacgccuucgccauggagagaaacgccggcagcggcaucaucaucagcgacacccccgugcacgacugcaacaccaccugccagacccccaagggcgccaucaacaccagccugcccuuccagaacauccaccccaucaccaucggcaagugccccaaguacgugaagagcaccaagcugagacuggccaccggccugagaaacgugcccagcauccagagcagaggccuguucggcgccaucgccggcuucaucgagggcggcuggaccggcaugguggacggcugguacggcuaccaccaccagaacgagcagggcagcggcuacgccgccgaccugaagagcacccagaacgccaucgacgagaucaccaacaaggugaacagcgugaucgagaagaugaacacccaguucaccgccgugggcaaggaguucaaccaccuggagaagagaaucgagaaccugaacaagaagguggacgacggcuuccuggacaucuggaccuacaacgccgagcugcuggugcugcuggagaacgagagaacccuggacuaccacgacagcaacgugaagaaccuguacgagaaggugagaagccagcugaagaacaacgccaaggagaucggcaacggcugcuucgaguucuaccacaagugcgacaacaccugcauggagagcgugaagaacggcaccuacgacuaccccaaguacagcgaggaggccaagcugaacagagaggagaucgacggcgugaagcuggagagcaccagaaucuaccagauccuggccaucuacagcaccguggccagcagccuggugcugguggugagccugggcgccaucagcuucuggaugugcagcaacggcagccugcagugcagaaucugcaucuga

SEQ ID NO: 166527 - RNA, 1701 nt, Artificial Sequence; identical to SEQ ID NO: 165666
  derived and/or modified CDS sequence (opt4) from hemagglutinin__InfluenzaA__ADX96367

SEQ ID NO: 166528 - RNA, 1701 nt, Artificial Sequence
  derived and/or modified CDS sequence (opt4) from hemagglutinin__InfluenzaA__ADX96378
augaaggccauccugguggugcugcuguacaccuucgccaccgccaacgccgacacccugugcaucggcuaccacgccaacaacagcaccgacaccguggacaccgugcuggagaagaacgugaccgugacccacagcgugaaccugcuggaggacaagcacaacggcaagcugugcaagcugagaggcguggccccccugcaccugggcaagugcaacaucgccggcuggauccugggcaaccccgagugcgagagccugagcaccgccagcagcuggagcuacaucguggagaccagcagcagcgacaacggcaccugcuaccccggcgacuucaucgacuacgaggagcugagagagcagcugagcagcgugagcagcuucgagagauucgagaucuuccccaagaccagcagcuggcccaaccacgacagcaacaagggcgugaccgccgccugcccccacgccggcgccaagagcuucuacaagaaccugaucuggcuggugaagaagggcaacagcuaccccaagcugagcaagagcuacaucaacgacaagggcaaggaggugcuggugcuguggggcauccaccaccccagcaccagcgccgaccagcagagccuguaccagaacgccgacgccuacguguucgugggcaccagcagauacagcaagaaguucaagcccgagaucgccaucagacccaaggugagagaccaggagggcagaaugaacuacuacuggacccugguggagcccggcgacaagaucaccuucgaggccaccggcaaccugguggugcccagauacgccuucgccauggagagaaacgccggcagcggcaucaucaucagcgacacccccauccacgacugcaacaccaccugccagacccccaagggcgccaucaacaccagccugcccuuccagaacauccaccccaucaccaucggcaagugccccaaguacgugaagagcaccaagcugagacuggccaccggccugagaaacgugcccagcauccagagcagaggccuguucggcgccaucgccggcuucaucgagggcggcuggaccggcaugguggacggcugguacggcuaccaccaccagaacgagcagggcagcggcuacgccgccgaccugaagagcacccagaacgccaucgacgagaucaccaacaaggugaacagcgugaucgagaagaugaacacccaguucaccgccgugggcaaggaguucaaccaccuggagaagagaaucgagaaccugaacaagaagguggacgacggcuuccuggacaucuggaccuacaacgccgagcugcuggugcugcuggagaacgagagaacccuggacuaccacgacagcaacgugaagaaccuguacgagaaggugagaagccagcugaagaacaacgccaaggagaucggcaacggcugcuucgaguucuaccacaagugcgacaacaccugcauggagagcgugaagaacggcaccuacgacuaccccaaguacagcgaggaggccaagcugaacagagaggagaucgacggcgugaagcuggagagcaccagaaucuaccagauccuggccaucuacagcaccguggccagcagccuggugcugguggugagccugggcgccaucagcuucuggaugugcagcaacggcagccugcagugcagaaucugcaucuga

SEQ ID NO: 166529 - RNA, 1701 nt, Artificial Sequence; identical to SEQ ID NO: 166528
  derived and/or modified CDS sequence (opt4) from hemagglutinin__InfluenzaA__ADX96398

SEQ ID NO: 166530 - RNA, 1701 nt, Artificial Sequence
  derived and/or modified CDS sequence (opt4) from hemagglutinin__InfluenzaA__ADX96408
augaaggccauccugguggugcugcuguacaccuucgccaccgccaacgccgacacccugugcaucggcuaccacgccaacaacagcaccgacaccguggacaccgugcuggagaagaacgugaccgugacccacagcgugaacauccuggaggacaagcacaacggcaagcugugcaagcugagaggcguggccccccugcaccugggcaagugcaacaucgccggcuggauccugggcaaccccgagugcgagagccugagcaccgccagcagcuggagcuacaucguggagaccagcagcagcgacaacggcaccugcuaccccggcgacuucaucgacuacgaggagcugagagagcagcugagcagcgugagcagcuucgagagauucgagaucuuccccaagaccagcagcuggcccaaccacgacagcaacaagggcgugaccgccgccugcccccacgccggcgccaagagcuucuacaagaaccugaucuggcuggugaagaagggcaacagcuaccccaagcugagcaagagcuacaucaacgacaagggcaaggaggugcuggugcuguggggcauccaccaccccagcaccagcgccgaccagcagagccuguaccagaacgccgacgccuacguguucgugggcaccagcagauacagcaagaaguucaagcccgagaucgccaucagacccaaggugagagaccaggagggcagaaugaacuacuacuggacccugguggagcccggcgacaagaucaccuucgaggccaccggcaaccugguggugcccagauacgccuucgccauggagagaaacgccggcagcggcaucaucaucagcgacacccccauccacgacugcaacaccaccugccagacccccaagggcgccaucaacaccagccugcccuuccagaacauccaccccaucaccaucggcaagugccccaaguacgugaagagcaccaagcugagacuggccaccggccugagaaacgugcccagcauccagagcagaggccuguucggcgccaucgccggcuucaucgagggcggcuggaccggcaugguggacggcugguacggcuaccaccaccagaacgagcagggcagcggcuacgccgccgaccugaagagcacccagaacgccaucgacgagaucaccaacaaggugaacagcgugaucgagaagaugaacacccaguucaccgccgugggcaaggaguucaaccaccuggagaagagaaucgagaaccugaacaagaagguggacgacggcuuccuggacaucuggaccuacaacgccgagcugcuggugcugcuggagaacgagagaacccuggacuaccacgacagcaacgugaagaaccuguacgagaaggugagaagccagcugaagaacaacgccaaggagaucggcaacggcugcuucgaguucuaccacaagugcgacaacaccugcauggagagcgugaagaacggcaccuacgacuaccccaaguacagcgaggaggccaagcugaacagagaggagaucgacggcgugaagcuggagagcaccagaaucuaccagauccuggccaucuacagcaccguggccagcagccuggugcugguggugagccugggcgccaucagcuucuggaugugcagcaacggcagccugcagugcagaaucugcaucuga

SEQ ID NO: 166531 - RNA, 1701 nt, Artificial Sequence; identical to SEQ ID NO: 163042
  derived and/or modified CDS sequence (opt4) from hemagglutinin__InfluenzaA__ADX96427

SEQ ID NO: 166532 - RNA, 1701 nt, Artificial Sequence
  derived and/or modified CDS sequence (opt4) from hemagglutinin__InfluenzaA__ADX96437
augaaggccauccugguggugcugcuguacaccuucgccaccgccaacgccgacacccugugcaucggcuaccacgccaacaacagcaccgacaccguggacaccgugcuggagaagaacgugaccgugacccacagcgugaacauccuggaggacaagcacaacggcaagcugugcaagcugagaggcguggccccccugcaccugggcaagugcaacaucgccggcuggauccugggcaaccccgagugcgagagccugagcaccgccagcagcuggagcuacaucguggagaccagcagcagcgacaacggcaccugcuaccccggcgacuucaucgacuacgaggagcugagagagcagcugagcagcgugagcagcuucgagagauucgagaucuuccccaagaccagcagcuggcccaaccacgacagcaacaagggcgugaccgccgccugcccccacgccggcgccaagagcuucuacaagaaccugaucuggcuggugaagaagggcaacagcuaccccaagcugagcaagagcuacaucaacgacaagggcaaggaggugcuggugcuguggggcauccaccaccccagcaccagcgccgaccagcagagccuguaccagaacgccgacgccuacguguucgugggcagcagcagauacagcaagaaguucaagcccgagaucgccaucagacccaaggugagagaccaggagggcagaaugaacuacuacuggacccugguggagcccggcgacaagaucaccuucgaggccaccggcaaccugguggugcccagauacgccuucgccauggagagaaacgccggcagcggcaucaucaucagcgacacccccgugcacgacugcaacaccaccugccagacccccaagggcgccaucaacaccagccugcccuuccagaacauccaccccaucaccaucggcaagugccccaaguacgugaagagcaccaagcugagacuggccaccggccugagaaacgugcccagcauccagagcagaggccuguucggcgccaucgccggcuucaucgagggcggcuggaccggcaugguggacggcugguacggcuaccaccaccagaacgagcagggcagcggcuacgccgccgaccugaagagcacccagaacgccaucgacgagaucaccaacaaggugaacagcgugaucgagaagaugaacacccaguucaccgccgugggcaaggaguucaaccaccuggagaagagacuggagaaccugaacaagaagguggacgacggcuuccuggacaucuggaccuacaacgccgagcugcuggugcugcuggagaacgagagaacccuggacuaccacgacagcaacgugaagaaccuguacgagaaggugagaagccagcugaagaacaacgccaaggaggugggcaacggcugcuucgaguucuaccacaagugcgacaacaccugcauggagagcgugaagaacggcaccuacgacuaccccaaguacagcgaggaggccaagcugaacagagaggagaucgacggcgugaagcuggagagcaccagaaucuaccagauccuggccaucuacagcaccgccgccagcagccuggugcugguggugagccugggcgccaucagcuucuggaugugcagcaacggcagccugcagugcagaaucugcaucuga

SEQ ID NO: 166533 - RNA, 1701 nt, Artificial Sequence; identical to SEQ ID NO: 162716
  derived and/or modified CDS sequence (opt4) from hemagglutinin__InfluenzaA__ADX96447

SEQ ID NO: 166534 - RNA, 1701 nt, Artificial Sequence; identical to SEQ ID NO: 162729
  derived and/or modified CDS sequence (opt4) from hemagglutinin__InfluenzaA__ADX96497

SEQ ID NO: 166535 - RNA, 1701 nt, Artificial Sequence
  derived and/or modified CDS sequence (opt4) from hemagglutinin__InfluenzaA__ADX96507
augaaggccauccugguggugcugcuguacaccuucgccaccgccaacgccgacacccugugcaucggcuaccacgccaacaacagcaccgacaccguggacaccgugcuggagaagaacgugaccgugacccacagcgugaaccugcuggaggacaagcacaacggcaagcugugcaagcugagaggcguggccccccugcaccugggcaagugcaacaucgccggcuggauccugggcaaccccgagugcgagagccugagcaccgccagcagcuggagcuacaucguggagaccagcagcagcgacaacggcaccugcuaccccggcgacuucaucgacuacgaggagcugagagagcagcugagcagcgugagcagcuucgagagauucgagaucuuccccaagaccagcagcuggcccaaccacgacagcaacaagggcgugaccgccgccugcccccacgccggcgccaagagcuucuacaagaaccugaucuggcuggugaagaagggcaacagcuaccccaagcugagcaagagcuacaucaacgacaagggcaaggaggugcuggugcuguggggcauccaccaccccagcaccagcgccgaccagcagagccuguaccagaacgccgacgccuacguguucgugggcaccagcagauacagcaagaaguucaagcccgagaucgccaucagacccaaggugagagaccaggagggcagaaugaacuacuacuggacccugguggagcccggcgacaagaucaccuucgaggccaccggcaaccugguggugcccagauacgccuucgccauggagagaaacgccggcagcggcaucaucaucagcgacacccccgugcacgacugcaacaccaccugccagacccccaagggcgccaucaacaccagccugcccuuccagaacauccaccccaucaccaucggcaagugccccaaguacgugaagagcaccaagcugagacuggccaccggccugagaaacgugcccagcauccagagcagaggccuguucggcgccaucgccggcuucaucgagggcggcuggaccggcaugguggacggcugguacggcuaccaccaccagaacgagcagggcagcggcuacgccgccgaccugaagagcacccagaacgccaucgacgagaucaccaacaaggugaacagcgugaucgagaagaugaacacccaguucaccgccgugggcaaggaguucaaccaccuggagaagagaaucgagaaccugaacaagaagguggacgacggcuuccuggacaucuggaccuacaacgccgagcugcuggugcugcuggagaacgagagaacccuggacuaccacgacagcaacgugaagaaccuguacgagaaggugagaagccagcugaagaacaacgccaaggagaucggcaacggcugcuucgaguucuaccacaagugcgacaacaccugcauggagagcgugaagaacggcaccuacgacuaccccaaguacagcgaggaggccaagcugaacagagaggagaucgacggcgugaagcuggagagcaccagaaucuaccagauccuggccaucuacagcaccguggccagcagccuggugcugguggugagccugggcgccaucagcuucuggaugugcagcaccggcagccugcagugcagaaucugcaucuga

SEQ ID NO: 166536 - RNA, 1701 nt, Artificial Sequence; identical to SEQ ID NO: 166535
  derived and/or modified CDS sequence (opt4) from hemagglutinin__InfluenzaA__ADX96517

SEQ ID NO: 166537 - RNA, 1701 nt, Artificial Sequence
  derived and/or modified CDS sequence (opt4) from hemagglutinin__InfluenzaA__ADX96527
augaaggccauccugguggugcugcuguacaccuucgccaccgccaacgccgacacccugugcaucggcuaccacgccaacaacagcaccgacaccguggacaccgugcuggagaagaacgugaccgugacccacagcgugaaccugcuggaggacaagcacaacggcaagcugugcaagcugagaggcguggccccccugcaccugggcaagugcaacaucgccggcuggauccugggcaaccccgagugcgagagccugagcaccgccagcagcuggagcuacaucguggagaccagcagcagcgacaacggcaccugcuaccccggcgacuucaucgacuacgaggagcugagagagcagcugagcagcgugagcagcuucgagagauucgagaucuuccccaagaccagcagcuggcccaaccacgacagcaacaagggcgugaccgccgccugcccccacgccggcgccaagagcuucuacaagaaccugaucuggcuggugaagaagggcaacagcuaccccaagcugagcaagagcuacaucaacgacaagggcaaggaggugcuggugcuguggggcauccaccaccccagcaccagcgccgaccagcagagccuguaccagaacgccgacgccuacguguucgugggcaccagcagauacagcaagaaguucaagcccgagaucgccaucagacccaaggugagagaccaggagggcagaaugaacuacuacuggacccugguggagcccggcgacaagaucaccuucgaggccaccggcaaccugguggugcccagauacgccuucgccauggagagaaacgccggcagcggcaucaucaucagcgacacccccgugcacgacugcaacaccaccugccagacccccaagggcgccaucaacaccagccugcccuuccagaacauccaccccaucaccaucggcaagugccccaaguacgugaagagcaccaagcugagacuggccaccggccugagaaacgugcccagcauccagagcagaggccuguucggcgccaucgccggcuucaucgagggcggcuggaccggcaugguggacggcugguacggcuaccaccaccagaacgagcagggcagcggcuacgccgccgaccugaagagcacccagaacgccaucgacgagaucaccaacaaggugaacagcgugaucgagaagaugaacacccaguucaccgccgugggcaaggaguucaaccaccuggagaagagaaucgagaaccugaacaagaagguggacgacggcuuccuggacaucuggaccuacaacgccgagcugcuggugcugcuggagaacgagagaacccuggacuaccacgacagcaacgugaagaaccuguacgagaaggugagaagccagcugaagaacaacgccaaggagaucggcaacggcugcuucgaguucuuccacaagugcgacaacaccugcauggagagcgugaagaacggcaccuacgacuaccccaaguacagcgaggaggccaagcugaacagagaggagaucgacggcgugaagcuggagagcaccagaaucuaccagauccuggccaucuacagcaccguggccagcagccuggugcugguggugagccugggcgccaucagcuucuggaugugcagcaacggcagccugcagugcagaaucugcaucuga

SEQ ID NO: 166538 - RNA, 1701 nt, Artificial Sequence; identical to SEQ ID NO: 162729
  derived and/or modified CDS sequence (opt4) from hemagglutinin__InfluenzaA__ADX96537

SEQ ID NO: 166539 - RNA, 1701 nt, Artificial Sequence; identical to SEQ ID NO: 162729
  derived and/or modified CDS sequence (opt4) from hemagglutinin__InfluenzaA__ADX96547

SEQ ID NO: 166540 - RNA, 1701 nt, Artificial Sequence; identical to SEQ ID NO: 163830
  derived and/or modified CDS sequence (opt4) from hemagglutinin__InfluenzaA__ADX96557

SEQ ID NO: 166541 - RNA, 1701 nt, Artificial Sequence; identical to SEQ ID NO: 162729
  derived and/or modified CDS sequence (opt4) from hemagglutinin__InfluenzaA__ADX96587

SEQ ID NO: 166542 - RNA, 1701 nt, Artificial Sequence; identical to SEQ ID NO: 162716
  derived and/or modified CDS sequence (opt4) from hemagglutinin__InfluenzaA__ADX96597

SEQ ID NO: 166543 - RNA, 1701 nt, Artificial Sequence; identical to SEQ ID NO: 162716
  derived and/or modified CDS sequence (opt4) from hemagglutinin__InfluenzaA__ADX96607

SEQ ID NO: 166544 - RNA, 1701 nt, Artificial Sequence
  derived and/or modified CDS sequence (opt4) from hemagglutinin__InfluenzaA__ADX96627
augaaggccauccugguggugcugcuguacaccuucgccaccgccaacgccgacacccugugcaucggcuaccacgccaacaacagcaccgacaccguggacaccgugcuggagaagaacgugaccgugacccacagcgugaaccugcuggaggacaagcacaacggcaagcugugcaagcugagaggcguggccccccugcaccugggcaagugcaacaucgccggcuggauccugggcaaccccgagugcgagagccugagcaccgccagcagcuggagcuacaucguggagaccagcagcagcgacaacggcaccugcuaccccggcgacuucaucgacuacgaggagcugagagagcagcugagcagcgugagcagcuucgagagauucgagaucuuccccaagaccagcagcuggcccaaccacgacagcaacaagggcgugaccgccgccugcccccacgccggcgccaagagcuucuacaagaaccugaucuggcuggugaagaagggcaacagcuaccccaagcugagcaagagcuacaucaacgacaagggcaaggaggugcuggugcuguggggcauccaccaccccagcaccagcgccgaccagcagagccuguaccagaacgccgacgccuacguguucgugggcaccagcagauacagcaagaaguucaagcccgagaucgccaucagacccaaggugagagaccaggagggcagaaugaacuacuacuggacccugguggagcccggcgacaagaucaccuucgaggccaccggcaaccugguggugcccagauacgccuucgccauggagaagaacgccggcagcggcaucaucaucagcgacacccccgugcacgacugcaacaccaccugccagacccccaagggcgccaucaacaccagccugcccuuccagaacauccaccccaucaccaucggcaagugccccaaguacgugaagagcaccaagcugagacuggccaccggccugagaaacgugcccagcauccagagcagaggccuguucggcgccaucgccggcuucaucgagggcggcuggaccggcaugguggacggcugguacggcuaccaccaccagaacgagcagggcagcggcuacgccgccgaccugaagagcacccagaacgccaucgacgagaucaccaacaaggugaacagcgugaucgagaagaugaacacccaguucaccgccgugggcaaggaguucaaccaccuggagaagagaaucgagaaccugaacaagaagguggacgacggcuuccuggacaucuggaccuacaacgccgagcugcuggugcugcuggagaacgagagaacccuggacuaccacgacagcaacgugaagaaccuguacgagaaggugagaagccagcugaagaacaacgccaaggagaucggcaacggcugcuucgaguucuaccacaagugcgacaacaccugcauggagagcgugaagaacggcaccuacgacuaccccaaguacagcgaggaggccaagcugaacagagaggagaucgacggcgugaagcuggagagcaccagaaucuaccagauccuggccaucuacagcaccguggccagcagccuggugcugguggugagccugggcgccaucagcuucuggaugugcagcaccggcagccugcagugcagaaucugcaucuga

SEQ ID NO: 166545 - RNA, 1701 nt, Artificial Sequence; identical to SEQ ID NO: 163176
  derived and/or modified CDS sequence (opt4) from hemagglutinin__InfluenzaA__ADX96637

SEQ ID NO: 166546 - RNA, 1701 nt, Artificial Sequence; identical to SEQ ID NO: 162729
  derived and/or modified CDS sequence (opt4) from hemagglutinin__InfluenzaA__ADX96647

SEQ ID NO: 166547 - RNA, 1701 nt, Artificial Sequence; identical to SEQ ID NO: 162716
  derived and/or modified CDS sequence (opt4) from hemagglutinin__InfluenzaA__ADX96657

SEQ ID NO: 166548 - RNA, 1701 nt, Artificial Sequence; identical to SEQ ID NO: 162729
  derived and/or modified CDS sequence (opt4) from hemagglutinin__InfluenzaA__ADX96667

SEQ ID NO: 166549 - RNA, 1701 nt, Artificial Sequence
  derived and/or modified CDS sequence (opt4) from hemagglutinin__InfluenzaA__ADX96677
augaaggccauccugguggugcugcuguacaccuucgccaccgccaacgccgacacccugugcaucggcuaccacgccaacaacagcaccgacaccguggacaccgugcuggagaagaacgugaccgugacccacagcgugaaccugcuggaggacaagcacaacggcaagcugugcaagcugagaggcguggccccccugcaccugggcaagugcaacaucgccggcuggauccugggcaaccccgagugcgagagccugagcaccgccagcagcuggagcuacaucguggagaccagcagcagcgacaacggcaccugcuaccccggcgacuucaucgacuacgaggagcugagagagcagcugagcagcgugagcagcuucgagagauucgagaucuuccccaagaccagcagcuggcccaaccacgacagcaacaagggcgugaccgccgccugcccccacgccggcgccaagagcuucuacaagaaccugaucuggcuggugaagaagggcaacagcuaccccaagcugagcaagagcuacaucaacgacaagggcaaggaggugcuggugcuguggggcauccaccaccccagcaccagcgccgaccagcagagccuguaccagaacgccgacgccuacguguucgugggcagcagcagauacagcaagaaguucaagcccgagaucgccaucagacccaaggugagagaccaggagggcagaaugaacuacuacuggaccgugguggagcccggcgacaagaucaccuucgaggccaccggcaaccugguggugcccagauacgccuucgccauggagagaaacgccggcagcggcaucaucaucagcgacacccccgugcacgacugcaacaccaccugccagacccccaagggcgccaucaacaccagccugcccuuccacaacauccaccccaucaccaucggcaagugccccaaguacgugaagagcaccaagcugagacuggccaccggccugagaaacgugcccagcauccagagcagaggccuguucggcgccaucgccggcuucaucgagggcggcuggaccggcaugguggacggcugguacggcuaccaccaccagaacgagcagggcagcggcuacgccgccgaccugaagagcacccagaacgccaucgacgagaucaccaacaaggugaacagcgugaucgagaagaugaacacccaguucaccgccgugggcaaggaguucaaccaccuggagaagagaaucgagaaccugaacaagaagguggacgacggcuuccuggacaucuggaccuacaacgccgagcugcuggugcugcuggagaacgagagaacccuggacuaccacgacagcaacgugaagaaccuguacgagaaggugagaagccagcugaagaacaacgccaaggagaucggcaacggcugcuucgaguucuaccacaagugcgacaacaccugcauggagagcgugaagaacggcaccuacgacuaccccaaguacagcgaggaggccaagcugaacagagaggagaucgacggcgugaagcuggagagcaccagaaucuaccagauccuggccaucuacagcaccguggccagcagccuggugcugguggugagccugggcgccaucagcuucuggaugugcagcaacggcagccugcagugcagaaucugcaucuga

SEQ ID NO: 166550 - RNA, 1701 nt, Artificial Sequence
  derived and/or modified CDS sequence (opt4) from hemagglutinin__InfluenzaA__ADX96687
augaaggccauccugguggugcugcuguacaccuucgccaccgccaacgccgacacccugugcaucggcuaccacgccaacaacagcaccgacaccguggacaccgugcuggagaagaacgugaccgugacccacagcgugaaccugcuggaggacaagcacaacggcaagcugugcaagcugagaggcguggccccccugcaccugggcaagugcaacaucgccggcuggauccugggcaaccccgagugcgagagccugagcaccgccagcagcuggagcuacaucguggagaccagcagcagcgacaacggcaccugcuaccccggcgacuucaucgacuacgaggagcugagagagcagcugagcagcgugagcagcuucaagagauucgagaucuuccccaagaccagcagcuggcccaaccacgacagcaacaagggcgugaccgccgccugcccccacgccggcgccaagagcuucuacaagaaccugaucuggcuggugaagaagggcaacagcuaccccaagcugagcaagagcuacaucaacgacaagggcaaggaggugcuggugcuguggggcauccaccaccccagcaccagcgccgaccagcagagccuguaccagaacgccgacgccuacguguucgugggcaccagcagauacagcaagaaguucaagcccgagaucgccaucagacccaaggugagagaccaggagggcagaaugaacuacuacuggacccugguggagcccggcgacaagaucaccuucgaggccaccggcaaccugguggugcccagauacgccuucgccauggagagaaacgccggcagcggcaucaucaucagcgacacccccguguacgacugcaacaccaccugccagacccccaagggcgccaucaacaccagccugcccuuccagaacauccaccccaucaccaucggcaagugccccaaguacgugaagagcaccaagcugagacuggccaccggccugagaaacgugcccagcauccagagcagaggccuguucggcgccaucgccggcuucaucgagggcggcuggaccggcaugguggacggcugguacggcuaccaccaccagaacgagcagggcagcggcuacgccgccgaccugaagagcacccagaacgccaucgacgagaucaccaacaaggugaacagcgugaucgagaagaugaacacccaguucaccgccgugggcaaggaguucaaccaccuggagaagagaaucgagaaccugaacaagaagguggacgacggcuuccuggacaucuggaccuacaacgccgagcugcuggugcugcuggagaacgagagaacccuggacuaccacgacagcaacgugaagaaccuguacgagaaggugagaagccagcugaagaacaacgccaaggagaucggcaacggcugcuucgaguucuaccacaagugcgacaacaccugcauggagagcgugaagaacggcaccuacgacuaccccaaguacagcgaggaggccaagcugaacagagaggagaucgacggcgugaagcuggagagcaccagaaucuaccagauccuggccaucuacagcaccguggccagcagccuggugcugguggugagccugggcgccaucagcuucuggaugugcagcaacggcagccugcagugcagaaucugcaucuga

SEQ ID NO: 166551 - RNA, 1701 nt, Artificial Sequence; identical to SEQ ID NO: 162729
  derived and/or modified CDS sequence (opt4) from hemagglutinin__InfluenzaA__ADX96697

SEQ ID NO: 166552 - RNA, 1701 nt, Artificial Sequence
  derived and/or modified CDS sequence (opt4) from hemagglutinin__InfluenzaA__ADX96707
augaaggccauccugguggugcugcuguacaccuucgccaccgccaacgccgacacccugugcaucggcuaccacgccaacaacagcaccgacaccguggacaccgugcuggagaagaacgugaccgugacccacagcgugaaccugcuggaggacaagcacaacggcaagcugugcaagcugagaggcguggccccccugcaccugggcaagugcaacaucgccggcuggauccugggcaaccccgagugcgagagccugagcaccgccagcagcuggagcuacaucguggagaccagcagcagcgacaacggcaccugcuaccccggcgacuucaucgacuacgaggagcugagagagcagcugagcagcgugagcagcuucgagagauucgagaucuuccccaagaccagcagcuggcccaaccacgacagcaacaagggcgugaccgccgccugcccccacgccggcgccaagagcuucuacaagaaccugaucuggcuggugaagaagggcaacagcuaccccaagcugagcaagagcuacaucaacgacaagggcaaggaggugcuggugcuguggggcauccaccaccccagcaccagcgccgaccagcagagccuguaccagaacgccgacgccuacguguucgugggcaccagcagauacagcaagaaguucaagcccgagaucgccaucagacccaaggugagagaccaggagggcagaaugaacuacuacuggacccugguggagcccggcgacaagaucaccuucgaggccaccggcaaccugguggugcccagauacgccuucgccauggagagaaacgccggcagcggcaucaucaucagcgacacccccgugcacgacugcgacaccaccugccagacccccaagggcgccaucaacaccagccugcccuuccagaacauccaccccaucaccaucggcaagugccccaaguacgugaagagcaccaagcugagacuggccaccggccugagaaacgugcccagcauccagagcagaggccuguucggcgccaucgccggcuucaucgagggcggcuggaccggcaugguggacggcugguacggcuaccaccaccagaacgagcagggcagcggcuacgccgccgaccugaagagcacccagaacgccaucgacaagaucaccaacaaggugaacagcgugaucgagaagaugaacacccaguucaccgccgugggcaaggaguucaaccaccuggagaagagaaucgagaaccugaacaagaagguggacgacggcuuccuggacaucuggaccuacaacgccgagcugcuggugcugcuggagaacgagagaacccuggacuaccacgacagcaacgugaagaaccuguacgagaaggugagaagccagcugaagaacaacgccaaggagaucggcaacggcugcuucgaguucuaccacaagugcgacaacaccugcauggagagcgugaagaacggcaccuacgacuaccccaaguacagcgaggaggccaagcugaacagagaggagaucgacggcgugaagcuggagagcaccagaaucuaccagauccuggccaucuacagcaccguggccagcagccuggugcugguggugagccugggcgccaucagcuucuggaugugcagcaccggcagccugcagugcagaaucugcaucuga

SEQ ID NO: 166553 - RNA, 1701 nt, Artificial Sequence; identical to SEQ ID NO: 163889
  derived and/or modified CDS sequence (opt4) from hemagglutinin__InfluenzaA__ADX96727

SEQ ID NO: 166554 - RNA, 1701 nt, Artificial Sequence
  derived and/or modified CDS sequence (opt4) from hemagglutinin__InfluenzaA__ADX96737
augaaggccauccugguggugcugcuguacaccuucgccaccgccaacgccgacacccugugcaucggcuaccacgccaacaacagcaccgacaccguggacaccgugcuggagaagaacgugaccgugacccacagcgugaaccugcuggaggacaagcacaacggcaagcugugcaagcugagaggcguggccccccugcaccugggcaagugcaacaucgccggcuggauccugggcaaccccgagugcgagagccugagcaccgccagcagcuggagcuacaucguggagaccagcagcagcgacaacggcaccugcuaccccggcgacuucaucgacuacgaggagcugagagagcagcugagcagcgugagcagcuucgagagauucgagaucuuccccaagaccagcagcuggcccaaccacgacagcaacaagggcgugaccgccgccugcccccacgccggcgccaagagcuucuacaagaaccugaucuggcuggugaagaagggcaacagcuaccccaagcugagcaagagcuacaucaacgacaagggcaaggaggugcuggugcuguggggcauccaccaccccagcaccagcgccgaccagcagagccuguaccagaacgccgacgccuacguguucgugggcaccagcagauacagcaagaaguucaagcccgagaucgccaucagacccaaggugaaggagcaggagggcagaaugaacuacuacuggacccugguggagcccggcgacaagaucaccuucgaggccaccggcaaccugguggugcccagauacgccuucgccauggagagaaaggccggcagcggcaucaucaucagcgacacccccgugcacgacugcaacaccaccugccagacccccaagggcgccaucaacaccagccugcccuuccagaacauccacagcaucaccaucggcaagugccccaaguacgugaagagcaccaagcugagacuggccaccggccugagaaacgugcccagcauccagagcagaggccuguucggcgccaucgccggcuucaucgagggcggcuggaccggcaugguggacggcugguacggcuaccaccaccagaacgagcagggcagcggcuacgccgccgaccugaagagcacccagaacgccaucgacgagaucaccaacaaggugaacagcgugaucgagaagaugaacacccaguucaccgccgugggcaaggaguucaaccaccuggagaagagaaucgagaaccugaacaagaagguggacgacggcuuccuggacaucuggaccuacaacgccgagcugcuggugcugcuggagaacgagagaacccuggacuaccacgacagcaacgugaagaaccuguacgagaaggugagaagccagcugaagaacaacgccaaggagaucggcaacggcugcuucgaguucuaccacaagugcgacaacaccugcauggagagcgugaagaacggcaccuacgacuaccccaaguacagcgaggaggccaagcugaacagagaggagaucgacggcgugaagcuggagagcaccagaaucuaccagauccuggccaucuacagcaccguggccagcagccuggugcuggugaucagccugggcgccaucagcuucuggaugugcagcaccggcagccugcagugcagaaucugcaucuga

SEQ ID NO: 166555 - RNA, 1701 nt, Artificial Sequence; identical to SEQ ID NO: 162729
  derived and/or modified CDS sequence (opt4) from hemagglutinin__InfluenzaA__ADX96747

SEQ ID NO: 166556 - RNA, 1701 nt, Artificial Sequence
  derived and/or modified CDS sequence (opt4) from hemagglutinin__InfluenzaA__ADX96757
augaaggccauccugguggugcugcuguacaccuucgccaccgccaacgccgacacccugugcaucggcuaccacgccaacaacagcaccgacaccguggacaccgugcuggagaagaacgugaccgugacccacagcgugaaccugcuggaggacaagcacaacggcaagcugugcaagcugagaggcguggccccccugcaccugggcaagugcaacaucgccggcuggauccugggcaaccccgagugcgagagccugagcaccgccagcagcuggagcuacaucguggagaccagcagcagcggcaacggcaccugcuaccccggcgacuucaucgacuacgaggagcugagagagcagcugagcagcgugagcagcuucgagagauucgagaucuuccccaagaccagcagcuggcccaaccacgacagcaacaagggcgugaccgccgccugcccccacgccggcgccaagagcuucuacaagaaccugaucuggcuggugaagaagggcaacagcuaccccaagcugagcaagagcuacaucaacgacaagggcaaggaggugcuggugcuguggggcauccaccaccccagcaccagcgccgaccagcagagccuguaccagaacgccgacgccuacguguucgugggcaccagcagauacagcaagaaguucaagcccgagaucgccaucagacccaaggugagagaccaggagggcagaaugaacuacuacuggacccugguggugcccggcgacaagaucaccuucgaggccaccggcaaccugguggugcccagauacgccuucgccauggagagaaacgccggcagcggcaucaucaucagcgacacccccgugcacgacugcaacaccaccugccagacccccaagggcgccaucaacaccagccugcccuuccagaacauccaccccaucaccaucggcaagugccccaaguacgugaagagcaccaagcugagacuggccaccggccugagaaacgugcccagcauccagagcagaggccuguucggcgccaucgccggcuucaucgagggcggcuggaccggcaugguggacggcugguacggcuaccaccaccagaacgagcagggcagcggcuacgccgccgaccugaagagcacccagaacgccaucgacgagaucaccaacaaggugaacagcgugaucgagaagaugaacacccaguucaccgccgugggcaaggaguucaaccaccuggagaagagaaucgagaaccugaacaagaagguggacgacggcuuccuggacaucuggaccuacaacgccgagcugcuggugcugcuggagaacgagagaacccuggacuaccacgacagcaacgugaagaaccuguacgagaaggugagaagccagcugaagaacaacgccaaggagaucggcaacggcugcuucgaguucuaccacaagugcgacaacaccugcauggagagcgugaagaacggcaccuacgacuaccccaaguacagcgaggaggccaagcugaacagagaggagaucgacggcgugaagcuggagagcaccagaaucuaccagauccuggccaucuacagcaccguggccagcagccuggugcugguggugagccugggcgccaucagcuucuggaugugcagcaccggcagccugcagugcagaaucugcaucuga

SEQ ID NO: 166557 - RNA, 1701 nt, Artificial Sequence
  derived and/or modified CDS sequence (opt4) from hemagglutinin__InfluenzaA__ADX96767
augaaggccauccugguggugcugcuguacaccuucgccaccgccaacgccgacacccugugcaucggcuaccacgccaacaacagcaccgacaccguggacaccgugcuggagaagaacgugaccgugacccacagcgugaaccugcuggaggacaagcacaacggcaagcugugcaagcugagaggcguggccccccugcaccugggcaagugcaacaucgccggcuggauccugggcaaccccgagugcgagagccugagcaccgccagcagcuggagcuacaucguggagaccagcagcagcgacaacggcaccugcuaccccggcgacuucaucgacuacgaggagcugagagagcagcugagcagcgugagcagcuucgagagauucgagaucuuccccaagaccagcagcuggcccaaccacgacagcaacaagggcgugaccgccgccugcccccacgccggcgccaagagcuucuacaagaaccugaucuggcuggugaagaagggcaacagcuaccccaagcugagcaagagcuacaucaacgacaagggcaaggaggugcuggugcuguggggcauccaccaccccagcaccagcgccgaccagcagagccuguaccagaacgccgacgccuacguguucgugggcaccagcagauacagcaagaaguucaagcccgagaucgccaucagacccaaggugagagaccaggagggcagaaugaacuacuacuggacccugguggagagcggcgacaagaucaccuucgaggccaccggcaaccugguggugcccagauacgccuucgccauggagagaaacgccggcagcggcaucaucaucagcgacacccccgugcacgacugcaacaccaccugccagacccccaagggcgccaucaacaccagccugcccuuccagaacauccaccccaucaccaucggcaagugccccaaguacgugaagagcaccaagcugagacuggccaccggccugagaaacgugcccagcauccagagcagaggccuguucggcgccaucgccggcuucaucgagggcggcuggaccggcaugguggacggcugguacggcuaccaccaccagaacgagcagggcagcggcuacgccgccgaccugaagagcacccagaacgccaucgacgagaucaccaacaaggugaacagcgugaucgagaagaugaacacccaguucaccgccgugggcaaggaguucaaccaccuggagaagagaaucgagaaccugaacaagaagguggacgacggcuuccuggacaucuggaccuacaacgccgagcugcuggugcugcuggagaacgagagaacccuggacuaccacgacagcaacgugaagaagcuguacgagaaggugagaagccagcugaagaacaacgccaaggagaucggcaacggcugcuucgaguucuaccacaagugcgacaacaccugcauggagagcgugaagaacggcaccuacgacuaccccaaguacagcgaggaggccaagcugaacagagaggagaucgacggcgugaagcuggagagcaccagaaucuaccagauccuggccaucuacagcaccguggccagcagccuggugcugguggugagccugggcgccaucagcuucuggaugugcagcaccggcagccugcagugcagaaucugcaucuga

SEQ ID NO: 166558 - RNA, 1701 nt, Artificial Sequence
  derived and/or modified CDS sequence (opt4) from hemagglutinin__InfluenzaA__ADX96777
augaaggccauccugguggugcugcuguacaccuucgccaccgccaacgccgacacccugugcaucggcuaccacgccaacaacagcaccgacaccguggacaccgugcuggagaagaacgugaccgugacccacagcgugaaccugcuggaggacaagcacaacggcaagcugugcaagcugagaggcguggccccccugcaccugggcaagugcaacaucgccggcuggauccugggcaaccccgagugcgagagccugagcaccgccagcagcuggagcuacaucguggagaccagcagcagcgacaacggcaccugcuaccccggcgacuucaucgacuacgaggagcugagagagcagcugagcagcgugagcagcuucgagagauucgagaucuuccccaagaccagcagcuggcccaaccacgacagcaacaagggcgugaccgccgccugcccccacgccggcgccaagagcuucuacaagaaccugaucuggcuggugaagaagggcaacagcuaccccaagcugagcaagagcuacaucaacgacaagggcaaggaggugcuggugcuguggggcauccaccaccccagcaccagcgccgaccagcagagccuguaccagaacgccgacgccuacguguucgugggcaccagcagauacagcaagaaguucaagcccgagaucgccaucagacccaaggugagagaccaggagggcagaaugaacuacuacuggacccugguggugcccggcgacaagaucaccuucgaggccaccggcaaccugguggugcccagauacgccuucgccauggagagaaacgccggcagcggcaucaucaucagcgacacccccgugcacgacugcaacaccaccugccagacccccaagggcgccaucaacaccagccugcccuuccagaacauccacagcaucaccaucggcaagugccccaaguacgugaagagcaccaagcugagacuggccaccggccugagaaacgugcccagcauccagagcagaggccuguucggcgccaucgccggcuucaucgagggcggcuggaccggcaugguggacggcugguacggcuaccaccaccagaacgagcagggcagcggcuacgccgccgaccugaagagcacccagaacgccaucgacgagaucaccaacaaggugaacagcgugaucgagaagaugaacacccaguucaccgccgugggcaaggaguucaaccaccuggagaagagaaucgagaaccugaacaagaagguggacgacggcuuccuggacaucuggaccuacaacgccgagcugcuggugcugcuggagaacgagagaacccuggacuaccacgacagcaacgugaagaaccuguacgagaaggugagaagccagcugaagaacaacgccaaggagaucggcaacggcugcuucgaguucuaccacaagugcgacaacaccugcauggagagcgugaagaacggcaccuacgacuaccccaaguacagcgaggaggccaagcugaacagagaggagaucgacggcgugaagcuggagagcaccagaaucuaccagauccuggccaucuacagcaccguggccagcagccuggugcugguggugagccugggcgccaucagcuucuggaugugcagcaacggcagccugcagugcagaaucugcaucuga

SEQ ID NO: 166559 - RNA, 1701 nt, Artificial Sequence; identical to SEQ ID NO: 162729
  derived and/or modified CDS sequence (opt4) from hemagglutinin__InfluenzaA__ADX96787

SEQ ID NO: 166560 - RNA, 1701 nt, Artificial Sequence; identical to SEQ ID NO: 165956
  derived and/or modified CDS sequence (opt4) from hemagglutinin__InfluenzaA__ADX96797

SEQ ID NO: 166561 - RNA, 1701 nt, Artificial Sequence
  derived and/or modified CDS sequence (opt4) from hemagglutinin__InfluenzaA__ADX96807
augaaggccauccugguggugcugcuguacaccuucgccaccgccaacgccgacacccugugcaucggcuaccacgccaacaacagcaccgacaccguggacaccgugcuggagaagaacgugaccgugacccacagcgugaacauccuggaggacaagcacaacggcaagcugugcaagcugagaggcguggccccccugcaccugggcaagugcaacaucgccggcuggauccugggcaaccccgagugcgagagccugagcaccgccagcagcuggagcuacaucguggagaccagcagcagcgacaacggcaccugcuaccccggcgacuucaucgacuacgaggagcugagagagcagcugagcagcgugagcagcuucgagagauucgagaucuuccccaagaccagcagcuggcccaaccacgacagcaacaagggcgugaccgccgccugcccccacgccggcgccaagagcuucuacaagaaccugaucuggcuggugaagaagggcaacagcuaccccaagcugagcaagagcuacaucaacgacaagggcaaggaggugcuggugcuguggggcauccaccaccccagcaccagcgccgaccagcagagccuguaccagaacgccgacgccuacguguucgugggcagcagcagauucagcaagaaguucaagcccgagaucgccaucagacccaaggugagagaccaggagggcagaaugaacuacuacuggacccugguggagcccggcgacaagaucaccuucgaggccaccggcaaccugguggugcccagauacgccuucgccauggagagaaacgccggcagcggcaucaucaucagcgacacccccgugcacgacugcaacaccaccugccagacccccaagggcgccaucaacaccagccugcccuuccagaacauccaccccaucaccaucggcaagugccccaaguacgugaagagcaccaagcugagacuggccaccggccugagaaacgugcccagcauccagagcagaggccuguucggcgccaucgccggcuucaucgagggcggcuggaccggcaugguggacggcugguacggcuaccaccaccagaacgagcagggcagcggcuacgccgccgaccugaagagcacccagaacgccaucgacgagaucaccaacaaggugaacagcgugaucgagaagaugaacacccaguucaccgccgugggcaaggaguucaaccaccuggagaagagaaucgagaaccugaacaagaagguggacgacggcuuccuggacaucuggaccuacaacgccgagcugcuggugcugcuggagaacgagagaacccuggacuaccacgacagcaacgugaagaaccuguacgagaaggugagaagccagcugaagaacaacgccaaggaggugggcaacggcugcuucgaguucuaccacaagugcgacaacaccugcauggagagcgugaagaacggcaccuacgacuaccccaaguacagcgaggaggccaagcugaacagagaggagaucgacggcgugaagcuggagagcaccagaaucuaccagauccuggccaucuacagcaccguggccagcagccuggugcugguggugagccugggcgccaucagcuucuggaugugcagcaacggcagccugcagugcagaaucugcaucuga

SEQ ID NO: 166562 - RNA, 1701 nt, Artificial Sequence; identical to SEQ ID NO: 162716
  derived and/or modified CDS sequence (opt4) from hemagglutinin__InfluenzaA__ADX96817

SEQ ID NO: 166563 - RNA, 1701 nt, Artificial Sequence
  derived and/or modified CDS sequence (opt4) from hemagglutinin__InfluenzaA__ADX96837
augaaggccauccugguggugcugcuguacaccuucgccaccgccaacgccgacacccugugcaucggcuaccacgccaacaacagcaccgacaccguggacaccgugcuggagaagaacgugaccgugacccacagcgugaacauccuggaggacaagcacaacggcaagcugugcaagcugagaggcguggccccccugcaccugggcaagugcaacaucgccggcuggauccugggcaaccccgagugcgagagccugagcaccgccagcagcuggagcuacaucguggagaccagcagcagcgacaacggcaccugcuaccccggcgacuucaucgacuacgaggagcugagagagcagcugagcagcgugagcagcuucgagagauucgagaucuuccccaagaccagcagcuggcccaaccacgacagcaacaagggcgugaccgccgccugccccuacgccggcgccaagagcuucuacaagaaccugaucuggcuggugaagaagggcaacagcuaccccaagcugagcaagagcuacaucaacgacaagggcaaggaggugcuggugcuguggggcauccaccaccccagcaccagcgccgaccagcagagccuguaccagaacgccgacgccuacguguucgugggcagcagcagauacagcaagaaguucaagcccgagaucgccaucagacccaaggugagagaccaggagggcagaaugaacuacuacuggacccugguggagcccggcgacaagaucaccuucgaggccaccggcaaccugguggugcccagauacgccuucgccauggagagaaacgccggcagcggcaucaucaucagcgacacccccgugcacgacugcaacaccaccugccagacccccaagggcgccaucaacaccagccugcccuuccagaacauccaccccaucaccaucggcaagugccccaaguacgugaagagcaccaagcugagacuggccaccggccugagaaacgugcccagcauccagagcagaggccuguucggcgccaucgccggcuucaucgagggcggcuggaccggcaugguggacggcugguacggcuaccaccaccagaacgagcagggcagcggcuacgccgccgaccugaagagcacccagaacgccaucgacgagaucaccaacaaggugaacagcgugaucgagaagaugaacacccaguucaccgccgugggcaaggaguucaaccaccuggagaagagaaucgagaaccugaacaagaagguggacgacggcuuccuggacaucuggaccuacaacgccgagcugcuggugcugcuggagaacgagagaacccuggacuaccacgacagcaacgugaagaaccuguacgagaaggugagaagccagcugaagaacaacgccaaggaggugggcaacggcugcuucgaguucuaccacaagugcgacaacaccugcauggagagcgugaagaacggcaccuacgacuaccccaaguacagcgaggaggccaagcugaacagagaggagaucgacggcgugaagcuggagagcaccagaaucuaccagauccuggccaucuacagcaccguggccagcagccuggugcugguggugagccugggcgccaucagcuucuggaugugcagcaccggcagccugcagugcagaaucugcaucuga

SEQ ID NO: 166564 - RNA, 1701 nt, Artificial Sequence; identical to SEQ ID NO: 162729
  derived and/or modified CDS sequence (opt4) from hemagglutinin__InfluenzaA__ADX96847

SEQ ID NO: 166565 - RNA, 1701 nt, Artificial Sequence; identical to SEQ ID NO: 162729
  derived and/or modified CDS sequence (opt4) from hemagglutinin__InfluenzaA__ADX96857

SEQ ID NO: 166566 - RNA, 1701 nt, Artificial Sequence; identical to SEQ ID NO: 162909
  derived and/or modified CDS sequence (opt4) from hemagglutinin__InfluenzaA__ADX96867

SEQ ID NO: 166567 - RNA, 1701 nt, Artificial Sequence; identical to SEQ ID NO: 165666
  derived and/or modified CDS sequence (opt4) from hemagglutinin__InfluenzaA__ADX96877

SEQ ID NO: 166568 - RNA, 1701 nt, Artificial Sequence
  derived and/or modified CDS sequence (opt4) from hemagglutinin__InfluenzaA__ADX96897
augaaggccauccugguggugcugcuguacaccuucgccaccgccaacgccgacacccugugcaucggcuaccacgccaacaacagcaccgacaccguggacaccgugcuggagaagaacgugaccgugacccacagcgugaaccugcuggaggacaagcacaacggcaagcugugcaagcugagaggcguggccccccugcaccugggcaagugcaacaucgccggcuggauccugggcaaccccgagugcgagagccugagcaccgccagcagcuggagcuacaucguggagaccagcagcagcgacaacggcaccugcuaccccggcgacuucaucgacuacgaggagcugagagagcagcugagcagcgugagcagcuucgagagauucgagaucuuccccaagaccagcagcuggcccaaccacgacagcaacaagggcgugaccgccgccugcccccacgccggcgccaagagcuucuacaagaaccugaucuggcuggugaagaagggcaacagcuaccccaagcugagcaagagcuacaucaacgacaagggcaaggaggugcuggugcuguggggcauccaccaccccagcaccagcgccgaccagcagagccuguaccagaacgccgacgccuacguguucgugggcaccagcagauacagcaagaaguucaagcccgagaucgccaucagacccaaggugagagaccaggagggcagaaugaacuacuacuggacccugguggagcccggcgacaagaucaccuucgaggccaccggcaaccugguggugcccagauacgccuucgccauggagagaaacgccggcagcggcaucaucaucagcgacacccccauccacgacugcaacaccaccugccagacccccaagggcgccaucaacaccagccugcccuuccagaacauccaccccaucaccaucggcaagugccccaaguacgugaagagcaccaagcugagacuggccaccggccugagaaacgugcccagcauccagagcagaggccuguucggcgccaucgccggcuucaucgagggcggcuggaccggcaugguggacggcugguacggcuaccaccaccagaacgagcagggcagcggcuacgccgccgaccugaagagcacccagaacgccaucgacaagaucaccaacaaggugaacagcgugaucgagaagaugaacacccaguucaccgccgugggcaaggaguucaaccaccuggagaagagaaucgagaaccugaacaagaagguggacgacggcuuccuggacaucuggaccuacaacgccgagcugcuggugcugcuggagaacgagagaacccuggacuaccacgacagcaacgugaagaaccuguacgagaaggugagaagccagcugaagaacaacgccaaggagaucggcaacggcugcuucgaguucuaccacaagugcgacaacaccugcauggagagcgugaagaacggcaccuacgacuaccccaaguacagcgaggaggccaagcugaacagagaggagaucgacggcgugaagcuggagagcaccagaaucuaccagauccuggccaucuacagcaccguggccagcagccuggugcugguggugagccugggcgccaucagcuucuggaugugcagcaacggcagccugcagugcagaaucugcaucuga

SEQ ID NO: 166569 - RNA, 1701 nt, Artificial Sequence
  derived and/or modified CDS sequence (opt4) from hemagglutinin__InfluenzaA__ADX96907
augaaggccauccugguggugcugcuguacaccuucgccaccgccaacgccgacacccugugcaucggcuaccacgccaacaacagcaccgacaccguggacaccgugcuggagaagaacgugaccgugacccacagcgugaaccugcuggaggacaagcacagcggcaagcugugcaagcugagaggcguggccccccugcaccugggcaagugcaacaucgccggcuggauccugggcaaccccgagugcgagagccugagcaccgccagcagcuggagcuacaucguggagaccagcagcagcgacaacggcaccugcuaccccggcgacuucaucgacuacgaggagcugagagagcagcugagcagcgugagcagcuucgagagauucgagaucuuccccaagaccagcagcuggcccaaccacgacagcagcaagggcgugaccgccgccugcccccacgccggcgccaagagcuucuacaagaaccugaucuggcuggugaagaagggcaacagcuaccccaagcugagcaagagcuacaucaacgacaagggcaaggaggugcuggugcuguggggcauccaccaccccagcaccagcgccgaccagcagagccuguaccagaacgccgacgccuacguguucgugggcaccagcagauacagcaagaaguucaagcccgagaucgccaucagacccaaggugagagaccaggagggcagaaugaacuacuacuggacccugguggagcccggcgacaagaucaccuucgaggccaccggcaaccugguggugcccagauacgccuucgccauggagagaaacgccggcagcggcaucaucaucagcgacacccccgugcacgacugcaacaccaccugccagacccccaagggcgccaucaacaccagccugcccuuccagaacauccaccccaucaccaucggcaagugccccaaguacgugaagagcaccaagcugagacuggccaccggccugagaaacgugcccagcauccagagcagaggccuguucggcgccaucgccggcuucaucgagggcggcuggaccggcaugguggacggcugguacggcuaccaccaccagaacgagcagggcagcggcuacgccgccgaccugaagagcacccagaacgccaucgacaagaucaccaacaaggugaacagcgugaucgagaagaugaacacccaguucaccgccgugggcaaggaguucaaccaccuggagaagagaaucgagaaccugaacaagaagguggacgacggcuuccuggacaucuggaccuacaacgccgagcugcuggugcugcuggagaacgagagaacccuggacuaccacgacagcaacgugaagaaccuguacgagaaggugagaagccagcugaagaacaacgccaaggagaucggcaacggcugcuucgaguucuaccacaagugcgacaacaccugcauggagagcgugaagaacggcaccuacgacuaccccaaguacagcgaggaggccaagcugaacagagaggagaucgacggcgugaagcuggagagcaccagaaucuaccagauccuggccaucuacagcaccguggccagcagccuggugcugguggugagccugggcgccaucagcuucuggaugugcagcaacggcagccugcagugcagaaucugcaucuga

SEQ ID NO: 166570 - RNA, 1701 nt, Artificial Sequence
  derived and/or modified CDS sequence (opt4) from hemagglutinin__InfluenzaA__ADX96927
augaaggccauccugguggugcugcuguacaccuucgccaccgccaacgccgacacccugugcaucggcuaccacgccaacaacagcaccgacaccguggacacccugcuggagaagaacgugaccgugacccacagcgugaaccugcuggaggacaagcacaacggcaagcugugcaagcugagaggcguggccccccugcaccugggcaagugcaacaucgccggcuggauccugggcaaccccgagugcgagagccugagcaccgccagcagcuggagcuacaucguggagaccagcagcagcgacaacggcaccugcuaccccggcgacuucaucgacuacgaggagcugagagagcagcugagcagcgugagcagcuucgagagauucgagaucuuccccaagaccagcagcuggcccaaccacgacagcaacaagggcgugaccgccgccugcccccacgccggcgccaagagcuucuacaagaaccugaucuggcuggugaagaagggcaacagcuaccccaagcugagcaagagcuacaucaacgacaagggcaaggaggugcuggugcuguggggcauccaccaccccagcaccagcgccgaccagcagagccuguaccagaacgccgacgccuacguguucgugggcaccagcagauacagcaagaaguucaagcccgagaucgccaucagacccaaggugagagaccaggagggcagaaugaacuacuacuggacccugguggagcccggcgacaagaucaccuucgaggccaccggcaaccugguggugcccagauacgccuucgccauggacagaaacgccggcagcggcaucaucaucagcgacacccccgugcacgacugcaacaccaccugccagacccccaagggcgccaucaacaccagccugcccuuccagaacauccaccccaucaccaucggcaagugccccaaguacgugaagagcaccaagcugagacuggccaccggccugagaaacgugcccagcauccagagcagaggccuguucggcgccaucgccggcuucaucgagggcggcuggaccggcaugguggacggcugguacggcuaccaccaccagaacgagcagggcagcggcuacgccgccgaccugaagagcacccagaacgccaucgacgagaucaccaacaaggugaacagcgugaucgagaagaugaacacccaguucaccgccgugggcaaggaguucaaccaccuggagaagagaaucgagaaccugaacaagaagguggacgacggcuuccuggacaucuggaccuacaacgccgagcugcuggugcugcuggagaacgagagaacccuggacuaccacgacagcaacgugaagaaccuguacgagaaggugagaagccagcugaagaacaacgccaaggagaucggcaacggcugcuucgaguucuaccacaagugcgacaacaccugcauggagagcgugaagaacggcaccuacgacuaccccaaguacagcgaggaggccaagcugaacagagaggagaucgacggcgugaagcuggagagcaccagaaucuaccagauccuggccaucuacagcaccguggccagcagccuggugcugguggugagccugggcgccaucagcuucuggaugugcagcaacggcagccugcagugcagaaucugcaucuga

SEQ ID NO: 166571 - RNA, 1701 nt, Artificial Sequence; identical to SEQ ID NO: 164149
  derived and/or modified CDS sequence (opt4) from hemagglutinin__InfluenzaA__ADX96937

SEQ ID NO: 166572 - RNA, 1701 nt, Artificial Sequence; identical to SEQ ID NO: 162716
  derived and/or modified CDS sequence (opt4) from hemagglutinin__InfluenzaA__ADX96947

SEQ ID NO: 166573 - RNA, 1701 nt, Artificial Sequence; identical to SEQ ID NO: 163893
  derived and/or modified CDS sequence (opt4) from hemagglutinin__InfluenzaA__ADX96957

SEQ ID NO: 166574 - RNA, 1701 nt, Artificial Sequence; identical to SEQ ID NO: 163042
  derived and/or modified CDS sequence (opt4) from hemagglutinin__InfluenzaA__ADX96967

SEQ ID NO: 166575 - RNA, 1701 nt, Artificial Sequence; identical to SEQ ID NO: 162909
  derived and/or modified CDS sequence (opt4) from hemagglutinin__InfluenzaA__ADX96977

SEQ ID NO: 166576 - RNA, 1701 nt, Artificial Sequence
  derived and/or modified CDS sequence (opt4) from hemagglutinin__InfluenzaA__ADX96987
augaaggccauccugguggugcugcuguacaccuucgccaccgccaacgccgacacccugugcaucggcuaccacgccaacaacagcaccgacaccguggacaccgugcuggagaagaacgugaccgugacccacagcgugaacauccuggaggacaagcacaacggcaagcugugcaagcugagaggcguggccccccugcaccugggcaagugcaacaucgccggcuggauccugggcaaccccgagugcgagagccugagcaccgccagcagcuggagcuacaucguggagaccagcagcagcgacaacggcaccugcuaccccggcgacuucaucgacuacgaggagcugagagagcagcugagcagcgugagcagcuucgagagauucgagaucuuccccaagaccagcagcuggcccaaccacgacagcaacaagggcgugaccgccgccugcccccacgccggcgccaagagcuucuacaagaaccugaucuggcuggugaagaagggcaacagcuaccccaagcugagcaagagcuacaucaacgacaagggcaaggaggugcuggugcuguggggcauccaccaccccagcaccagcgccgaccagcagagccuguaccagaacgccgacgccuacguguucgugggcagcagcagauacagcaagaaguucaagcccgagaucgccaucagacccaaggugagagaccaggagggcagaaugaacuacuacuggacccugguggagcccggcgacaagaucaccuucgaggccaccggcaaccugguggugcccagauacgccuucgccauggagagaaacgccggcagcggcaucaucaucagcgacacccccgugcacgacugcaacaccaccugccagacccccaagggcgccaucaacaccagccugcccuuccagaacauccaccccaucaccaucggcaagugccccaaguacgugaagagcaccaagcugagacuggccaccggccugagaaacgugcccagcauccagagcagaggccuguucggcgccaucgccggcuucaucgagggcggcuggaccggcaugguggacggcugguacggcuaccaccaccagaacgagcagggcagcggcuacgccgccgaccugaagagcacccagaacgccaucgacgagaucaccaacaaggugaacagcgugaucgagaagaugaacacccaguucaccgccgugggcaaggaguucaaccaccuggagaagagaaucgagaaccugaacaagaagguggacgacggcuuccuggacaucuggaccuacaacgccgagcugcuggugcugcuggagaacgagagaacccuggacuaccacgacagcaacgugaagaaccuguacgagaaggugagaagccagcugaagaacaacgccaaggagaucggcaacggcugcuucgaguucuaccacaagugcgacaacaccugcauggagagcgugaagaacggcaccuacgacuaccccaaguacagcgaggaggccaagcugaacagagaggagaucgacggcaucaagcuggagagcaccagaaucuaccagauccuggccaucuacagcaccguggccagcagccuggugcugguggugagccugggcgccaucagcuucuggaugugcagcaacggcagccugcagugcagaaucugcaucuga

SEQ ID NO: 166577 - RNA, 1701 nt, Artificial Sequence; identical to SEQ ID NO: 162909
  derived and/or modified CDS sequence (opt4) from hemagglutinin__InfluenzaA__ADX96997

SEQ ID NO: 166578 - RNA, 1701 nt, Artificial Sequence
  derived and/or modified CDS sequence (opt4) from hemagglutinin__InfluenzaA__ADX97007
augaaggccauccugguggugcugcuguacaccuucgccaccgccaacgccgacacccugugcaucggcuaccacgccaacaacagcaccgacaccguggacaccgugcuggagaagaacgugaccgugacccacagcgugaaccugcuggaggacaagcacaacggcaagcugugcaagcugagaggcguggccccccugcaccugggcaagugcaacaucgccggcuggauccugggcaaccccgagugcgagagccugagcaccgccagcagcuggagcuacaucguggagaccagcagcagcgacaacggcaccugcuaccccggcgacuucaucgacuacgaggagcugagagagcagcugagcagcgugagcagcuucgagagauucgagaucuuccccaagaccagcagcuggcccaaccacgacagcaacaagggcgugaccgccgccugcccccacgccggcgccaagagcuucuacaagaaccugaucuggcuggugaagaagggcaacagcuaccccaagcugagcaagagcuacaucaacgacaagggcaaggaggugcuggugcuguggggcauccaccaccccagcaccagcgccgaccagcagagccuguaccagaacgccgacgccuacguguucgugggcaccagcagauacagcaagaaguucaagcccgagaucgccaucagacccaaggugagagaccaggagggcagaaugaacuacuacuggacccugguggagcccggcgacaagaucaccuucgaggccaccggcaaccugguggugcccagauacgccuucgccauggagagaaacgccggcagcggcaucaucaucagcgacgcccccgugcacgacugcaacaccaccugccagacccccaagggcgccaucaacaccagccugcccuuccagaacauccaccccaucaccaucggcaagugccccaaguacgugaagagcaccaagcugagacuggccaccggccugagaaacgugcccagcauccagagcagaggccuguucggcgccaucgccggcuucaucgagggcggcuggaccggcaugguggacggcugguacggcuaccaccaccagaacgagcagggcagcggcuacgccgccgaccugaagagcacccagaacgccaucgacgagaucaccaacaaggugaacagcgugaucgagaagaugaacacccaguucaccgccgugggcaaggaguucaaccaccuggagaagagaaucgagaaccugaacaagaagguggacgacggcuuccuggacaucuggaccuacaacgccgagcugcuggugcugcuggagaacgagagaacccuggacuaccacgacagcaacgugaagaaccuguacgagaaggugagaagccagcugaagaacaacgccaaggagaucggcaacggcugcuucgaguucuaccacaagugcgacaacaccugcauggagagcgugaagaacggcaccuacgacuaccccaaguacagcgaggaggccaagcugaacagagaggagaucgacggcgugaagcuggagagcaccagaaucuaccagauccuggccaucuacagcaccguggccagcagccuggugcugguggugagccugggcgccaucagcuucuggaugugcagcaacggcagccugcagugcagaaucugcaucuga

SEQ ID NO: 166579 - RNA, 1701 nt, Artificial Sequence; identical to SEQ ID NO: 166528
  derived and/or modified CDS sequence (opt4) from hemagglutinin__InfluenzaA__ADX97018

SEQ ID NO: 166580 - RNA, 1701 nt, Artificial Sequence
  derived and/or modified CDS sequence (opt4) from hemagglutinin__InfluenzaA__ADX97028
augaaggccauccugguggugcugcuguacaccuucgccaccgccaacgccgacacccugugcaucggcuaccacgccaacaacagcaccgacaccguggacaccgugcuggagaagaacgugaccgugacccacagcgugaacauccuggaggacaagcacaacggcaagcugugcaagcugagaggcguggccccccugcaccugggcaagugcaacaucgccggcuggauccugggcaaccccgagugcgagagccugagcaccgccagcagcuggagcuacaucguggagaccagcagcagcgacaacggcaccugcuaccccggcgacuucaucgacuacgaggagcugagagagcagcugagcagcgugagcagcuucgagagauucgagaucuuccccaagaccagcagcuggcccaaccacgacagcaacaagggcgugaccgccgccugcccccacgccggcgccaagagcuucuacaagaaccugaucuggcuggugaagcagggcaacagcuaccccaagcugagcaagagcuacaucaacgacaagggcaaggaggugcuggugcuguggggcauccaccaccccagcaccaccgccgaccagcagagccuguaccagaacgccgacgccuacguguucgugggcagcagcagauacagcaagaaguucaagcccgagaucgccaucagacccaaggugagagaccaggagggcagaaugaacuacuacuggacccugguggagcccggcgacaagaucaccuucgaggccaccggcaaccugguggugcccagauacgccuucgccauggagagaaacgccggcagcggcaucaucaucagcgacacccccgugcacgacugcaacaccaccugccagacccccaagggcgccaucaacaccagccugcccuuccagaacauccaccccaucaccaucggcaagugccccaaguacgugaagagcaccaagcugagacuggccaccggccugagaaacgugcccagcauccagagcagaggccuguucggcgccaucgccggcuucaucgagggcggcuggaccggcaugguggacggcugguacggcuaccaccaccagaacgagcagggcagcggcuacgccgccgaccugaagagcacccagaacgccaucgacgagaucaccaacaaggugaacagcgugaucgagaagaugaacacccaguucaccgccgugggcaaggaguucaaccaccuggagaagagaaucgagaaccugaacaagaagguggacgacggcuuccuggacaucuggaccuacaacgccgagcugcuggugcugcuggagaacgagagaacccuggacuaccacgacagcaacgugaagaaccuguacgagaaggugagaagccagcugaagaacaacgccaaggaggugggcaacggcugcuucgaguucuaccacaagugcgacaacaccugcauggagagcgugaagaacggcaccuacgacuaccccaaguacagcgaggaggccaagcugaacagagaggagaucgacggcgugaagcuggagagcaccagaaucuaccagauccuggccaucuacagcaccgccgccagcagccuggugcugguggugagccugggcgccaucagcuucuggaugugcagcaacggcagccugcagugcagaaucugcaucuga

SEQ ID NO: 166581 - RNA, 1701 nt, Artificial Sequence; identical to SEQ ID NO: 165282
  derived and/or modified CDS sequence (opt4) from hemagglutinin__InfluenzaA__ADX98640

SEQ ID NO: 166582 - RNA, 1701 nt, Artificial Sequence; identical to SEQ ID NO: 164281
  derived and/or modified CDS sequence (opt4) from hemagglutinin__InfluenzaA__ADX98650

SEQ ID NO: 166583 - RNA, 1701 nt, Artificial Sequence
  derived and/or modified CDS sequence (opt4) from hemagglutinin__InfluenzaA__ADX98665
augaaggccauccugguggugcugcuguacaccuucgccaccgccaacgccgacacccugugcaucggcuaccacgccaacaacagcaccgacaccguggacaccgugcuggagaagaacgugaccgugacccacagcgugaaccugcuggaggacaagcacaacggcaagcugugcaagcugagaggcguggccccccugcaccugggcaagugcaacaucgccggcuggauccugggcaaccccgagugcgagagccugagcaccgccagcagcuggagcuacaucguggagaccagcagcagcggcaacggcaccugcuaccccggcgacuucaucgacuacgaggagcugagagagcagcugagcagcgugagcagcuucgagagauucgagaucuuccccaagaccagcagcuggcccaaccacgacagcaacaagggcgugaccgccgccugcccccacgccggcgccaagagcuucuacaagaaccugaucuggcuggugaagaagggcaacagcuaccccaagcugagcaagagcuacaucaacgacaagggcaaggaggugcuggugcuguggggcauccaccaccccagcaccagcgccgaccagcagagccuguaccagaacgccgacgccuacguguucgugggcaccagcagauacagcaagaaguucaagcccgagaucgccaucagacccaaggugagagaccaggagggcagaaugaacuacuacuggacccugguggagcccggcgacaagaucaccuucgaggccaccggcaaccugguggugcccagauacgccuucgccauggagagaaacgccggcagcggcaucaucaucagcgacacccccgugcacgacugcaacaccaccugccagacccccaagggcgccaucaacaccagccugcccuuccagaacauccaccccaucaccaucggcaagugccccaaguacgugaagagcaccaagcugagacuggccaccggccugagaaacgugcccagcauccagagcagaggccuguucggcgccaucgccggcuucaucgagggcggcuggaccggcaugguggacggcugguacggcuaccaccaccagaacgagcagggcagcggcuacgccgccgaccugaagagcacccagaacgccaucgacgagaucaccaacaaggugaacagcgugaucgagaagaugaacacccaguucaccgccgugggcaaggaguucaaccaccuggagaagagaaucgagaaccugaacaagaagguggacgacggcuuccuggacaucuggaccuacaacgccgagcugcuggugcugcuggagaacgagagaacccuggacuaccacgacagcaacgugaagaaccuguacgagaaggugagaagccagcugaagaacaacgccaaggagaucggcaacggcugcuucgaguucuaccacaagugcgacaacaccugcauggagagcgugaagaacggcaccuacgacuaccccaaguacagcgaggaggccaagcugaacagagaggagaucgacggcgugaagcuggagagcaccagaaucuaccagauccuggccaucuacagcaccgccgccagcagccuggugcugguggugagccugggcgccaucagcuucuggaugugcagcaacggcagccugcagugcagaaucugcaucuga

SEQ ID NO: 166584 - RNA, 1701 nt, Artificial Sequence; identical to SEQ ID NO: 163893
  derived and/or modified CDS sequence (opt4) from hemagglutinin__InfluenzaA__ADX98675

SEQ ID NO: 166585 - RNA, 1701 nt, Artificial Sequence; identical to SEQ ID NO: 163893
  derived and/or modified CDS sequence (opt4) from hemagglutinin__InfluenzaA__ADX98695

SEQ ID NO: 166586 - RNA, 1701 nt, Artificial Sequence; identical to SEQ ID NO: 164281
  derived and/or modified CDS sequence (opt4) from hemagglutinin__InfluenzaA__ADX98729

SEQ ID NO: 166587 - RNA, 1701 nt, Artificial Sequence; identical to SEQ ID NO: 165612
  derived and/or modified CDS sequence (opt4) from hemagglutinin__InfluenzaA__ADX98739

SEQ ID NO: 166588 - RNA, 1701 nt, Artificial Sequence; identical to SEQ ID NO: 165361
  derived and/or modified CDS sequence (opt4) from hemagglutinin__InfluenzaA__ADX98748

SEQ ID NO: 166589 - RNA, 1701 nt, Artificial Sequence; identical to SEQ ID NO: 162729
  derived and/or modified CDS sequence (opt4) from hemagglutinin__InfluenzaA__ADX98758

SEQ ID NO: 166590 - RNA, 1701 nt, Artificial Sequence; identical to SEQ ID NO: 163082
  derived and/or modified CDS sequence (opt4) from hemagglutinin__InfluenzaA__ADX98767

SEQ ID NO: 166591 - RNA, 1701 nt, Artificial Sequence; identical to SEQ ID NO: 164326
  derived and/or modified CDS sequence (opt4) from hemagglutinin__InfluenzaA__ADX98777

SEQ ID NO: 166592 - RNA, 1701 nt, Artificial Sequence
  derived and/or modified CDS sequence (opt4) from hemagglutinin__InfluenzaA__ADX98785
augaaggccauccugguggugcugcuguacacccuggccaccgccaacgccgacacccugugcaucggcuaccacgccaacaacagcaccgacaccguggacaccgugcuggagaagaacgugaccgugacccacagcgugaaccugcuggaggacaagcacaacggcaagcugugcaagcugagaggcaucgccccccugcaccugggcaagugcaacaucgccggcuggauccugggcaaccccgagugcgagagccugagcaccgccagcagcuggagcuacaucguggagaccagcagcagcgacaacggcaccugcuaccccggcgacuucaucgacuacgaggagcugagagagcagcugagcagcgugagcagcuucgagagauucgagaucuuccccaagaccagcagcuggcccaaccacgacagcaacaagggcgugaccgccgccugcccccacgccggcgccaagagcuucuacaagaaccugaucuggcuggugaagaagggcaacagcuaccccaagcugagcaagagcuacaucaacgacaagggcaaggaggugcuggugcuguggggcauccaccaccccagcaccagcgccgaccagcagagccuguaccagaacgccgacgccuacguguucgugggcaccagcagauacagcaagaaguucaagcccgagaucgccaucagacccaaggugagagaccaggagggcagaaugaacuacuacuggacccugguggagcccggcgacaagaucaccuucgaggccaccggcaaccugguggugcccagauacgccuucgccauggagagaaacgccggcagcggcaucaucaucagcgacacccccgugcacgacugcaacaccaccugccagacccccaagggcgccaucaacaccagccugcccuuccagaacauccaccccaucaccaucggcaagugccccaaguacgugaagagcaccaagcugagacuggccaccggccugagaaacgugcccagcauccagagcagaggccuguucggcgccaucgccggcuucaucgagggcggcuggaccggcaugguggacggcugguacggcuaccaccaccagaacgagcagggcagcggcuacgccgccgaccugaagagcacccagaacgccaucgacgagaucaccaacaaggugaacagcgugaucgagaagaugaacacccaguucaccgccgugggcaaggaguucaaccaccuggagaagagaaucgagaaccugaacaagaagguggacgacggcuuccuggacaucuggaccuacaacgccgagcugcuggugcugcuggagaacgagagaacccuggacuaccacgacagcaacgugaagaaccuguacgagaaggugagaagccagcugaagaacaacgccaaggagaucggcaacggcugcuucgaguucuaccacaagugcgacaacaccugcauggagagcgugaagaacggcaccuacgacuaccccaaguacagcgaggaggccaagcugaacagagaggagaucggcggcgugaagcuggagagcaccagaaucuaccagauccuggccaucuacagcaccguggccagcagccuggugcugguggugagccugggcgccaucagcuucuggaugugcagcaacggcagccugcagugcagaaucugcaucuga

SEQ ID NO: 166593 - RNA, 1701 nt, Artificial Sequence; identical to SEQ ID NO: 163830
  derived and/or modified CDS sequence (opt4) from hemagglutinin__InfluenzaA__ADX98792

SEQ ID NO: 166594 - RNA, 1701 nt, Artificial Sequence; identical to SEQ ID NO: 163830
  derived and/or modified CDS sequence (opt4) from hemagglutinin__InfluenzaA__ADX98806

SEQ ID NO: 166595 - RNA, 1701 nt, Artificial Sequence; identical to SEQ ID NO: 165770
  derived and/or modified CDS sequence (opt4) from hemagglutinin__InfluenzaA__ADX98818

SEQ ID NO: 166596 - RNA, 1701 nt, Artificial Sequence; identical to SEQ ID NO: 162729
  derived and/or modified CDS sequence (opt4) from hemagglutinin__InfluenzaA__ADX98828

SEQ ID NO: 166597 - RNA, 1701 nt, Artificial Sequence; identical to SEQ ID NO: 166120
  derived and/or modified CDS sequence (opt4) from hemagglutinin__InfluenzaA__ADX98843

SEQ ID NO: 166598 - RNA, 1701 nt, Artificial Sequence
  derived and/or modified CDS sequence (opt4) from hemagglutinin__InfluenzaA__ADX98853
augaaggccauccugguggugcugcuguacaccuucgccaccgccaacgccgacacccugugcaucggcuaccacgccaacaacagcaccgacaccguggacaccgugcuggagaagaacgugaccgugacccacagcgugaaccugcuggaggacaagcacaacggcaagcugugcaagcugagaggcguggccccccugcaccugggcaagugcaacaucgccggcuggauccugggcaaccccgagugcgagagccugagcaucgccagcagcuggagcuacaucguggagaccagcagcagcgacaacggcaccugcuaccccggcgacuucaucgacuacgaggagcugagagagcagcugagcagcgugagcagcuucgagagauucgagaucuuccccaagaccagcagcuggcccaaccacgacagcaacaagggcgugaccgccgccugcccccacgccggcgccaagagcuucuacaagaaccugaucuggcuggugaagaagggcaacagcuaccccaagcugagcaagagcuacaucaacgacaagggcaaggaggugcuggugcuguggggcauccaccaccccagcaccagcgccgaccagcagagccuguaccagaacgccgacgccuacguguucgugggcaccagcagauacagcaagaaguucaagcccgagaucgccaucagacccaaggugagagaccaggagggcagaaugaacuaccacuggacccugguggagcccggcgacaagaucaccuucgaggccaccggcaaccugguggugcccagauacgccuucgccauggagagaaacgccggcagcggcaucaucaucagcgacacccccgugcacgacugcaacaccaccugccagacccccaagggcgccaucaacaccagccugcccuuccagaacauccaccccaucaccaucggcaagugccccaaguacgugaagagcaccaagcugagacuggccaccggccugagaaacgugcccagcauccagagcagaggccuguucggcgccaucgccggcuucaucgagggcggcuggaccggcaugguggacggcugguacggcuaccaccaccagaacgagcagggcagcggcuacgccgccgaccugaagagcacccagaacgccaucgacaagaucaccaacaaggugaacagcgugaucgagaagaugaacacccaguucaccgccgugggcaaggaguucaaccaccuggagaagagaaucgagaaccugaacaagaagguggacgacggcuuccuggacaucuggaccuacaacgccgagcugcuggugcugcuggagaacgagagaacccuggacuaccacgacagcaacgugaagaaccuguacgagaaggugagaagccagcugaagaacaacgccaaggagaucggcaacggcugcuucgaguucuaccacaagugcgacaacaccugcauggagagcgugaagaacggcaccuacgacuaccccaaguacagcgaggaggccaagcugaacagagaggagaucgacggcgugaagcuggagagcaccagaaucuaccagauccuggccaucuacagcaccguggccagcagccuggugcugguggugagccugggcgccaucagcuucuggaugugcagcaacggcagccugcagugcagaaucugcaucuga

SEQ ID NO: 166599 - RNA, 1701 nt, Artificial Sequence; identical to SEQ ID NO: 163893
  derived and/or modified CDS sequence (opt4) from hemagglutinin__InfluenzaA__ADX98860

SEQ ID NO: 166600 - RNA, 1701 nt, Artificial Sequence; identical to SEQ ID NO: 165281
  derived and/or modified CDS sequence (opt4) from hemagglutinin__InfluenzaA__ADX98870

SEQ ID NO: 166601 - RNA, 1701 nt, Artificial Sequence
  derived and/or modified CDS sequence (opt4) from hemagglutinin__InfluenzaA__ADX98880
augaaggccauccugguggugcugcuguacaccuucgccaccgccaacgccgacacccugugcaucggcuaccacgccaacaacagcaccgacaccguggacaccgugcuggagaagaacgugaccgugacccacagcgugaaccugcuggaggacaagcacaacggcaagcugugcaagcugagaggcguggccccccugcaccugggcaagugcaacaucgccggcuggauccugggcaaccccgagugcgagagccugagcaccgccagcagcuggagcuacaucguggagaccagcagcagcgacaacggcaccugcuaccccggcgacuucaucgacuacgaggagcugagagagcagcugagcagcgugagcagcuucgagagauucgagaucuuccccaagaccagcagcuggcccaaccacgacagcaacaagggcgugaccgccgccugcccccacgccggcgccaagagcuucuacaagaaccugaucuggcuggugaagaagggcaacagcuaccccaagcugagcaagagcuacaucaacgacaagggcaaggaggugcuggugcuguggggcauccaccaccccagcaccagcgccgaccagcagagccuguaccagaacgccgacgccuacguguucgugggcaccagcagauacagcaagaaguucaagcccgagaucgccaucagacccaaggugagagaccaggagggcagaaugaacuacuacuggacccugguggagcccggcgacaagaucaccuucgaggccaccggcaaccugguggugcccagauacgccuucgccauggagagaaacgccggcagcggcaucaucaucagcgacacccccgugcacgacugcaacaccaccugccagacccccaagggcgccaucaacaccagccugcccuuccagaacauccaccccaucaccaucggcaagugccccaaguacgugaagagcaccaagcugagacuggccaccggccugagaaacgugcccagcauccagagcagaggccuguucggcgccaucgccggcuucaucgagggcggcuggaccggcaugguggacggcugguacggcuaccaccaccagaacgagcagggcagcggcuacgccgccgaccugaagagcacccagaacgccaucgacgagaucaccaacaaggugaacagcaucaucgagaagaugaacacccaguucaccgccgugggcaaggaguucaaccaccuggagaagagaaucgagaaccugaacaagaagguggacgacggcuuccuggacaucuggaccuacaacgccgagcugcuggugcugcuggagaacgagagaacccuggacuaccacgacagcaacgugaagaaccuguacgagaaggugagaagccagcugaagaacaacgccaaggagaucggcaacggcugcuucgaguucuaccacaagugcgacaacaccugcauggagagcgugaagaacggcaccuacgacuaccccaaguacagcgaggaggccaagcugaacagagaggagaucgacggcgugaagcuggagagcaccagaaucuaccagauccuggccaucuacagcaccguggccagcagccuggugcugguggugagccugggcgccaucagcuucuggaugugcagcaacggcagccugcagugcagaaucugcaucuga

SEQ ID NO: 166602 - RNA, 1701 nt, Artificial Sequence
  derived and/or modified CDS sequence (opt4) from hemagglutinin__InfluenzaA__ADX98890
augaaggccauccugguggugcugcuguacaccuucgccaccgccaacgccgacacccugugcaucggcuaccacgccaacaacagcaccgacaccguggacaccgugcuggagaagaacgugaccgugacccacagcgugaaccugcuggaggacaagcacaacggcaagcugugcaagcugagaggcguggccccccugcaccugggcaagugcaacaucgccggcuggauccugggcaaccccgagugcgagagccugagcaccgccagcagcuggagcuacaucguggagaccagcagcagcgacaacggcaccugcuaccccggcgacuucaucgacuacgaggagcugagagagcagcugagcagcgugagcagcuucgagagauucgagaucuuccccaagaccagcagcuggcccaaccacgacagcaacaagggcgugaccgccgccugcccccacgccggcgccaagagcuucuacaagaaccugaucuggcuggugaagaagggcaacagcuaccccaagcugagcaagagcuacaucaacgacaagggcaaggaggugcuggugcuguggggcauccaccaccccagcaccagcgccgaccagcagagccuguaccagaacgccgacgccuacguguucgugggcaccagcagauacagcaagaaguucaagcccgagaucgccaucagacccaaggugagagaccaggagggcagaaugaacuacuacuggacccugguggagcccggcgacaagaucaccuucgaggccaccggcaaccugguggugcccagauacgccuucgccauggagagaaacgccgagagcggcaucaucaucagcgacacccccgugcacgacugcaacaccaccugccagacccccaagggcgccaucaacaccagccugcccuuccagaacauccaccccaucaccaucggcaagugccccaaguacgugaagagcaccaagcugagacuggccaccggccugagaaacgugcccagcauccagagcagaggccuguucggcgccaucgccggcuucaucgagggcggcuggaccggcaugguggacggcugguacggcuaccaccaccagaacgagcagggcagcggcuacgccgccgaccugaagagcacccagaacgccaucgacaagaucaccaacaaggugaacagcgugaucgagaagaugaacacccaguucaccgccgugggcaaggaguucaaccaccuggagaagagaaucgagaaccugaacaagaagguggacgacggcuuccuggacaucuggaccuacaacgccgagcugcuggugcugcuggagaacgagagaacccuggacuaccacgacagcaacgugaagaaccuguacgagaaggugagaagccagcugaagaacaacgccaaggagaucggcaacggcugcuucgaguucuaccacaagugcgacaacaccugcauggagagcgugaagaacggcaccuacgacuaccccaaguacagcgaggaggccaagcugaacagagaggagaucgacggcgugaagcuggagagcaccagaaucuaccagauccuggccaucuacagcaccguggccagcagccuggugcugguggugagccugggcgccaucagcuucuggaugugcagcaacggcagccugcagugcagaaucugcaucuga

SEQ ID NO: 166603 - RNA, 1701 nt, Artificial Sequence; identical to SEQ ID NO: 164281
  derived and/or modified CDS sequence (opt4) from hemagglutinin__InfluenzaA__ADX98900

SEQ ID NO: 166604 - RNA, 1701 nt, Artificial Sequence
  derived and/or modified CDS sequence (opt4) from hemagglutinin__InfluenzaA__ADX98910
augaaggccauccugguggugcugcuguacaccuucgccaccgccaacgccgacacccugugcaucggcuaccacgccaacaacagcaccgacaccguggacaccgugcuggagaagaacgugaccgugacccacagcgugaaccugcuggaggacaagcacaacggcaagcugugcaagcugagaggcguggccccccugcaccugggcaagugcaacaucgccggcuggauccugggcaaccccgagugcgagagccugagcaccgccaucagcuggagcuacaucguggagaccagcagcagcgacaacggcaccugcuaccccggcgacuucaucgacuacgaggagcugagagagcagcugagcagcgugagcagcuucgagagauucgagaucuuccccaagaccagcagcuggcccaaccacgacagcaacaagggcgugaccgccgccugcccccacgccggcgccaagagcuucuacaagaaccugaucuggcuggugaagaagggcaacagcuaccccaagcugagcaagagcuacaucaacgacaagggcaaggaggugcuggugcuguggggcauccaccaccccagcaccagcgccgaccagcagagccuguaccagaacgccgacgccuacguguucgugggcaccagcagauacagcaagaaguucaagcccgagaucgccaucagacccaaggugagagaccaggagggcagaaugaacuacuacuggacccugguggagcccggcgacaagaucaccuucgaggccaccggcaaccugguggugcccagauacgccuucgccauggagagaaacgccggcagcggcaucaucaucagcgacacccccgugcacgacugcaacaccaccugccagacccccaagggcgccaucaacaccagccugcccuuccagaacauccaccccaucaccaucggcaagugccccaaguacgugaagagcaccaagcugagacuggccaccggccugagaaacgugcccagcauccagagcagaggccuguucggcgccaucgccggcuucaucgagggcggcuggaccggcaugguggacggcugguacggcuaccaccaccagaacgagcagggcagcggcuacgccgccgaccugaagagcacccagaacgccaucgacaagaucaccaacaaggugaacagcgugaucgagaagaugaacacccaguucaccgccgugggcaaggaguucaaccaccuggagaagagaaucgagaaccugaacaagaagguggacgacggcuuccuggacaucuggaccuacaacgccgagcugcuggugcugcuggagaacgagagaacccuggacuaccacgacagcaacgugaagaaccuguacgagaaggugagaagccagcugaagaacaacgccaaggagaucggcaacggcugcuucgaguucuaccacaagugcgacaacaccugcauggagagcgugaagaacggcaccuacgacuaccccaaguacagcgaggaggccaagcugaacagagaggagaucgacggcgugaagcuggagagcaccagaaucuaccagauccuggccaucuacagcaccguggccagcagccuggugcugguggugagccugggcgccaucagcuucuggaugugcagcaacggcagccugcagugcagaaucugcaucuga

SEQ ID NO: 166605 - RNA, 1701 nt, Artificial Sequence; identical to SEQ ID NO: 164281
  derived and/or modified CDS sequence (opt4) from hemagglutinin__InfluenzaA__ADX98920

SEQ ID NO: 166606 - RNA, 1701 nt, Artificial Sequence; identical to SEQ ID NO: 163893
  derived and/or modified CDS sequence (opt4) from hemagglutinin__InfluenzaA__ADX98930

SEQ ID NO: 166607 - RNA, 1701 nt, Artificial Sequence; identical to SEQ ID NO: 163520
  derived and/or modified CDS sequence (opt4) from hemagglutinin__InfluenzaA__ADX98940

SEQ ID NO: 166608 - RNA, 1701 nt, Artificial Sequence; identical to SEQ ID NO: 165349
  derived and/or modified CDS sequence (opt4) from hemagglutinin__InfluenzaA__ADX98950

SEQ ID NO: 166609 - RNA, 1701 nt, Artificial Sequence; identical to SEQ ID NO: 165330
  derived and/or modified CDS sequence (opt4) from hemagglutinin__InfluenzaA__ADX98960

SEQ ID NO: 166610 - RNA, 1701 nt, Artificial Sequence
  derived and/or modified CDS sequence (opt4) from hemagglutinin__InfluenzaA__ADX98970
augaaggccauccugguggugcugcuguacaccuucgccaccgccaacgccgacacccugugcaucggcuaccacgccaacaacagcaccgacaccguggacaccgugcuggagaagaacgugaccgugacccacagcgugaaccugcuggaggacaagcacaacggcaagcugugcaagcugagaggcguggccccccugcaccugggcaagugcaacaucgccggcuggauccugggcaaccccgagugcgagagccugagcaccgccagcagcuggagcuacaucguggagaccagcagcagcgacaacggcaccugcuaccccggcgacuucaucgacuacgaggagcugagagagcagcugagcagcgugagcagcuucgagagauucgagaucuuccccaagaccagcagcuggcccaaccacgacagcaacaagggcgugaccgccgccugcccccacgccggcgccaagagcuucuacaagaaccugaucuggcuggugaagaagggcaacagcuaccccaagcugagcaagagcuacaucaacgacaagggcaaggaggugcuggugcuguggggcauccaccaccccagcaccagcgccgaccagcagggccuguaccagaacgccgacgccuacguguucgugggcaccagcagauacagcaagaaguucaagcccgagaucgccaucagacccaaggugagagaccaggagggcagaaugaacuacuacuggacccugguggagcccggcgacaagaucaccuucgaggccaccggcaaccugguggugcccagauacgccuucgccauggagagaaacgccggcagcggcaucaucaucagcgacacccccgugcacgacugcaacaccaccugccagacccccaagggcgccaucaacaccagccugcccuuccagaacauccaccccaucaccaucggcaagugccccaaguacgugaagagcaccaagcugagacuggccaccggccugagaaacauccccagcauccagagcagaggccuguucggcgccaucgccggcuucaucgagggcggcuggaccggcaugguggacggcugguacggcuaccaccaccagaacgagcagggcagcggcuacgccgccgaccugaagagcacccagaacgccaucgacaagaucaccaacaaggugaacagcgugaucgagaagaugaacacccaguucaccgccgugggcaaggaguucaaccaccuggagaagagaaucgagaaccugaacaagaagguggacgacggcuuccuggacaucuggaccuacaacgccgagcugcuggugcugcuggagaacgagagaacccuggacuaccacgacagcaacgugaagaaccuguacgagaaggugagaagccagcugaagaacaacgccaaggagaucggcaacggcugcuucgaguucuaccacaagugcgacaacaccugcauggagagcgugaagaacggcaccuacgacuaccccaaguacagcgaggaggccaagcugaacagagaggagaucgacggcgugaagcuggagagcaccagaaucuaccagauccuggccaucuacagcaccguggccagcagccuggugcugguggugagccugggcgccaucagcuucuggaugugcagcaacggcagccugcagugcagaaucugcaucuga

SEQ ID NO: 166611 - RNA, 1701 nt, Artificial Sequence; identical to SEQ ID NO: 163830
  derived and/or modified CDS sequence (opt4) from hemagglutinin__InfluenzaA__ADX98980

SEQ ID NO: 166612 - RNA, 1701 nt, Artificial Sequence; identical to SEQ ID NO: 162729
  derived and/or modified CDS sequence (opt4) from hemagglutinin__InfluenzaA__ADX98990

SEQ ID NO: 166613 - RNA, 1701 nt, Artificial Sequence; identical to SEQ ID NO: 163893
  derived and/or modified CDS sequence (opt4) from hemagglutinin__InfluenzaA__ADX99000

SEQ ID NO: 166614 - RNA, 1698 nt, Artificial Sequence
  derived and/or modified CDS sequence (opt4) from hemagglutinin__InfluenzaA__ADX99581
augaaggccaaccugcuggugcugcugagcgcccuggccgccgccgacgccgacaccaucugcaucggcuaccacgccaacaacagcaccgacaccguggacaccgugcuggagaagaacgugaccgugacccacagcgugaaccugcuggaggacagccacaacggcaagcugugcagacugaagggcaucgccccccugcagcugggcaagugcaacaucgccggcuggcugcugggcaaccccgagugcgacccccugcugcccgugagaagcuggagcuacaucguggagacccccaacagcgagaacggcaucugcuaccccggcgacuucaucgacuacgaggagcugagagagcagcugagcagcgugagcagcuucgagagauucgagaucuuccccaaggagagcagcuggcccaaccacaacaccaacggcgugaccgccgccugcagccacgagggcaagagcagcuucuacagaaaccugcuguggcugaccgagaaggagggcagcuaccccaagcugaagaacagcuacgugaacaagaagggcaaggaggugcuggugcuguggggcauccaccacccccccaacagcaaggagcagcagaaccuguaccagaacgagaacgccuacgugagcguggugaccagcaacuacaacagaagauucacccccgagaucgccgagagacccaaggugagagaccaggccggcagaaugaacuacuacuggacccugcugaagcccggcgacaccaucaucuucgaggccaacggcaaccugaucgcccccauguacgccuucgcccugagcagaggcuucggcagcggcaucaucaccagcaacgccagcaugcacgagugcaacaccaagugccagaccccccugggcgccaucaacagcagccugcccuaccagaacauccaccccgugaccaucggcgagugccccaaguacgugagaagcgccaagcugagaauggugaccggccugagaaacacccccagcauccagagcagaggccuguucggcgccaucgccggcuucaucgagggcggcuggaccggcaugaucgacggcugguacggcuaccaccaccagaacgagcagggcagcggcuacgccgccgaccagaagagcacccagaacgccaucaacggcaucaccaacaaggugaacaccgugaucgagaagaugaacauccaguucaccgccgugggcaaggaguucaacaagcuggagaagagaauggagaaccugaacaagaagguggacgacggcuuccuggacaucuggaccuacaacgccgagcugcuggugcugcuggagaacgagagaacccuggacuuccacgacagcaacgugaagaaccuguacgagaaggugaagagccagcugaagaacaacgccaaggagaucggcaacggcugcuucgaguucuaccacaagugcgacaacgagugcauggagagcgugagaaacggcaccuacgacuaccccaaguacagcgaggagagcaagcugaacagagagaagguggacggcgugaagcuggagagcaugggcaucuaccagauccuggccaucuacagcaccguggccagcagccuggugcugcuggugagccugggcgccaucagcuucuggaugugcagcaacggcagccugcagugcagaaucugcaucuga

SEQ ID NO: 166615 - RNA, 1698 nt, Artificial Sequence; identical to SEQ ID NO: 166614
  derived and/or modified CDS sequence (opt4) from hemagglutinin__InfluenzaA__ADX99592

SEQ ID NO: 166616 - RNA, 1698 nt, Artificial Sequence; identical to SEQ ID NO: 166614
  derived and/or modified CDS sequence (opt4) from hemagglutinin__InfluenzaA__ADX99603

SEQ ID NO: 166617 - RNA, 1698 nt, Artificial Sequence
  derived and/or modified CDS sequence (opt4) from hemagglutinin__InfluenzaA__ADX99614
augaaggccaaccugcuggugcugcugagcgcccuggccgccgccgacgccgacaccaucugcaucggcuaccacgccaacaacagcaccgacaccguggacaccgugcuggagaagaacgugaccgugacccacagcgugaaccugcuggaggacagccacaacggcaagcugugcagacugaagggcaucgccccccugcagcugggcaagugcaacaucgccggcuggcugcugggcaaccccgagugcgacccccugcugcccgugagaagcuggagcuacaucguggagacccccaacagcgagaacggcaucugcuaccccggcgacuucaucgacuacgaggagcugagagagcagcugagcagcgugagcagcuucgagagauucgagaucuuccccaaggagagcagcuggcccaaccacaacaccaacggcgugaccgccgccugcagccacgagggcaagagcagcuucuacagaaaccugcuguggcugaccgagaagaagggcagcuaccccaagcugaagaacagcuacgugaacaagaagggcaaggaggugcuggugcuguggggcauccaccacccccccaacagcaaggagcagcagaaccuguaccagaacgagaacgccuacgugagcguggugaccagcaacuacaacagaagauucacccccgagaucgccgagagacccaaggugagagaccaggccggcagaaugaacuacuacuggacccugcugaagcccggcgacaccaucaucuucgaggccaacggcaaccugaucgcccccauguacgccuucgcccugagcagaggcuucggcagcggcaucaucaccagcaacgccagcaugcacgagugcaacaccaagugccagaccccccugggcgccaucaacagcagccugcccuaccagaacauccaccccgugaccaucggcgagugccccaaguacgugagaagcgccaagcugagaauggugaccggccugagaaacacccccagcauccagagcagaggccuguucggcgccaucgccggcuucaucgagggcggcuggaccggcaugaucgacggcugguacggcuaccaccaccagaacgagcagggcagcggcuacgccgccgaccagaagagcacccagaacgccaucaacggcaucaccaacaaggugaacaccgugaucgagaagaugaacauccaguucaccgccgugggcaaggaguucaacaagcuggagaagagaauggagaaccugaacaagaagguggacgacggcuuccuggacaucuggaccuacaacgccgagcugcuggugcugcuggagaacgagagaacccuggacuuccacgacagcaacgugaagaaccuguacgagaaggugaagagccagcugaagaacaacgccaaggagaucggcaacggcugcuucgaguucuaccacaagugcgacaacgagugcauggagagcgugagaaacggcaccuacgacuaccccaaguacagcgaggagagcaagcugaacagagagaagguggacggcgugaagcuggagagcaugggcaucuaccagauccuggccaucuacagcaccguggccagcagccuggugcugcuggugagccugggcgccaucagcuucuggaugugcagcaacggcagccugcagugcagaaucugcaucuga

SEQ ID NO: 166618 - RNA, 1698 nt, Artificial Sequence
  derived and/or modified CDS sequence (opt4) from hemagglutinin__InfluenzaA__ADX99625
augaaggccaaccugcuggugcugcugagcgcccuggccgccgccgacgccgacaccaucugcaucggcuaccacgccaacaacagcaccgacaccguggacaccgugcuggagaagaacgugaccgugacccacagcgugaaccugcuggaggacagccacaacggcaagcugugcagacugaagggcaucgccccccugcagcugggcaagugcaacaucgccggcuggcugcugggcaaccccgagugcgacccccugcugcccgugagaagcuggagcuacaucguggagacccccaacagcgagaacggcaucugcuaccccggcgacuucaucgacuacgaggagcugagagagcagcugagcagcgugagcagcuucgagagauucgagaucuuccccaaggagagcagcuggcccaaccacaacaccaacggcgugaccgccgccugcagccacgagggcaagagcagcuucuacagaaaccugcuguggcugaccgagaaggagggcagcuaccccaagcugaagaacagcuacgugaacaagaagggcaaggaggugcuggugcuguggggcauccaccacccccccaacagcaaggagcagcagaaccuguaccagaacgagaacgccuacgugagcguggugaccagcaacuacaacagaagauucacccccgagaucgccgagagacccaaggugagagaccaggccggcagaaugaacuacuacuggacccugcugaagcccggcgacaccaucaucuucggcgccaacggcaaccugaucgcccccauguacgccuucgcccugagcagaggcuucggcagcggcaucaucaccagcaacgccagcaugcacgagugcaacaccaagugccagaccccccugggcgccaucaacagcagccugcccuaccagaacauccaccccgugaccaucggcgagugccccaaguacgugagaagcgccaagcugagaauggugaccggccugagaaacacccccagcauccagagcagaggccuguucggcgccaucgccggcuucaucgagggcggcuggaccggcaugaucgacggcugguacggcuaccaccaccagaacgagcagggcagcggcuacgccgccgaccagaagagcacccagaacgccaucaacggcaucaccaacaaggugaacaccgugaucgagaagaugaacauccaguucaccgccgugggcaaggaguucaacaagcuggagaagagaauggagaaccugaacaagaagguggacgacggcuuccuggacaucuggaccuacaacgccgagcugcuggugcugcuggagaacgagagaacccuggacuuccacgacagcaacgugaagaaccuguacgagaaggugaagagccagcugaagaacaacgccaaggagaucggcaacggcugcuucgaguucuaccacaagugcgacaacgagugcauggagagcgugagaaacggcaccuacgacuaccccaaguacagcgaggagagcaagcugaacagagagaagguggacggcgugaagcuggagagcaugggcaucuaccagauccuggccaucuacagcaccguggccagcagccuggugcugcuggugagccugggcgccaucagcuucuggaugugcagcaacggcagccugcagugcagaaucugcaucuga

SEQ ID NO: 166619 - RNA, 1698 nt, Artificial Sequence
  derived and/or modified CDS sequence (opt4) from hemagglutinin__InfluenzaA__ADX99636
augaaggccaaccugcuggugcugcugagcgcccuggccgccgccgacgccgacaccaucugcaucggcuaccacgccaacaacagcaccgacaccguggacaccgugcuggagaagaacgugaccgugacccacagcgugaaccugcuggaggacagccacaacggcaagcugugcagacugaagggcaucgccccccugcagcugggcaagugcaacaucgccggcuggcugcugggcaaccccgagugcgacccccugcugcccgugagaagcuggagcuacaucguggagacccccaacagcgagaacggcaucugcuaccccggcgacuucaucgacuacgaggagcugagagagcagcugagcagcgugagcagcuucgagagauucgagaucuuccccaaggagagcagcuggcccaaccacaacaccaacggcgugaccgccgccugcagccacgagggcaagagcagcuucuacagaaaccugcuguggcugaccaagaaggagggcagcuaccccaagcugaagaacagcuacgugaacaagaagggcaaggaggugcuggugcuguggggcauccaccacccccccaacagcaaggagcagcagaaccuguaccagaacgagaacgccuacgugagcguggugaccagcaacuacaacagaagauucacccccgagaucgccgagagacccaaggugagagaccaggccggcagaaugaacuacuacuggacccugcugaagcccggcgacaccaucaucuucgaggccaacggcaaccugaucgcccccauguacgccuucgcccugagcagaggcuucggcagcggcaucaucaccagcaacgccagcaugcacgagugcaacaccaagugccagaccccccugggcgccaucaacagcagccugcccuaccagaacauccaccccgugaccaucggcgagugccccaaguacgugagaagcgccaagcugagaauggugaccggccugagaaacacccccagcauccagagcagaggccuguucggcgccaucgccggcuucaucgagggcggcuggaccggcaugaucgacggcugguacggcuaccaccaccagaacgagcagggcagcggcuacgccgccgaccagaagagcacccagaacgccaucaacggcaucaccaacaaggugaacaccgugaucgagaagaugaacauccaguucaccgccgugggcaaggaguucaacaagcuggagaagagaauggagaaccugaacaagaagguggacgacggcuuccuggacaucuggaccuacaacgccgagcugcuggugcugcuggagaacgagagaacccuggacuuccacgacagcaacgugaagaaccuguacgagaaggugaagagccagcugaagaacaacgccaaggagaucggcaacggcugcuucgaguucuaccacaagugcgacaacgagugcauggagagcgugagaaacggcaccuacgacuaccccaaguacagcgaggagagcaagcugaacagagagaagguggacggcgugaagcuggagagcaugggcaucuaccagauccuggccaucuacagcaccguggccagcagccuggugcugcuggugagccugggcgccaucagcuucuggaugugcagcaacggcagccugcagugcagaaucugcaucuga

SEQ ID NO: 166620 - RNA, 1698 nt, Artificial Sequence; identical to SEQ ID NO: 163338
  derived and/or modified CDS sequence (opt4) from hemagglutinin__InfluenzaA__ADX99647

SEQ ID NO: 166621 - RNA, 1698 nt, Artificial Sequence
  derived and/or modified CDS sequence (opt4) from hemagglutinin__InfluenzaA__ADX99680
augaaggccaaccugcuggugcugcugugcgcccuggccgccgccgacgccgacaccaucugcaucggcuaccacgccaacaacagcaccgacaccguggacaccgugcuggagaagaacgugaccgugacccacagcgugaaccugcuggaggacagccacaacggcaagcugugcagacugaagggcaucgccccccugcagcugggcaagugcaacaucgccggcuggcugcugggcaaccccgagugcgacccccugcugcccgugagaagcuggagcuacaucguggagacccccaacagcgagaacggcaucugcuaccccggcgacuucaucgacuacgaggagcugagagagcagcugagcagcgugagcagcuucgagagauucgagaucuuccccaaggagagcagcuggagcaaccacaacaccaacggcgugaccgccgccugcagccacgagggcaagagcagcuucuacagaaaccugcuguggcugaccgagaaggagggcagcuaccccaagcugaagaacagcuacgugaacaagaagggcaaggaggugcuggugcuguggggcauccaccacccccccaacagcaaggagcagcagaaccuguaccagaacgagaacgccuacgugagcguggugaccagcaacuacaacagaagauucacccccgagaucgccgagagacccaaggugagagaccaggccggcagaaugaacuacuacuggacccugcugaagcccggcgacaccaucaucuucgaggccaacggcaaccugaucgcccccauguacgccuucgcccugagcagaggcuucggcagcggcaucaucaccagcaacgccagcaugcacgagugcaacaccaagugccagaccccccugggcgccaucaacagcagccugcccuaccagaacauccaccccgugaccaucggcgagugccccaaguacgugagaagcgccaagcugagaauggugaccggccugagaaacauccccagcauccagagcagaggccuguucggcgccaucgccggcuucaucgagggcggcuggaccggcaugaucgacggcugguacggcuaccaccaccagaacgagcagggcagcggcuacgccgccgaccagaagagcacccagaacgccaucaacggcaucaccaacaaggugaacaccgugaucgagaagaugaacauccaguucaccgccgugggcaaggaguucaacaagcuggagaagagaauggagaaccugaacaagaagguggacgacggcuuccuggacaucuggaccuacaacgccgagcugcuggugcugcuggagaacgagagaacccuggacuuccacgacagcaacgugaagaaccuguacgagaaggugaagagccagcugaagaacaacgccaaggagaucggcaacggcugcuucgaguucuaccacaagugcgacaacgagugcauggagagcgugagaaacggcaccuacgacuaccccaaguacagcgaggagagcaagcugaacagagagaagguggacggcgugaagcuggagagcaugggcaucuaccagauccuggccaucuacagcaccguggccagcagccuggugcugcuggugagccugggcgccaucagcuucuggaugugcagcaacggcagccugcagugcagaaucugcaucuga

SEQ ID NO: 166622 - RNA, 1698 nt, Artificial Sequence
  derived and/or modified CDS sequence (opt4) from hemagglutinin__InfluenzaA__ADX99702
augaaggccaaccugcuggugcugcugugcgcccuggccgccgccgacgccgacaccaucugcaucggcuaccacgccaacaacagcaccgacaccguggacaccgugcuggagaagaacgugaccgugacccacagcgugaaccugcuggaggacagccacaacggcaagcugugcagacugaagggcaucgccccccugcagcugggcaagugcaacaucgccggcuggcugcugggcaaccccgagugcgacccccugcugcccgugagaagcuggagcuacaucguggagacccccaacagcgagaacggcaucugcuaccccggcgacuucaucgacuacgaggagcugagagagcagcugagcagcgugagcagcuucgagagauucgagaucuuccccaaggagagcagcuggcccaaccacaacaccaacggcgugaccgccgccugcagccacgagggcaagagcagcuucuacagaaaccugcuguggcugaccgagaaggagggcagcuaccccaagcugaagaagagcuacgugaacaagaagggcaaggaggugcuggugcuguggggcauccaccacccccccaacagcaaggagcagcagaaccuguaccagaacgagaacgccuacgugagcguggugaccagcaacuacaacagaagauucacccccgagaucgccgagagacccaaggugagagaccaggccggcagaaugaacuacuacuggacccugcugaagcccggcgacaccaucaucuucgaggccaacggcaaccugaucgcccccauguacgccuucgcccugagcagaggcuucggcagcggcaucaucaccagcaacgccagcaugcacgagugcaacaccaagugccagaccccccugggcgccaucaacagcagccugcccuaccagaacauccaccccgugaccaucggcgagugccccaaguacgugagaagcgccaagcugagaauggugaccggccugagaaacauccccagcauccagagcagaggccuguucggcgccaucgccggcuucaucgagggcggcuggaccggcaugaucgacggcugguacggcuaccaccaccagaacgagcagggcagcggcuacgccgccgaccagaagagcacccagaacgccaucaacggcaucaccaacaaggugaacaccgugaucgagaagaugaacauccaguucaccgccgugggcaaggaguucaacaagcuggagaagagaauggagaaccugaacaagaagguggacgacggcuuccuggacaucuggaccuacaacgccgagcugcuggugcugcuggagaacgagagaacccuggacuuccacgacagcaacgugaagaaccuguacgagaaggugaagagccagcugaagaacaacgccaaggagaucggcaacggcugcuucgaguucuaccacaagugcgacaacgagugcauggagagcgugagaaacggcaccuacgacuaccccaaguacagcgaggagagcaagcugaacagagagaagguggacggcgugaagcuggagagcaugggcaucuaccagauccuggccaucuacagcaccguggccagcagccuggugcugcuggugagccugggcgccaucagcuucuggaugugcagcaacggcagccugcagugcagaaucugcaucuga

SEQ ID NO: 166623 - RNA, 1698 nt, Artificial Sequence; identical to SEQ ID NO: 166622
  derived and/or modified CDS sequence (opt4) from hemagglutinin__InfluenzaA__ADX99843

SEQ ID NO: 166624 - RNA, 1698 nt, Artificial Sequence
  derived and/or modified CDS sequence (opt4) from hemagglutinin__InfluenzaA__ADX99854
augaaggccaaccugcuggugcugcugugcgcccuggccgccgccgacgccgacaccaucugcaucggcuaccacgccaacaacagcaccgacaccguggacaccgugcuggagaagaacgugaccgugacccacagcgugaaccugcuggaggacagccacaacggcaagcugugcagacugaagggcaucgccccccugcagcugggcaagugcaacaucgccggcuggcugcugggcaaccccgagugcgacccccugcugcccgugagaagcuggagcuacaucguggagacccccaacagcgagaacggcaucugcuaccccggcgacuucaucgacuacgaggagcugagagagcagcugagcagcgugagcagcuucgagagauucgagaucuuccccaaggagagcagcuggcccaaccacaacaccaacggcgugaccgccgccugcagccacgagggcaagagcagcuucuacagaaaccugcuguggcugaccgagaaggagggcagcuaccugaagcugaagaacagcuacgugaacaagaagggcaaggaggugcuggugcuguggggcauccaccacccccccaacagcaaggagcagcagaaccuguaccagaacgagaacgccuacgugagcguggugaccagcaacuacaacagaagauucacccccgagaucgccgagagacccaaggugagagaccaggccggcagaaugaacuacuacuggacccugcugaagcccggcgacaccaucaucuucgaggccaacggcaaccugaucgcccccauguacgccuucgcccugagcagaggcuucggcagcggcaucaucaccagcaacgccagcaugcacgagugcaacaccaagugccagaccccccugggcgccaucaacagcagccugcccuaccagaacauccaccccgugaccaucggcgagugccccaaguacgugagaagcgccaagcugagaauggugaccggccugagaaacauccccagcauccagagcagaggccuguucggcgccaucgccggcuucaucgagggcggcuggaccggcaugaucgacggcugguacggcuaccaccaccagaacgagcagggcagcggcuacgccgccgaccagaagagcacccagaacgccaucaacggcaucaccaacaaggugaacaccgugaucgagaagaugaacauccaguucaccgccgugggcaaggaguucaacaagcuggagaagagaauggagaaccugaacaagaagguggacgacggcuuccuggacaucuggaccuacaacgccgagcugcuggugcugcuggagaacgagagaacccuggacuuccacgacagcaacgugaagaaccuguacgagaaggugaagagccagcugaagaacaacgccaaggagaucggcaacggcugcuucgaguucuaccacaagugcgacaacgagugcauggagagcgugagaaacggcaccuacgacuaccccaaguacagcgaggagagcaagcugaacagagagaagguggacggcgugaagcuggagagcaugggcaucuaccagauccuggccaucuacagcaccguggccagcagccuggugcugcuggugagccugggcgccaucagcuucuggaugugcagcaacggcagccugcagugcagaaucugcaucuga

SEQ ID NO: 166625 - RNA, 1698 nt, Artificial Sequence
  derived and/or modified CDS sequence (opt4) from hemagglutinin__InfluenzaA__ADX99865
augaaggccaaccugcuggugcugcugugcgcccuggccgccgccgacgccgacaccaucugcaucggcuaccacgccaacaacagcaccgacaccguggacaccgugcuggagaagaacgugaccgugacccacagcgugaaccugcuggaggacagccacaacggcaagcugugcagacugaagggcaucgccccccugcagcugggcaagugcaacaucgccggcuggcugcugggcaaccccgagugcgacccccugcugcccgugagaagcuggagcuacaucguggagacccccaacagcgagaacggcaucugcuaccccggcgacuucaucgacuacgaggagcugagagagcagcugagcagcgugagcagcuucgagagauucgagaucuuccccaaggagagcagcuggcccaaccacaacaccaacggcgugaccgccgccugcagccacgagggcaagagcagcuucuacagaaaccugcuguggcugaccgagaaggagggcagcuaccccaagcagaagaacagcuacgugaacaagaagggcaaggaggugcuggugcuguggggcauccaccacccccccaacagcaaggagcagcagaaccuguaccagaacgagaacgccuacgugagcguggugaccagcaacuacaacagaagauucacccccgagaucgccgagagacccaaggugagagaccaggccggcagaaugaacuacuacuggacccugcugaagcccggcgacaccaucaucuucgaggccaacggcaaccugaucgcccccauguacgccuucgcccugagcagaggcuucggcagcggcaucaucaccagcaacgccagcaugcacgagugcaacaccaagugccagaccccccugggcgccaucaacagcagccugcccuaccagaacauccaccccgugaccaucggcgagugccccaaguacgugagaagcgccaagcugagaauggugaccggccugagaaacauccccagcauccagagcagaggccuguucggcgccaucgccggcuucaucgagggcggcuggaccggcaugaucgacggcugguacggcuaccaccaccagaacgagcagggcagcggcuacgccgccgaccagaagagcacccagaacgccaucaacggcaucaccaacaaggugaacaccgugaucgagaagaugaacauccaguucaccgccgugggcaaggaguucaacaagcuggagaagagaauggagaaccugaacaagaagguggacgacggcuuccuggacaucuggaccuacaacgccgagcugcuggugcugcuggagaacgagagaacccuggacuuccacgacagcaacgugaagaaccuguacgagaaggugaagagccagcugaagaacaacgccaaggagaucggcaacggcugcuucgaguucuaccacaagugcgacaacgagugcauggagagcgugagaaacggcaccuacgacuaccccaaguacagcgaggagagcaagcugaacagagagaagguggacggcgugaagcuggagagcaugggcaucuaccagauccuggccaucuacagcaccguggccagcagccuggugcugcuggugagccugggcgccaucagcuucuggaugugcagcaacggcagccugcagugcagaaucugcaucuga

SEQ ID NO: 166626 - RNA, 1698 nt, Artificial Sequence
  derived and/or modified CDS sequence (opt4) from hemagglutinin__InfluenzaA__ADX99887
augaaggccaaccugcuggugcugcugugcgcccuggccgccgccgacgccgacaccaucugcaucggcuaccacgccaacaacagcaccgacaccguggacaccgugcuggagaagaacgugaccgugacccacagcgugaaccugcuggaggacagccacaacggcaagcugugcagacugaagggcaucgccccccugcagcugggcaagugcaacaucgccggcuggcugcugggcaaccccgagugcgacccccugcugcccgugagaagcuggagcuacaucguggagacccccaacagcgagaacggcaucugcuaccccggcgacuucaucgacuacgaggagcugagagagcagcugagcagcgugagcagcuucgagagauucgagaucuuccccaaggagagcagcuggcccaaccacaacaccaacggcgugaccgccgccugcagccacgagggcaagagcagcuucuacagaaaccugcuguggcugaccgagaaggagggcagcuaccccaagcuggagaacagcuacgugaacaagaagggcaaggaggugcuggugcuguggggcauccaccacccccccaacagcaaggagcagcagaaccuguaccagaacgagaacgccuacgugagcguggugaccagcaacuacaacagaagauucacccccgagaucgccgagagaagcaaggugagagaccaggccggcagaaugaacuacuacuggacccugcugaagcccggcgacaccaucaucuucgaggccaacggcaaccugaucgcccccauguacgccuucgcccugagcagaggcuucggcagcggcaucaucaccagcaacgccagcaugcacgagugcaacaccaagugccagaccccccugggcgccaucaacagcagccugcccuaccagaacauccaccccgugaccaucggcgagugccccaaguacgugagaagcgccaagcugagaauggugaccggccugagaaacauccccagcauccagagcagaggccuguucggcgccaucgccggcuucaucgagggcggcuggaccggcaugaucgacggcugguacggcuaccaccaccagaacgagcagggcagcggcuacgccgccgaccagaagagcacccagaacgccaucaacggcaucaccaacaaggugaacaccgugaucgagaagaugaacauccaguucaccgccgugggcaaggaguucaacaagcuggagaagagaauggagaaccugaacaagaagguggacgacggcuuccuggacaucuggaccuacaacgccgagcugcuggugcugcuggagaacgagagaacccuggacuuccacgacagcaacgugaagaaccuguacgagaaggugaagagccagcugaagaacaacgccaaggagaucggcaacggcugcuucgaguucuaccacaagugcgacaacgagugcauggagagcgugagaaacggcaccuacgacuaccccaaguacagcgaggagagcaagcugaacagagagaagguggacggcgugaagcuggagagcaugggcaucuaccagauccuggccaucuacagcaccguggccagcagccuggugcugcuggugagccugggcgccaucagcuucuggaugugcagcaacggcagccugcagugcagaaucugcaucuga

SEQ ID NO: 166627 - RNA, 1698 nt, Artificial Sequence
  derived and/or modified CDS sequence (opt4) from hemagglutinin__InfluenzaA__ADX99898
augaaggccaaccugcuggugcugcugugcgcccuggccgccgccgacgccgacaccaucugcaucggcuaccacgccaacaacagcaccgacaccguggacaccgugcuggagaagaacgugaccgugacccacagcgugaaccugcuggaggacagccacaacggcaagcugugcagacugaagggcaucgccccccugcagcugggcaagugcaacaucgccggcuggcugcugggcaaccccgagugcgacccccugcugcccgugagaagcuggagcuacaucguggagacccccaacagcgagaacggcaucugcuaccccggcgacuucaucgacuacgaggagcugagagagcagcugagcagcgugagcagcuucgagagauucgagaucuuccccaaggagagcagcuggcccaaccacaacaccaacggcgugaccgccgccugcagccacgagggcaagagcagcuucuacagaaaccugcuguggcugaccgagaaggagggcagcuaccccaagcugaagaacuacuacgugaacaagaagggcaaggaggugcuggugcuguggggcauccaccacccccccaacagcaaggagcagcagaaccuguaccagaacgagaacgccuacgugagcguggugaccagcaacuacaacagaagauucacccccgagaucgccgagagacccaaggugagagaccaggccggcagaaugaacuacuacuggacccugcugaagcccggcgacaccaucaucuucgaggccaacggcaaccugaucgcccccauguacgccuucgcccugagcagaggcuucggcagcggcaucaucaccagcaacgccagcaugcacgagugcaacaccaagugccagaccccccugggcgccaucaacagcagccugcccuaccagaacauccaccccgugaccaucggcgagugccccaaguacgugagaagcgccaagcugagaauggugaccggccugagaaacauccccagcauccagagcagaggccuguucggcgccaucgccggcuucaucgagggcggcuggaccggcaugaucgacggcugguacggcuaccaccaccagaacgagcagggcagcggcuacgccgccgaccagaagagcacccagaacgccaucaacggcaucaccaacaaggugaacaccgugaucgagaagaugaacauccaguucaccgccgugggcaaggaguucaacaagcuggagaagagaauggagaaccugaacaagaagguggacgacggcuuccuggacaucuggaccuacaacgccgagcugcuggugcugcuggagaacgagagaacccuggacuuccacgacagcaacgugaagaaccuguacgagaaggugaagagccagcugaagaacaacgccaaggagaucggcaacggcugcuucgaguucuaccacaagugcgacaacgagugcauggagagcgugagaaacggcaccuacgacuaccccaaguacagcgaggagagcaagcugaacagagagaagguggacggcgugaagcuggagagcaugggcaucuaccagauccuggccaucuacagcaccguggccagcagccuggugcugcuggugagccugggcgccaucagcuucuggaugugcagcaacggcagccugcagugcagaaucugcaucuga

SEQ ID NO: 166628 - RNA, 1698 nt, Artificial Sequence
  derived and/or modified CDS sequence (opt4) from hemagglutinin__InfluenzaA__ADX99909
augaaggccaaccugcuggugcugcugugcgcccuggccgccgccgacgccgacaccaucugcaucggcuaccacgccaacaacagcaccgacaccguggacaccgugcuggagaagaacgugaccgugacccacagcgugaaccugcuggaggacagccacaacggcaagcugugcagacugaagggcaucgccccccugcagcugggcaagugcaacaucgccggcuggcugcugggcaaccccgagugcgacccccugcugcccgugagaagcuggagcuacaucguggagacccccaacagcgagaacggcaucugcuaccccggcgacuucaucgacuacgaggagcugagagagcagcugagcagcgugagcagcuucgagagauucgagaucuuccccaaggagagcagcuggcccaaccacaacaccaacggcgugaccgccgccugcagccacgagggcaagagcagcuucuacagaaaccugcuguggcugaccgagaaggagggcagcuaccccaagcugaagaacuucuacgugaacaagaagggcaaggaggugcuggugcuguggggcauccaccacccccccaacagcaaggagcagcagaaccuguaccagaacgagaacgccuacgugagcguggugaccagcaacuacaacagaagauucacccccgagaucgccgagagacccaaggugagagaccaggccggcagaaugaacuacuacuggacccugcugaagcccggcgacaccaucaucuucgaggccaacggcaaccugaucgcccccauguacgccuucgcccugagcagaggcuucggcagcggcaucaucaccagcaacgccagcaugcacgagugcaacaccaagugccagaccccccugggcgccaucaacagcagccugcccuaccagaacauccaccccgugaccaucggcgagugccccaaguacgugagaagcgccaagcugagaauggugaccggccugagaaacauccccagcauccagagcagaggccuguucggcgccaucgccggcuucaucgagggcggcuggaccggcaugaucgacggcugguacggcuaccaccaccagaacgagcagggcagcggcuacgccgccgaccagaagagcacccagaacgccaucaacggcaucaccaacaaggugaacaccgugaucgagaagaugaacauccaguucaccgccgugggcaaggaguucaacaagcuggagaagagaauggagaaccugaacaagaagguggacgacggcuuccuggacaucuggaccuacaacgccgagcugcuggugcugcuggagaacgagagaacccuggacuuccacgacagcaacgugaagaaccuguacgagaaggugaagagccagcugaagaacaacgccaaggagaucggcaacggcugcuucgaguucuaccacaagugcgacaacgagugcauggagagcgugagaaacggcaccuacgacuaccccaaguacagcgaggagagcaagcugaacagagagaagguggacggcgugaagcuggagagcaugggcaucuaccagauccuggccaucuacagcaccguggccagcagccuggugcugcuggugagccugggcgccaucagcuucuggaugugcagcaacggcagccugcagugcagaaucugcaucuga

SEQ ID NO: 166629 - RNA, 1698 nt, Artificial Sequence; identical to SEQ ID NO: 166628
  derived and/or modified CDS sequence (opt4) from hemagglutinin__InfluenzaA__ADX99920

SEQ ID NO: 166630 - RNA, 1698 nt, Artificial Sequence
  derived and/or modified CDS sequence (opt4) from hemagglutinin__InfluenzaA__ADX99931
augaaggccaaccugcuggugcugcugugcgcccuggccgccgccgacgccgacaccaucugcaucggcuaccacgccaacaacagcaccgacaccguggacaccgugcuggagaagaacgugaccgugacccacagcgugaaccugcuggaggacagccacaacggcaagcugugcagacugaagggcaucgccccccugcagcugggcaagugcaacaucgccggcuggcugcugggcaaccccgagugcgacccccugcugcccgugagaagcuggagcuacaucguggagacccccaacagcgagaacggcaucugcuaccccggcgacuucaucgacuacgaggagcugagagagcagcugagcagcgugagcagcuucgagagauucgagaucuuccccaaggagagcagcuggcccaaccacaacaccaacggcgugaccgccgccugcagccacgagggcaagagcagcuucuacagaaaccugcuguggcugaccgagaaggagggcagcuaccccaagcuggagaacagcuacgugaacaagaagggcaaggaggugcuggugcuguggggcauccaccacccccccaacagcaaggagcagcagaaccuguaccagaacgagaacgccuacgugagcguggugaccagcaacuacaacagaagauucacccccgagaucgccggcagacccaaggugagagaccaggccggcagaaugaacuacuacuggacccugcugaagcccggcgacaccaucaucuucgaggccaacggcaaccugaucgcccccauguacgccuucgcccugagcagaggcuucggcagcggcaucaucaccagcaacgccagcaugcacgagugcaacaccaagugccagaccccccugggcgccaucaacagcagccugcccuaccagaacauccaccccgugaccaucggcgagugccccaaguacgugagaagcgccaagcugagaauggugaccggccugagaaacauccccagcauccagagcagaggccuguucggcgccaucgccggcuucaucgagggcggcuggaccggcaugaucgacggcugguacggcuaccaccaccagaacgagcagggcagcggcuacgccgccgaccagaagagcacccagaacgccaucaacggcaucaccaacaaggugaacaccgugaucgagaagaugaacauccaguucaccgccgugggcaaggaguucaacaagcuggagaagagaauggagaaccugaacaagaagguggacgacggcuuccuggacaucuggaccuacaacgccgagcugcuggugcugcuggagaacgagagaacccuggacuuccacgacagcaacgugaagaaccuguacgagaaggugaagagccagcugaagaacaacgccaaggagaucggcaacagaugcuucgaguucuaccacaagugcgacaacgagugcauggagagcgugagaaacggcaccuacgacuaccccaaguacagcgaggagagcaagcugaacagagagaagguggacggcgugaagcuggagagcaugggcaucuaccagauccuggccaucuacagcaccguggccagcagccuggugcugcuggugagccugggcgccaucagcuucuggaugugcagcaacggcagccugcagugcagaaucugcaucuga

SEQ ID NO: 166631 - RNA, 1698 nt, Artificial Sequence
  derived and/or modified CDS sequence (opt4) from hemagglutinin__InfluenzaA__ADX99964
augaaggccaaccugcuggugcugcugugcgcccuggccgccgccgacgccgacaccaucugcaucggcuaccacgccaacaacagcaccgacaccguggacaccgugcuggagaagaacgugaccgugacccacagcgugaaccugcuggaggacagccacaacggcaagcugugcagacugaagggcaucgccccccugcagcugggcaagugcaacaucgccggcuggcugcugggcaaccccgagugcgacccccugcugcccgugagaagcuggagcuacaucguggagacccccaacagcgagaacggcaucugcuaccccggcgacuucaucgacuacgaggagcugagagagcagcugagcagcgugagcagcuucgagagauucgagaucuuccccaaggagagcagcuggcccaagcacaacaccaacggcgugaccgccgccugcagccacgagggcaagagcagcuucuacagaaaccugcuguggcugaccgagaaggagggcagcuaccccaagcugaagaacagcuacgugaacaagaagggcaaggaggugcuggugcuguggggcauccaccacccccccaacagcaaggagcagcagaaccuguaccagaacgagaacgccuacgugagcguggugaccagcaacuacaacagaagauucacccccgagaucgccgagagacccaaggugagagaccaggccggcagaaugaacuacuacuggacccugcugaagcccggcgacaccaucaucuucgaggccaacggcaaccugaucgcccccauguacgccuucgcccugagcagaggcuucggcagcggcaucaucaccagcaacgccagcaugcacgagugcaacaccaagugccagaccccccugggcgccaucaacagcagccugcccuaccagaacauccaccccgugaccaucggcgagugccccaaguacgugagaagcgccaagcugagaauggugaccggccugagaaacauccccagcauccagagcagaggccuguucggcgccaucgccggcuucaucgagggcggcuggaccggcaugaucgacggcugguacggcuaccaccaccagaacgagcagggcagcggcuacgccgccgaccagaagagcacccagaacgccaucaacggcaucaccaacaaggugaacaccgugaucgagaagaugaacauccaguucaccgccgugggcaaggaguucaacaagcuggagaagagaauggagaaccugaacaagaagguggacgacggcuuccuggacaucuggaccuacaacgccgagcugcuggugcugcuggagaacgagagaacccuggacuuccacgacagcaacgugaagaaccuguacgagaaggugaagagccagcugaagaacaacgccaaggagaucggcaacggcugcuucgaguucuaccacaagugcgacaacgagugcauggagagcgugagaaacggcaccuacgacuaccccaaguacagcgaggagagcaagcugaacagagagaagguggacggcgugaagcuggagagcaugggcaucuaccagauccuggccaucuacagcaccguggccagcagccuggugcugcuggugagccugggcgccaucagcuucuggaugugcagcaacggcagccugcagugcagaaucugcaucuga

SEQ ID NO: 166632 - RNA, 1698 nt, Artificial Sequence
  derived and/or modified CDS sequence (opt4) from hemagglutinin__InfluenzaA__ADX99975
augaaggccaaccugcuggugcugcugugcgcccuggccgccgccgacgccgacaccaucugcaucggcuaccacgccaacaacagcaccgacaccguggacaccgugcuggagaagaacgugaccgugacccacagcgugaaccugcuggaggacagccacaacggcaagcugugcagacugaagggcaucgccccccugcagcugggcaagugcaacaucgccggcuggcugcugggcaaccccgagugcgacccccugcugcccgugagaagcuggagcuacaucguggagacccccaacagcgagaacggcaucugcuaccccggcgacuucaucgacuacgaggagcugagagagcagcugagcagcgugagcagcuucgagagauucgagaucuuccccaaggagagcagcuggcccaaccacaacaccaacggcgugaccgccaccugcagccacgagggcaagagcagcuucuacagaaaccugcuguggcugaccgagaaggagggcagcuaccccgagcugaagaacagcuacgugaacaagaagggcaaggaggugcuggugcuguggggcauccaccacccccccaacagcaaggagcagcagaaccuguaccagaacgagaacgccuacgugagcguggugaccagcaacuacaacagaagauucacccccgagaucgccgagagacccaaggugagagaccaggccggcagaaugaacuacuacuggacccugcugaagcccggcgacaccaucaucuucgaggccaacggcaaccugaucgcccccauguacgccuucgcccugagcagaggcuucggcagcggcaucaucaccagcaacgccagcaugcacgagugcaacaccaagugccagaccccccugggcgccaucaacagcagccugcccuaccagaacauccaccccgugaccaucggcgagugccccaaguacgugagaagcgccaagcugagaauggugaccggccugagaaacauccccagcauccagagcagaggccuguucggcgccaucgccggcuucaucgagggcggcuggaccggcaugaucgacggcugguacggcuaccaccaccagaacgagcagggcagcggcuacgccgccgaccagaagagcacccagaacgccaucaacggcaucaccaacaaggugaacaccgugaucgagaagaugaacauccaguucaccgccgugggcaaggaguucaacaagcuggagaagagaauggagaaccugaacaagaagguggacgacggcuuccuggacaucuggaccuacaacgccgagcugcuggugcugcuggagaacgagagaacccuggacuuccacgacagcaacgugaagaaccuguacgagaaggugaagagccagcugaagaacaacgccaaggagaucggcaacggcugcuucgaguucuaccacaagugcgacaacgagugcauggagagcgugagaaacggcaccuacgacuaccccaaguacagcgaggagagcaagcugaacagagagaagguggacggcgugaagcuggagagcaugggcaucuaccagauccuggccaucuacagcaccguggccagcagccuggugcugcuggugagccugggcgccaucagcuucuggaugugcagcaacggcagccugcagugcagaaucugcaucuga

SEQ ID NO: 166633 - RNA, 1698 nt, Artificial Sequence
  derived and/or modified CDS sequence (opt4) from hemagglutinin__InfluenzaA__ADX99986
augaaggccaaccugcuggugcugcugugcgcccuggccgccgccgacgccgacaccaucugcaucggcuaccacgccaacaacagcaccgacaccguggacaccgugcuggagaagaacgugaccgugacccacagcgugaaccugcuggaggacagccacaacggcaagcugugcagacugaagggcaucgccccccugcagcugggcaagugcaacaucgccggcuggcugcugggcaaccccaagugcgacccccugcugcccgugagaagcuggagcuacaucguggagacccccaacagcgagaacggcaucugcuaccccggcgacuucaucgacuacgaggagcugagagagcagcugagcagcgugagcagcuucgagagauucgagaucuuccccaaggagagcagcuggcccaaccacaacaccaacggcgugaccgccgccugcagccacgagggcaagagcagcuucuacagaaaccugcuguggcugaccgagaaggagggcagcuaccccaagcuggagaacagcuacgugaacaagaagggcaaggaggugcuggugcuguggggcauccaccacccccccaacagcaaggagcagcagaaccuguaccagaacgagaacgccuacgugagcguggugaccagcaacuacaacagaagauucacccccgagaucgccgagagacccaaggugagagaccaggccggcagaaugaacuacuacuggacccugcugaagcccggcgacaccaucaucuucgaggccaacggcaaccugaucgcccccauguacgccuucgcccugagcagaggcuucggcagcggcaucaucaccagcaacgccagcaugcacgagugcaacaccaagugccagaccccccugggcgccaucaacagcagccugcccuaccagaacauccaccccgugaccaucggcgagugccccaaguacgugagaagcgccaagcugagaauggugaccggccugagaaacauccccagcauccagagcagaggccuguucggcgccaucgccggcuucaucgagggcggcuggaccggcaugaucgacggcugguacggcuaccaccaccagaacgagcagggcagcggcuacgccgccgaccagaagagcacccagaacgccaucaacggcaucaccaacaaggugaacaccgugaucgagaagaugaacauccaguucaccgccgugggcaaggaguucaacaagcuggagaagagaauggagaaccugaacaagaagguggacgacggcuuccuggacaucuggaccuacaacgccgagcugcuggugcugcuggagaacgagagaacccuggacuuccacgacagcaacgugaagaaccuguacgagaaggugaagagccagcugaagaacaacgccaaggagaucggcaacggcugcuucgaguucuaccacaagugcgacaacgagugcauggagagcgugagaaacggcaccuacgacuaccccaaguacagcgaggagagcaagcugaacagagagaagguggacggcgugaagcuggagagcaugggcaucuaccagauccuggccaucuacagcaccguggccagcagccuggugcugcuggugagccugggcgccaucagcuucuggaugugcagcaacggcagccugcagugcagaaucugcaucuga

SEQ ID NO: 166634 - RNA, 1698 nt, Artificial Sequence
  derived and/or modified CDS sequence (opt4) from hemagglutinin__InfluenzaA__ADX99997
augaaggccaaccugcuggugcugcugugcgcccuggccgccgccgacgccgacaccaucugcaucggcuaccacgccaacaacagcaccgacaccguggacaccgugcuggagaagaacgugaccgugacccacagcgugaaccugcuggaggacagccacaacggcaagcugugcagacugaagggcaucgccccccugcagcugggcaagugcaacaucgccggcuggcugcugggcaaccccgagugcgacccccugcugcccgugagaagcuggagcuacaucguggagacccccaacagcgagaacggcaucugcuaccccggcgacuucaucgacuacgaggagcugagagagcagcugagcagcgugagcagcuucgagagauucgagaucuuccccaaggagagcagcuggcccaaccacaacaccaacggcgugaccgccgccugcagccacgagggcaagagcagcuucuacagaaaccugcuguggcugaccgagaaggagggcagcuaccccaagcuggagaacagcuacgugaacaagaagggcaaggaggugcuggugcuguggggcauccaccacccccccaacagcaaggagcagcagaaccuguaccagaacgagaacgccuacgugagcguggugaccagcaacuacaacagaagauucacccccgagaucgccgagagacccaaggugagagaccaggccggcagaaugaaguacuacuggacccugcugaagcccggcgacaccaucaucuucgaggccaacggcaaccugaucgcccccauguacgccuucgcccugagcagaggcuucggcagcggcaucaucaccagcaacgccagcaugcacgagugcaacaccaagugccagaccccccugggcgccaucaacagcagccugcccuaccagaacauccaccccgugaccaucggcgagugccccaaguacgugagaagcgccaagcugagaauggugaccggccugagaaacauccccagcauccagagcagaggccuguucggcgccaucgccggcuucaucgagggcggcuggaccggcaugaucgacggcugguacggcuaccaccaccagaacgagcagggcagcggcuacgccgccgaccagaagagcacccagaacgccaucaacggcaucaccaacaaggugaacaccgugaucgagaagaugaacauccaguucaccgccgugggcaaggaguucaacaagcuggagaagagaauggagaaccugaacaagaagguggacgacggcuuccuggacaucuggaccuacaacgccgagcugcuggugcugcuggagaacgagagaacccuggacuuccacgacagcaacgugaagaaccuguacgagaaggugaagagccagcugaagaacaacgccaaggagaucggcaacggcugcuucgaguucuaccacaagugcgacaacgagugcauggagagcgugagaaacggcaccuacgacuaccccaaguacagcgaggagagcaagcugaacagagagaagguggacggcgugaagcuggagagcaugggcaucuaccagauccuggccaucuacagcaccguggccagcagccuggugcugcuggugagccugggcgccaucagcuucuggaugugcagcaacggcagccugcagugcagaaucugcaucuga

SEQ ID NO: 166635 - RNA, 1698 nt, Artificial Sequence
  derived and/or modified CDS sequence (opt4) from hemagglutinin__InfluenzaA__ADY00009
augaaggccaaccugcuggugcugcugugcgcccuggccgccgccgacgccgacaccaucugcaucggcuaccacgccaacaacagcaccgacaccguggacaccgugcuggagaagaacgugaccgugacccacagcgugaaccugcuggaggacagccacaacggcaagcugugcagacugaagggcaucgccccccugcagcugggcaagugcaacaucgccggcuggcugcugggcaaccccgagugcgacccccugcugcccgugagaagcuggagcuacaucguggagacccccaacagcgagaacggcaucugcuaccccggcgacuucaucgacuacgaggagcugagagagcagcugagcagcgugagcagcuucgagagauucgagaucuuccccaaggagagcagcuggcccaaccacaacaccaacggcgugaccgccgccugcagccacgagggcaagagcagcuucuacagaaaccugcuguggcugaccgagaagaagggcagcuaccccaagcuggagaacagcuacgugaacaagaagggcaaggaggugcuggugcuguggggcauccaccacccccccaacagcaaggagcagcagaaccuguaccagaacgagaacgccuacgugagcguggugaccagcaacuacaacagaagauucacccccgagaucgccgagagacccaaggugagagaccaggccggcagaaugaacuacuacuggacccugcugaagcccggcgacaccaucaucuucgaggccaacggcaaccugaucgcccccauguacgccuucgcccugagcagaggcuucggcagcggcaucaucaccagcaacgccagcaugcacgagugcaacaccaagugccagaccccccugggcgccaucaacagcagccugcccuaccagaacauccaccccgugaccaucggcgagugccccaaguacgugagaagcgccaagcugagaauggugaccggccugagaaacauccccagcauccagagcagaggccuguucggcgccaucgccggcuucaucgagggcggcuggaccggcaugaucgacggcugguacggcuaccaccaccagaacgagcagggcagcggcuacgccgccgaccagaagagcacccagaacgccaucaacggcaucaccaacaaggugaacaccgugaucgagaagaugaacauccaguucaccgccgugggcaaggaguucaacaagcuggagaagagaauggagaaccugaacaagaagguggacgacggcuuccuggacaucuggaccuacaacgccgagcugcuggugcugcuggagaacgagagaacccuggacuuccacgacagcaacgugaagaaccuguacgagaaggugaagagccagcugaagaacaacgccaaggagaucggcaacggcugcuucgaguucuaccacaagugcgacaacgagugcauggagagcgugagaaacggcaccuacgacuaccccaaguacagcgaggagagcaagcugaacagagagaagguggacggcgugaagcuggagagcaugggcaucuaccagauccuggccaucuacagcaccguggccagcagccuggugcugcuggugagccugggcgccaucagcuucuggaugugcagcaacggcagccugcagugcagaaucugcaucuga

SEQ ID NO: 166636 - RNA, 1698 nt, Artificial Sequence; identical to SEQ ID NO: 163338
  derived and/or modified CDS sequence (opt4) from hemagglutinin__InfluenzaA__ADY00020

SEQ ID NO: 166637 - RNA, 1698 nt, Artificial Sequence
  derived and/or modified CDS sequence (opt4) from hemagglutinin__InfluenzaA__ADY04727
augaaggccaagcugcuggugcugcugugcaccuucaccgccaccuacgccgacaccaucugcaucggcuaccacgccaacaacagcaccgacaccguggacaccgugcuggagaagaacgugaccgugacccacagcgugaaccugcuggaggacagccacaacggcaagcugugccugcugaagggcaucgccccccugcagcugggcaacugcagcguggccggcuggauccugggcaaccccgagugcgagcugcugaucagcaaggagagcuggagcuacaucguggagacccccaaccccgagaacggcaccugcuaccccggcuacuucgccgacuacgaggagcugagagagcagcugagcagcgugagcagcuucgagagauucgagaucuuccccaagggcagcagcuggcccaaccacaccgugaccggcgugagcgccagcugcagccacaacggcaagagcagcuucuacagaaaccugcuguggcugaccggcaagaacggccuguaccccaaccugagcaugagcuacgugaacaacaaggagaaggaggugcuggugcuguggggcgugcaccacccccccaacaucggcaaccagagagcccuguaccacaccgagaacgccuacgugagcguggugagcagccacuacagcagaagauucacccccgagaucgccaagagacccaaggugagagaccaggagggcagaaucaacuacuacuggacccugcuggagcccggcgacaccaucaucuucgaggccaacggcaaccugaucgcccccugguacgccuucgcccugagcagaggcuucggcagcggcaucaucaccagcaacgcccccaugggcgagugcgacgccaagugccagaccccccagggcgccaucaacagcagccugcccuuccagaacgugcaccccgugaccaucggcgagugccccaaguacgugagaagcgccaagcugagaauggugaccggccugagaaacauccccagcauccagagcagaggccuguucggcgccaucgccggcuucaucgagggcggcuggaccggcaugguggacggcugguacggcuaccaccaccagaacgagcagggcagcggcuacgccgccgaccagaagagcacccagaacgccaucaacggcaucaccaacaaggugaacagcgugaucgagaagaugaacacccaguucaccgccgugggcaaggaguucaacaagcuggagagaagaauggagaaccugaacaagaagguggacgacggcuuccuggacaucuggaccuacaacgccgagcugcuggugcugcuggagaacgagagaacccuggacuuccacgacagcaaccugaagaaccuguacgagaaggugaagagccagcugaagaacaacgccaaggagaucggcaacggcugcuucgaguucuaccacaagugcaacaacgagugcauggagagcgugaagaacggcaccuacgacuaccccaaguacagcgaggagagcaagcugaacagagagaagaucgacggcgugaagcuggagagcaugggcguguaccagauccuggccaucuacagcaccguggccagcagccuggugcugcuggugagccugggcgccaucagcuucuggaugugcagcaacggcagccugcagugcagaaucugcaucuga

SEQ ID NO: 166638 - RNA, 1701 nt, Artificial Sequence; identical to SEQ ID NO: 163673
  derived and/or modified CDS sequence (opt4) from hemagglutinin__InfluenzaA__ADY11836

SEQ ID NO: 166639 - RNA, 1701 nt, Artificial Sequence; identical to SEQ ID NO: 163648
  derived and/or modified CDS sequence (opt4) from hemagglutinin__InfluenzaA__ADY17654

SEQ ID NO: 166640 - RNA, 1701 nt, Artificial Sequence
  derived and/or modified CDS sequence (opt4) from hemagglutinin__InfluenzaA__ADY17665
augaagaccaucaucgcccugagcuacauccugugccugaucuucgcccagaagcugcccggcaacgacaacagcaccgccacccugugccugggccaccacgccgugcccaacggcaccaucgugaagaccaucaccaacgaccagaucgaggugaccaacgccaccgagcuggugcagagcagcagcaccggcgagaucugcgacagcccccaccagauccuggacggcaagaacugcacccugaucgacgcccugcugggcgacccccagugcgacggcuuccagaacaagaagugggaccuguucguggagagaagcaaggccuacagcaacugcuaccccuacgacgugcccgacuacgccagccugagaagccugguggccagcagcggcacccuggaguucaacaacgagagcuucaacuggaccggcgugacccaggacggcaccagcagcgccugcaucagaagaagcaagaacagcuucuucagcagacugaacuggcugacccaccugaacuucaaguaccccgcccugaacgugaccaugcccaacaacgagcaguucgacaagcuguacaucuggggcgugcaccaccccggcaccgacaaggaccagaucuuccuguacgcccaggccagcggcagaaucaccgugagcaccaagagaagccagcagaccgccauccccaacaucggcagcagacccagagugagaaacauccccagcagaaucagcaucuacuggaccaucgugaagcccggcgacauccugcugaucaacagcaccggcaaccugaucgcccccagaggcuacuucaagaucagaagcggcaagagcagcaucaugagaagcgacgcccccaucggcaagugcaacagcgagugcaucacccccaacggcagcauccccaacgacaagcccuuccagaacgugaacagaaucaccuacggcgccugccccagauacgugaagcagaacacccugaagcuggccaccggcaugagaaacgugcccgagaagcagaccagaggcaucuucggcgccaucgccggcuucaucgagaacggcugggagggcaugguggacggcugguacggcuucagacaccagaacagcgagggcagaggccaggccgccgaccugaagagcacccaggccgccaucgaccagaucaacggcaagcugaacagacugaucggcaagaccaacgagaaguuccaccagaucgagaaggaguucagcgagguggagggcagaauccaggaccuggagaaguacguggaggacaccaagaucgaccuguggagcuacaacgccgagcugcugguggcccuggagaaccagcacaccaucgaccugaccgacagcgagaugaacaagcuguucgagaagaccaagaagcagcugagagagaacgccgaggacaugggcaacggcugcuucaagaucuaccacaagugcgacaacgccugcaucggcagcaucagaaacggcaccuacgaccacgacguguacagagacgaggcccugaacaacagauuccagaucaagggcguggagcugaagagcggcuacaaggacuggauccuguggaucagcuucgccaucagcugcuuccugcugugcguggcccugcugggcuucaucaugugggccugccagaagggcaacaucagaugcaacaucugcaucuga

SEQ ID NO: 166641 - RNA, 1701 nt, Artificial Sequence; identical to SEQ ID NO: 163673
  derived and/or modified CDS sequence (opt4) from hemagglutinin__InfluenzaA__ADY17676

SEQ ID NO: 166642 - RNA, 1701 nt, Artificial Sequence
  derived and/or modified CDS sequence (opt4) from hemagglutinin__InfluenzaA__ADY17687
augaagaccaucaucgcccugagcuacauccugugccugguguucgcccagaagcugcccggcaacgacaacagcaccgccacccugugccugggccaccacgccgugcccaacggcaccaucgugaagaccaucaccaacgaccagaucgaggugaccaacgccaccgagcuggugcagagcagcagcaccggcgagaucugcgacagcccccaccagauccuggacggcaagaacugcacccugaucgacgcccugcugggcgacccccagugcgacggcuuccagaacaagaagugggaccuguucguggagagaagcaaggccuacagcaacugcuaccccuacgacgugcccgacuacgccagccugagaagccugguggccagcagcggcacccuggaguucaacaacgagagcuucaacuggaccggcgugacccaggacggcaccagcagcgccugcaucagaagaagcaagaacagcuucuucagcagacugaacuggcugacccaccugaacuucaaguaccccgcccugaacgugaccaugcccaacaacgagcaguucgacaagcuguacaucuggggcgugcaccaccccggcaccgacaaggaccagaucuuccuguacgcccaggccagcggcagaaucaccgugagcaccaagagaagccagcagaccgccauccccaacaucggcagcagacccagagugagaaacauccccagcagaaucagcaucuacuggaccaucgugaagcccggcgacauccugcugaucaacagcaccggcaaccugaucgcccccagaggcuacuucaagaucagaagcggcaagagcagcaucaugagaagcgacgcccccaucggcaagugcaacagcgagugcaucacccccaacggcagcauccccaacgacaagcccuuccagaacgugaacagaaucaccuacggcgccugccccagauacgugaagcagaacacccugaagcuggccaccggcaugagaaacgugcccgagaagcagaccagaggcaucuucggcgccaucgccggcuucaucgagaacggcugggagggcaugguggacggcugguacggcuucagacaccagaacagcgagggcagaggccaggccgccgaccugaagagcacccaggccgccaucgaccagaucaacggcaagcugaacagacugaucggcaagaccaacgagaaguuccaccagaucgagaaggaguucagcgagguggagggcagaauccaggaccuggagaaguacguggaggacaccaagaucgaccuguggagcuacaacgccgagcugcugguggcccuggagaaccagcacaccaucgaccugaccgacagcgagaugaacaagcuguucgagaagaccaagaagcagcugagagagaacgccgaggacaugggcaacggcugcuucaagaucuaccacaagugcgacaacgccugcaucggcagcaucagaaacggcaccuacgaccacgacguguacagagacgaggcccugaacaacagauuccagaucaagggcguggagcugaagagcggcuacaaggacuggauccuguggaucagcuucgccaucagcugcuuccugcugugcgccgcccugcugggcuucaucaugugggccugccagaagggcaacaucagaugcaacaucugcaucuga

SEQ ID NO: 166643 - RNA, 1701 nt, Artificial Sequence; identical to SEQ ID NO: 163648
  derived and/or modified CDS sequence (opt4) from hemagglutinin__InfluenzaA__ADY17698

SEQ ID NO: 166644 - RNA, 1701 nt, Artificial Sequence
  derived and/or modified CDS sequence (opt4) from hemagglutinin__InfluenzaA__ADY38719
augaagaccaucaucgcccugagcuacauccugugccugguguucacccagaagcugcccggcaacgacaacagcaccgccacccugugccugggccaccacgccgugcccaacggcaccaucgugaagaccaucaccaacgaccagaucgaggugaccaacgccaccgagcuggugcagagcagcagcaccggcgagaucugcgacagcccccaccagauccuggacggcaagaacugcacccugaucgacgcccugcugggcgacccccagugcgacggcuuccagaacaagaagugggaccuguucguggagagaagcaaggccuacagcaacugcuaccccuacgacgugcccgacuacgccagccugagaagccugguggccagcagcggcacccuggaguucaacaacgagagcuucaacuggaccggcgugacccagaacggcaccagcagcgccugcaucagaagaagcaagaacagcuucuucagcagacugaacuggcugacccaccugaacuucaaguaccccgcccugaacgugaccaugcccaacaacgagcaguucgacaagcuguacaucuggggcgugcaccaccccggcaccgacaaggaccagaucuuccuguacgcccaggccagcggcagaaucaccgugagcaccaagagaagccagcagaccgccauccccaacaucggcagcagacccagagugagaaacauccccagcagaaucagcaucuacuggaccaucgugaagcccggcgacauccugcugaucaacagcaccggcaaccugaucgcccccagaggcuacuucaagaucagaagcggcaagagcagcaucaugagaagcgacgcccccaucggcaagugcaacagcgagugcaucacccccaacggcagcauccccaacgacaagcccuuccagaacgugaacagaaucaccuacggcgccugccccagauacgugaagcagaacacccugaagcuggccaccggcaugagaaacgugcccgagaagcagaccagaggcaucuucggcgccaucgccggcuucaucgagaacggcugggagggcaugguggacggcugguacggcuucagacaccagaacagcgagggcagaggccaggccgccgaccugaagagcacccaggccgccaucgaccagaucaacggcaagcugaacagacugaucggcaagaccaacgagaaguuccaccagaucgagaaggaguucagcgagguggagggcagaauccaggaccuggagaaguacguggaggacaccaagaucgaccuguggagcuacaacgccgagcugcugguggcccuggagaaccagcacaccaucgaccugaccgacagcgagaugaacaagcuguucgagaagaccaagaagcagcugagagagaacgccgaggacaugggcaacggcugcuucaagaucuaccacaagugcgacaacgccugcaucggcagcaucagaaacggcaccuacgaccacgacguguacagagacgaggcccugaacaacagauuccagaucaagggcguggagcugaagagcggcuacaaggacuggauccuguggaucagcuucgccaucagcugcuuccugcugugcguggcccugcugggcuucaucaugugggccugccagaagggcaacaucagaugcaacaucugcaucuga

SEQ ID NO: 166645 - RNA, 1701 nt, Artificial Sequence; identical to SEQ ID NO: 162729
  derived and/or modified CDS sequence (opt4) from hemagglutinin__InfluenzaA__ADY38750

SEQ ID NO: 166646 - RNA, 1701 nt, Artificial Sequence; identical to SEQ ID NO: 163893
  derived and/or modified CDS sequence (opt4) from hemagglutinin__InfluenzaA__ADY38760

SEQ ID NO: 166647 - RNA, 1701 nt, Artificial Sequence
  derived and/or modified CDS sequence (opt4) from hemagglutinin__InfluenzaA__ADZ04607
augaaggccauccugguggugcugcuguacaccuucgccaccgccaacgccgacacccugugcaucggcuaccacgccaacaacagcaccgacaccguggacaccgugcuggagaagaacgugaccgugacccacagcgugaaccugcuggaggacaagcacaacggcaagcugugcaagcugagaggcguggccccccugcaccugggcaagugcaacaucgccggcuggauccugggcaaccccgagugcgagagccugagcaccgccagcagcuggagcuacaucguggagaccagcagcagcgacaacggcaccugcuaccccggcgacuucaucgacuacgaggagcugagagagcagcugagcagcgugagcagcuucgagagauucgagaucuuccccaagaccagcagcuggcccaaccacgacagcaacaagggcgugaccgccgccugcccccacgccggcgccaagagcuucuacaagaaccugaucuggcuggugaagaagggcaacagcuaccccaagcugagcaagagcuacaucaacgacaagggcaaggaggugcuggugcuguggggcauccaccaccccagcaccagcgccgaccagcagagccuguaccagaacgccgacgccuacguguucgugggcaccagcagauacagcaagaaguucaagcccgagaucgccaucagacccaaggugagagaccaggagggcagaaugaacuacuacuggacccugguggagcccggcgacaagaucaccuucgaggccaccggcaaccugguggugcccagauacgccuucgccauggagagaaacgccggcagcggcaucaucaucagcgacacccccgugcacgacugcaacaccaccugccagacccccaagggcgccaucaacaccagccugcccuuccagaacauccaccccaucaccaucggcaagugccccaaguacgugaagagcaccaagcugagacuggccaccggccugagaaacgugcccagcauccagagcagaggccuguucggcgccaucgccggcuucaucgagggcggcuggaccggcaugguggacggcugguacggcuaccaccaccagaacgagcagggcagcggcuacgccgccgaccugaagagcacccagaacgccaucgacgagaucaccaacaaggugaacagcgugaucgagaagaugaacacccaguucaccgccgugggcaaggaguucaaccaccuggagaagagaaucgagaaccugaacaagaagguggacgacggcuuccuggacaucuggaccuacaacgccgagcugcuggugcugcuggagaacgagagaacccuggacuaccacgacagcaacgugaagaaccuguacgagaaggugagaagccagcugaagaacaacgccaaggagaucggcaacggcugcuucgaguucuaccacaagugcgacaacaccugcauggagagcgugaagaacggcaccuacgacuaccccaaguacagcgaggaggccaagcugaacagagaggagaucgacggcgugaagcuggagagcaccagaguguaccagauccuggccaucuacagcaccguggccagcagccuggugcugguggugagccugggcgccaucagcuucuggaugugcagcaacggcagccugcagugcagaaucugcaucuga

SEQ ID NO: 166648 - RNA, 1698 nt, Artificial Sequence; identical to SEQ ID NO: 166023
  derived and/or modified CDS sequence (opt4) from hemagglutinin__InfluenzaA__ADZ05834

SEQ ID NO: 166649 - RNA, 1698 nt, Artificial Sequence
  derived and/or modified CDS sequence (opt4) from hemagglutinin__InfluenzaA__ADZ05845
augaaggugaagcugcuggugcugcugugcaccuucaccgccaccuacgccgacaccaucugcaucggcuaccacgccaacaacagcaccgacaccguggacaccgugcuggagaagaacgugaccgugacccacagcgugaaccugcuggaggacagccacaacggcaagcugugccugcugaagggcaucgccccccugcagcugggcaacugcagcguggccggcuggauccugggcaaccccgagugcgagcugcugaucagcaaggagagcuggagcuacaucguggagaagcccaaccccgagaacggcaccugcuaccccggccacuucgccgacuacgaggagcugagagagcagcugagcagcgugagcagcuucgagagauucgagaucuuccccaaggagagcagcuggcccaaccacaccgugaccggcgugagcgccagcugcagccacaacggcgagaacagcuucuacagaaaccugcuguggcugaccggcaagaacggccuguaccccaaccugagcaagagcuacgccaacaacaaggagaaggaggugcuggugcuguggggcgugcaccacccccccaacauggccgaccagaagacccuguaccacaccgagaacgccuacgugagcguggugagcagccacuacagcagaaaguucacccccgagaucgccaagagacccaaggugagagaccaggagggcagaaucaacuacuacuggacccugcuggagcccggcgacaccaucaucuucgaggccaacggcaaccugaucgcccccagauacgccuucgcccugagcagaggcuucggcagcggcaucaucaacagcaacgcccccauggacaagugcgacgccaagugccagaccccccagggcgccaucaacagcagccugcccuuccagaacgugcaccccgugaccaucggcgagugccccaaguacgugagaagcgccaagcugagaauggugaccggccugagaaacauccccagcauccagagcagaggccuguucggcgccaucgccggcuucaucgagggcggcuggaccggcaugguggacggcugguacggcuaccaccaccagaacgagcagggcagcggcuacgccgccgaccagaagagcacccagaacgccaucaacggcaucaccaacaaggugaacagcgugaucgagaagaugaacacccaguucaccgccgugggcaaggaguucaacaagcuggagagaagaauggagaaccugaacaagaagguggacgacggcuucaucgacaucuggaccuacaacgccgagcugcuggugcugcuggagaacgagagaacccuggacuuccacgacagcaacgugaagaaccuguacgagaaggugaagagccagcugaagaacaacgccaaggagaucggcaacggcugcuucgaguucuaccacaagugcaacgacgagugcauggagagcgugaagaacggcaccuacgacuaccccaaguacagcgaggagagcaagcugaacagagagaagaucgacggcgugaagcuggagagcaugggcguguaccagauccuggccaucuacagcaccguggccagcagccuggugcugcuggugagccugggcgccaucagcuucuggaugugcagcaacggcagccugcagugcagaaucugcaucuga

SEQ ID NO: 166650 - RNA, 1701 nt, Artificial Sequence; identical to SEQ ID NO: 162494
  derived and/or modified CDS sequence (opt4) from hemagglutinin__InfluenzaA__ADZ05855

SEQ ID NO: 166651 - RNA, 1701 nt, Artificial Sequence
  derived and/or modified CDS sequence (opt4) from hemagglutinin__InfluenzaA__ADZ47838
augaaggccauccugguggugcugcuguacacccuggccaccgccaacgccgacacccugugcaucggcuaccacgccaacaacagcaccgacaccguggacaccgugcuggagaagaacgugaccgugacccacagcgugaaccugcuggaggacaagcacaacggcaagcugugcaagcugagaggcguggccccccugcaccugggcaagugcaacaucgccggcuggauccugggcaaccccgagugcgagagccugagcaccgccagcagcuggagcuacaucguggagaccagcagcagcgacaacggcaccugcuaccccggcgacuucaucgacuacgaggagcugagagagcagcugagcagcgugagcagcuucgagagauucgagaucuuccccaagaccagcagcuggcccaaccacgacagcaacaagggcgugaccgccgccugcccccacgccggcgccaagagcuucuacaagaaccugaucuggcuggugaagaagggcaacagcuaccccaagcugagcaagagcuacaucaacgacaagggcaaggaggugcuggugcuguggggcauccaccaccccagcaccagcgccgaccagcagagccuguaccagaacgccgacgccuacguguucgugggcaccagcagauacagcaagaaguucaagcccgagaucgccaucagacccaaggugagagagcaggagggcagaaugaacuacuacuggacccugguggagcccggcgacaagaucaccuucgaggccaccggcaaccugguggugcccagauacgccuucgccauggagagaaacgccggcagcggcaucaucaucagcgacacccccgugcacgacugcaacaccaccugccagacccccaagggcgccaucaacaccagccugcccuuccagaacauccacagcaucaccaucggcaagugccccaaguacgugaagagcaccaagcugagacuggccaccggccugagaaacgugcccagcauccagagcagaggccuguucggcgccaucgccggcuucaucgagggcggcuggaccggcaugguggacggcugguacggcuaccaccaccagaacgagcagggcagcggcuacgccgccgaccugaagagcacccagaacgccaucgacgagaucaccaacaaggugaacagcgugaucgagaagaugaacacccaguucaccgccgugggcaaggaguucaaccaccuggagaagagaaucgagaaccugaacaagaagguggacgacggcuuccuggacaucuggaccuacaacgccgagcugcuggugcugcuggagaacgagagaacccuggacuaccacgacagcaacgugaagaaccuguacgagaaggugagaagccagcugaagaacaacgccaaggagaucggcaacggcugcuucgaguucuaccacaagugcgacaacaccugcauggagagcgugaagaacggcaccuacgacuaccccaaguacagcgaggaggccaagcugaacagagaggagaucgacggcgugaagcuggagagcaccagaaucuaccagauccuggccaucuacagcaccguggccagcagcuucgugcugaucgugagccugggcgccaucagcuucuggaugugcagcaacggcagccugcagugcagaaucugcaucuga

SEQ ID NO: 166652 - RNA, 1701 nt, Artificial Sequence; identical to SEQ ID NO: 163901
  derived and/or modified CDS sequence (opt4) from hemagglutinin__InfluenzaA__ADZ47858

SEQ ID NO: 166653 - RNA, 1698 nt, Artificial Sequence
  derived and/or modified CDS sequence (opt4) from hemagglutinin__InfluenzaA__ADZ53100
augaaggugaagcugcuggugcugcugugcaccuucaccgccaccuacgccgacaccaucugcaucggcuaccacgccaacaacagcaccgacaccguggacaccgugcuggagaagaacgugaccgugacccacagcgugaaccugcuggagaacagccacaacggcaagcugugccugcugaagggcaucgccccccugcagcugggcaacugcagcguggccggcuggauccugggcaaccccgagugcgagcugcugaucagcaaggagaccuggagcuacaucguggagaagcccaaccccgagaacggcaccugcuaccccggccacuucgccgacuacgaggagcugagagagcagcugagcagcgugagcagcuucgagagauucgagaucuuccccaaggagagcagcuggcccaaccacaccgugaccggcgugagcgccagcugcagccacaacggcgagagcagcuucuacagaaaccugcuguggcugaccggcaagaacggccuguaccccaaccugagcaagagcuacgccaacaacaaggagaaggaggugcuggugcuguggggcgugcaccacccccccagcaucaacgaccagaagacccuguaccacaccgagaacgccuacgugagcguggugagcagccacuacagcagaaaguucacccccgagaucgccaagagacccaaggugagagaccaggagggcagaaucaacuacuacuggacccugcuggagcccagagacaccaucaucuucgaggccaacggcaaccugaucgcccccagauacgccuucgcccugagcagaggcuucggcagcggcaucaucaacagcaacgcccccauggacaagugcgacgccaagugccagaccccccagggcgccaucaacagcagccugcccuuccagaacgugcaccccgugaccaucggcgagugccccaaguacgugagaagcgccaagcugagaauggugaccggccugagaaacauccccagcauccagagcagaggccuguucggcgccaucgccggcuucaucgagggcggcuggaccggcaugguggacggcugguacggcuaccaccaccagaacgagcagggcagcggcuacgccgccgaccagaagagcacccagaacgccaucaacggcaucaccaacaaggugaacagcgugaucgagaagaugaacacccaguucaccgccgugggcaaggaguucaacaagcuggagagaagaauggagaaccugaacaagaagguggacgacggcuucaucgacaucuggaccuacaacgccgagcugcuggugcugcuggagaacgagagaacccuggacuuccacgacagcaacgugaagaaccuguacgagaaggugaagagccagcugaagaacaacgccaaggagaucggcaacggcugcuucgaguucuaccacaagugcaacgacgagugcauggagagcgugaagaacggcaccuacgacuaccccaaguacagcgaggagagcaagcugaacagagagaagaucgacggcgugaagcuggagagcaugggcguguaccagauccuggccaucuacagcaccguggccagcagccuggugcugcuggugagccugggcgccaucagcuucuggaugugcagcaacggcagccugcagugcagaaucugcaucuga

SEQ ID NO: 166654 - RNA, 1701 nt, Artificial Sequence; identical to SEQ ID NO: 163176
  derived and/or modified CDS sequence (opt4) from hemagglutinin__InfluenzaA__ADZ53123

SEQ ID NO: 166655 - RNA, 1701 nt, Artificial Sequence; identical to SEQ ID NO: 162971
  derived and/or modified CDS sequence (opt4) from hemagglutinin__InfluenzaA__ADZ53125

SEQ ID NO: 166656 - RNA, 1701 nt, Artificial Sequence; identical to SEQ ID NO: 163353
  derived and/or modified CDS sequence (opt4) from hemagglutinin__InfluenzaA__ADZ53127

SEQ ID NO: 166657 - RNA, 1701 nt, Artificial Sequence; identical to SEQ ID NO: 162716
  derived and/or modified CDS sequence (opt4) from hemagglutinin__InfluenzaA__ADZ53131

SEQ ID NO: 166658 - RNA, 1701 nt, Artificial Sequence; identical to SEQ ID NO: 162729
  derived and/or modified CDS sequence (opt4) from hemagglutinin__InfluenzaA__ADZ53133

SEQ ID NO: 166659 - RNA, 1701 nt, Artificial Sequence; identical to SEQ ID NO: 162971
  derived and/or modified CDS sequence (opt4) from hemagglutinin__InfluenzaA__ADZ53135

SEQ ID NO: 166660 - RNA, 1701 nt, Artificial Sequence; identical to SEQ ID NO: 163893
  derived and/or modified CDS sequence (opt4) from hemagglutinin__InfluenzaA__ADZ53138

SEQ ID NO: 166661 - RNA, 1701 nt, Artificial Sequence; identical to SEQ ID NO: 162729
  derived and/or modified CDS sequence (opt4) from hemagglutinin__InfluenzaA__ADZ53140

SEQ ID NO: 166662 - RNA, 1701 nt, Artificial Sequence; identical to SEQ ID NO: 163176
  derived and/or modified CDS sequence (opt4) from hemagglutinin__InfluenzaA__ADZ93496

SEQ ID NO: 166663 - RNA, 1689 nt, Artificial Sequence; identical to SEQ ID NO: 162410
  derived and/or modified CDS sequence (opt4) from hemagglutinin__InfluenzaA__AEA04365

SEQ ID NO: 166664 - RNA, 1689 nt, Artificial Sequence
  derived and/or modified CDS sequence (opt4) from hemagglutinin__InfluenzaA__AEA04376
auggccaucaucuaccugauccugcuguucaccgccgugagaggcgaccagaucugcaucggcuaccacgccaacaacagcaccgagaagguggacaccauccuggagagaaacgugaccgugacccacgccaaggacauccuggagaagacccacaacggcaagcugugcaagcugaacggcauccccccccuggagcugggcgacugcagcaucgccggcuggcugcugggcaaccccgagugcgacagacugcugagcgugcccgaguggagcuacaucauggagaaggagaaccccagagacggccugugcuaccccggcagcuucaacgacuacgaggagcugaagcaccugcugagcagcgugaagcacuucgagaaggugaagauccugcccaaggacagauggacccagcacaccaccaccggcggcagcagagccugcgccgugagcggcaaccccagcuucuucagaaacaugguguggcugaccgagaagggcagcaacuaccccguggccaagggcagcuacaacaacaccagcggcgagcagaugcugaucaucuggggcgugcaccaccccaacgacgagaccgagcagagaacccuguaccagaacgugggcaccuacgugagcgugggcaccagcacccugaacaagagaagcacccccgagaucgccaccagacccaaggugaacggccagggcggcagaauggaguucagcuggacccugcuggacaugugggacaccaucaacuucgagagcaccggcaaccugaucgcccccgaguacggcuucaagaucagcaagagaggcagcagcggcaucaugaagaccgagggcacccuggagaacugcgagaccaagugccagaccccccugggcgccaucaacaccacccugcccuuccacaacgugcacccccugaccaucggcgagugccccaaguacgugaagagcgagaagcuggugcuggccaccggccugagaaacgugccccagaucgagagcagaggccuguucggcgccaucgccggcuucaucgagggcggcuggcagggcaugguggacggcugguacggcuaccaccacagcaacgaccagggcagcggcuacgccgccgacaaggagagcacccagaaggccuucgacggcaucaccaacaaggugaacagcgugaucgagaagaugaacacccaguucgaggccgugggcaaggaguucagcaaccuggagagaagacuggagaaccugaacaagaagguggaggacggcuuccuggacguguggaccuacaacgccgagcugcuggugcugauggagaacgagagaacccuggacuuccacgacagcaacgugaagaaccuguacgacaaggugagaaugcagcugagagacaacgugaaggagcugggcaacggcugcuucgaguucuaccacaagugcgacgacgagugcaugaacagcgugaagaacggcaccuacgacuaccccaaguacgaggaggagagcaagcugaacagaaacgagaucaagggcgugaagcugagcagcaugggcguguaccagauccuggccaucuacgccaccguggccggcagccugagccuggccaucaugauggccggcaucagcuucuggaugugcagcaacggcagccugcagugcagaaucugcaucuga

SEQ ID NO: 166665 - RNA, 1698 nt, Artificial Sequence
  derived and/or modified CDS sequence (opt4) from hemagglutinin__InfluenzaA__AEA10292
augaaggugaagcugcuggugcugcugugcaccuucaccgccaccuacgccgacaccaucugcaucggcuaccacgccaacaacagcaccgacaccguggacaccgugcuggagaagaacgugaccgugacccacagcgugaaccugcuggagaacagccacaacggcaagcugugcagccugaagggcaucgccccccugcagcugggcaacugcagcguggccggcuggauccugggcaaccccgagugcgagcugcugaucagcaaggagagcuggagcuacaucguggagaagcccaaccccgagaacggcaccugcuaccccggccacuucgccgacuacgaggagcugagagagcagcugagcagcgugagcagcuucgagagauucgagaucuuccccaaggagagcagcuggcccaaccacaccgugaccggcgugagcgccagcugcagccacaacggcgagagcagcuucuacagaaaccugcuguggcugaccgugaagaacggccuguaccccaaccugagcaagagcuacgccaacaacaaggagaaggaggugcuggugcuguggggcgugcaccacccccccaacaucguggaccagaagacccuguacagaaccgagaacgccuacgugagcguggugagcagccacuacagcagaaaguucacccccgagaucgccaagagacccaaggugagagaccaggagggcagaaucaacuacuacuggacccugcuggagcccggcgacaccaucaucuucgaggccaacggcaaccugaucgcccccagauacgccuucgcccugagcagaggcuucggcagcggcaucaucaacagcaacgcccccauggacaagugcgacgccaagugccagacccccagaggcgccaucaacagcagccugcccuuccagaacgugcaccccgugaccaucggcgagugccccaaguacgugagaagcgccaagcugagaauggugaccggccugagaaacauccccagcauccagagcagaggccuguucggcgccaucgccggcuucaucgagggcggcuggaccggcaugguggacggcugguacggcuaccaccaccagaacgagcagggcagcggcuacgccgccgaccagaagagcacccagaacgccaucaacggcaucaccaacaaggugaacagcgugaucgagaagaugaacacccaguucaccgccgugggcaaggaguucaacaagcuggagagaagaauggagaaccugaacaagaagguggacgacggcuucaucgacaucuggaccuacaacgccgagcugcuggugcugcuggagaacgagagaacccuggacuuccacgacagcaacgugaagaaccuguacgagaaggugaagagccagcugaagaacaacgccaaggagaucggcaacggcugcuucgaguucuaccacaagugcaacgacgagugcauggagagcgugaagaacggcaccuacgacuaccccaaguacagcgaggagagcaagcugaacagagagaagaucgacggcgugaagcuggagagcaugggcguguaccagauccuggccaucuacagcaccguggccagcagccuggugcugcuggugagccugggcgccaucagcuucuggaugugcagcaacggcagccugcagugcagaaucugcaucuga

SEQ ID NO: 166666 - RNA, 1701 nt, Artificial Sequence; identical to SEQ ID NO: 165328
  derived and/or modified CDS sequence (opt4) from hemagglutinin__InfluenzaA__AEA10303

SEQ ID NO: 166667 - RNA, 1701 nt, Artificial Sequence; identical to SEQ ID NO: 166182
  derived and/or modified CDS sequence (opt4) from hemagglutinin__InfluenzaA__AEA10313

SEQ ID NO: 166668 - RNA, 1701 nt, Artificial Sequence; identical to SEQ ID NO: 163893
  derived and/or modified CDS sequence (opt4) from hemagglutinin__InfluenzaA__AEA10323

SEQ ID NO: 166669 - RNA, 1701 nt, Artificial Sequence; identical to SEQ ID NO: 164281
  derived and/or modified CDS sequence (opt4) from hemagglutinin__InfluenzaA__AEA10339

SEQ ID NO: 166670 - RNA, 1701 nt, Artificial Sequence
  derived and/or modified CDS sequence (opt4) from hemagglutinin__InfluenzaA__AEA10349
augaaggccauccugaucgugcugcuguacaccuucgccaccgccaacgccgacacccugugcaucggcuaccacgccaacaacagcaccgacaccguggacaccgugcuggagaagaacgugaccgugacccacagcgugaaccugcuggaggacaagcacaacggcaagcugugcaagcugagaggcguggccccccugcaccugggcaagugcaacaucgccggcuggauccugggcaaccccgagugcgagagccugagcaccgccagcagcuggagcuacaucguggagaccagcagcagcgacaacggcaccugcuaccccggcgacuucaucgacuacgaggagcugagagagcagcugagcagcgugagcagcuucgagagauucgagaucuuccccaagaccagcagcuggcccaaccacgacagcaacaagggcgugaccgccgccugcccccacgccggcgccaagagcuucuacaagaaccugaucuggcuggugaagaagggcaacagcuaccccaagcugagcaagagcuacaucaacgacaagggcaaggaggugcuggugcuguggggcauccaccaccccagcaccagcgccgaccagcagagccuguaccagaacgccgacgccuacguguucgugggcaccagcagauacagcaagaaguucaagcccgagaucgccaucagacccaaggugagagaccaggagggcagaaugaacuacuacuggacccugguggagcccggcgacaagaucaccuucgaggccaccggcaaccugguggugcccagauacgccuucgccauggagagaaacgccggcagcggcaucaucaucagcgacacccccgugcacgacugcaacaccaccugccagacccccaagggcgccaucaacaccagccugcccuuccagaacauccaccccaucaccaucggcaagugccccaaguacgugaagagcaccaagcugagacuggccaccggccugagaaacgugcccagcauccagagcagaggccuguucggcgccaucgccggcuucaucgagggcggcuggaccggcaugguggacggcugguacggcuaccaccaccagaacgagcagggcagcggcuacgccgccgaccugaagagcacccagaacgccaucgacaagaucaccaacaaggugaacagcgugaucgagaagaugaacacccaguucaccgccgugggcaaggaguucaaccaccuggagaagagaaucgagaaccugaacaagaagguggacgacggcuuccuggacaucuggaccuacaacgccgagcugcuggugcugcuggagaacgagagaacccuggacuaccacgacagcaacgugaagaaccuguacgagaaggugagaagccagcugaagaacaacgccaaggagaucggcaacggcugcuucgaguucuaccacaagugcgacaacaccugcauggagagcgugaagaacggcaccuacgacuaccccaaguacagcgaggaggccaagcugaacagagaggagaucgacggcgugaagcuggagagcaccagaaucuaccagauccuggccaucuacagcaccguggccagcagccuggugcugguggugagccugggcgccaucagcuucuggaugugcagcaacggcagccugcagugcagaaucugcaucuga

SEQ ID NO: 166671 - RNA, 1701 nt, Artificial Sequence; identical to SEQ ID NO: 164326
  derived and/or modified CDS sequence (opt4) from hemagglutinin__InfluenzaA__AEA30293

SEQ ID NO: 166672 - RNA, 1701 nt, Artificial Sequence
  derived and/or modified CDS sequence (opt4) from hemagglutinin__InfluenzaA__AEA48989
augaaggccauccugguggugcugcuguacaccuucgccaccgccaacgccgacacccugugcaucggcuaccacgccaacaacagcaccgacaccguggacaccgugcuggagaagaacgugaccgugacccacagcgugaaccugcuggaggacaagcacaacggcaagcugugcaagcugagaggcguggccccccugcaccugggcaagugcaacaucgccggcuggauccugggcaaccccgagugcgagagccugagcaccgccagcagcuggagcuacaucguggagaccagcagcagcgacaacggcaccugcuaccccggcgacuucaucgacuacgaggagcugagagagcagcugagcagcgugagcagcuucgagagauucgagaucuuccccaagaccagcagcuggcccaaccacgagagcaacaagggcgugaccgccgccugcccccacgccggcgccagaagcuucuacaagaaccugaucuggcuggugaagaagggcaacagcuaccccaagcugagcaagagcuacaucaacgacaagggcaaggaggugcuggugcuguggggcauccaccaccccagcaccagcgccgaccagcagagccuguaccagaacgccgacgccuacguguucgugggcaccagcagauacagcaagaaguucaagcccgagaucgccaucagacccaaggugagagaccaggagggcagaaugaacuacuacuggacccugguggagcccggcgacaagaucaccuucgaggccaccggcaaccugguggugcccagauacgccuucgccauggagagaaacgccggcagcggcaucaucaucagcgacacccccgugcacgacugcaacaccaccugccagacccccaagggcgccaucaacaccagccugcccuuccagaacauccaccccaucaccaucggcaagugccccaaguacgugaagagcaccaagcugagacuggccaccggccugagaaacgugcccagcauccagagcagaggccuguucggcgccaucgccggcuucaucgagggcggcuggaccggcaugguggacggcugguacggcuaccaccaccagaacgagcagggcagcggcuacgccgccgaccugaagagcacccagaacgccaucgacgagaucaccaacaaggugaacagcgugaucgagaagaugaacacccaguucaccgccgugggcaaggaguucaaccaccuggagaagagaaucgagaaccugaacaagaagguggacgacggcuuccuggacaucuggaccuacaacgccgagcugcuggugcugcuggagaacgagagaacccuggacuaccacgacagcaacgugaagaaccuguacgagaaggugagaagccagcugaagaacaacgccaaggagaucggcaacggcugcuucgaguucuaccacaagugcgacaacaccugcauggagagcgugaagaacggcaccuacgacuaccccaaguacagcgaggaggccaagcugaacagagaggagaucgacggcgugaagcuggagagcaccagaaucuaccagauccuggccaucuacagcaccguggccagcagccuggugcugguggugagccugggcgccaucagcuucuggaugugcagcaacggcagccugcagugcagaaucugcaucuga

SEQ ID NO: 166673 - RNA, 1707 nt, Artificial Sequence
  derived and/or modified CDS sequence (opt4) from hemagglutinin__InfluenzaA__AEA50985
auggagaagaucgugcugcugcuggccaucaucaaccuggugaagagcgaccagaucugcaucggcuaccacgccaacaacagcaccgagcagguggacaccaucauggagaagaacgugaccgugacccacgcccaggacauccuggagaagacccacaacggcaagcugugcgaccuggacggcgugaagccccugauccugagagacugcagcguggccggcuggcugcugggcaaccccaugugcgacgaguuccugaacgugcccgaguggagcuacaucguggagaagaucaaccccgccaacgaccugugcuaccccggcaacuucaacgacuacgaggagcugaagcaccugcugagcagaaucaaccacuucgagaagauccagaucauccccaagagcagcuggagcgaccacgaggccagcagcggcgugagcagcgccugccccuaccagggcagaagcagcuucuucagaaacgugguguggcugaucaagaagaacgacgccuaccccaccaucaagaucagcuacaacaacaccaaccaggaggaccugcuggugcuguggggcauccaccaccccaacgacgccgccgagcagaccaagcuguaccagaaccccaccaccuacaucagcgugggcaccagcacccugaaccugagacuggugcccaagaucgccaccagaagcaaggugaacggccagagcggcagaauggaguucuucuggaccauccugaagcccaacgacgccaucaacuucgagagcaacggcaacuucaucgcccccgagaacgccuacaagaucgugaagaagggcgacagcaccaucaugaagagcgagcuggaguacggcaacugcaacaccaagugccagacccccgugggcgccaucaacagcagcaugcccuuccacaacauccacccccugaccaucggcgagugccccaaguacgugaagagcaacagacuggugcuggccaccggccugagaaacagcccccagggcgagagaagaagaaagaagagaggccuguucggcgccaucgccggcuucaucgagggcggcuggcagggcaugguggacggcugguacggcuaccaccacagcaacgagcagggcagcggcuacgccgccgacaaggagagcacccagaaggccaucaacggcgugaccaacaaggugaacagcaucaucgacaagaugaacacccaguucgaggccgugggcagagaguucaacaaccuggagagaagaaucgagaaccugaacaagaagauggaggacggcuuccuggacguguggaccuacaacgccgagcugcuggugcugauggagaacgagagaacccuggacuuccacgacagcaacgugaagaaccuguacgacaaggugagacugcagcugagagacaacgccaaggagcugggcaacggcugcuucgaguucuaccacagaugcgacaacgagugcauggagagcgugagaaacggcaccuacgacuacccccaguacagcgaggagagcagacugaagagagaggagaucagcggcgugaagcuggagagcaucggcaucuaccagauccugagcaucuacagcaccgccgccagcagccuggcccuggccaucaugguggccggccugagccuguggaugugcagcaacggcagccugcagugcagaaucugcaucuga

SEQ ID NO: 166674 - RNA, 1701 nt, Artificial Sequence; identical to SEQ ID NO: 165593
  derived and/or modified CDS sequence (opt4) from hemagglutinin__InfluenzaA__AEA72704

SEQ ID NO: 166675 - RNA, 1701 nt, Artificial Sequence; identical to SEQ ID NO: 165593
  derived and/or modified CDS sequence (opt4) from hemagglutinin__InfluenzaA__AEA72715

SEQ ID NO: 166676 - RNA, 1701 nt, Artificial Sequence; identical to SEQ ID NO: 165593
  derived and/or modified CDS sequence (opt4) from hemagglutinin__InfluenzaA__AEA72726

SEQ ID NO: 166677 - RNA, 1701 nt, Artificial Sequence
  derived and/or modified CDS sequence (opt4) from hemagglutinin__InfluenzaA__AEA72740
augaaggccauccugguggugcugcuguacaccuucgccaccgccaacgccgacacccugugcaucggcuaccacgccaacaacagcaccgacaccguggacaccgugcuggagaagaacgugaccgugacccacagcgugaaccugcuggaggacaagcacaacggcaagcugugcaagcugagaggcguggccccccugcaccugggcaagugcaacaucgccggcuggauccugggcaaccccgagugcgagagccugagcaccgccagcagcuggagcuacaucguggagaccagcagcagcgacaacggcaccugcuaccccggcgacuucaucgacuacgaggagcugagagagcagcugagcagcgugagcagcuucgagagauucgagaucuuccccaagaccagcagcuggcccaaccacgacagcaacaagggcgugaccgccgccugcccccacgccggcgccaagagcuucuacaagaaccugaucuggcuggugaagaagggcaacagcuaccccaagcugagcaagagcuacaucaacgacaagggcaaggaggugcuggugcuguggggcauccaccaccccagcaccagcgccgaccagcagagccuguaccagaacgccgacgccuacguguucgugggcaccagcagauacagcaagaaguucaagcccgagaucgccaccagacccaaggugagagaccaggagggcagaaugaacuacuacuggacccugguggagcccggcgacaagaucaccuucgaggccaccggcaaccugguggugcccagauacgccuucgccauggagagaaacgccggcagcggcaucaucaucagcgacacccccgugcacgacugcaacaccaccugccagacccccaagggcgccaucaacaccagccugcccuuccagaacauccaccccaucaccaucggcaagugccccaaguacgugaagagcaccaagcugagacuggccaccggccugagaaacgugcccagcauccagagcagaggccuguucggcgccaucgccggcuucaucgagggcggcuggaccggcaugguggacggcugguacggcuaccaccaccagaacgagcagggcagcggcuacgccgccgaccugaagagcacccagaacgccaucgacgagaucaccaacaaggugaacagcgugaucgagaagaugaacacccaguucaccgccgugggcaaggaguucaaccaccuggagaagagaaucgagaaccugaacaagaagguggacgacggcuuccuggacaucuggaccuacaacgccgagcugcuggugcugcuggagaacgagagaacccuggacuaccacgacagcaacgugaagaaccuguacgagaaggugagaaaccagcugaagaacaacgccaaggagaucggcaacggcugcuucgaguucuaccacaagugcgacaacaccugcauggagagcgugaagaacggcaccuacgacuaccccaaguacagcgaggaggccaagcugaacagagaggagaucgacggcgugaagcuggagagcaccagaaucuaccagauccuggccaucuacagcaccguggccagcagccuggugcugguggugagccugggcgccaucagcuucuggaugugcagcaacggcagccugcagugcagaaucugcaucuga

SEQ ID NO: 166678 - RNA, 1701 nt, Artificial Sequence
  derived and/or modified CDS sequence (opt4) from hemagglutinin__InfluenzaA__AEA72750
augaaggccauccugguggugcugcuguacaccuucgccaccgccaacgccgacacccugugcaucggcuaccacgccaacaacagcaccgacaccguggacaccgugcuggagaagaacgugaccgugacccacagcgugaaccugcuggaggacaagcacaacggcaagcugugcaagcugagaggcguggccccccugcaccugggcaagugcaacaucgccggcuggauccugggcaaccccgagugcgagagccugagcaccgccagcagcuggagcuacaucguggagaccagcagcagcgacaacggcaccugcuaccccggcguguucaucgacuacgaggagcugagagagcagcugagcagcgugagcagcuucgagagauucgagaucuuccccaagaccagcagcuggcccaaccacgacagcaacaagggcgugaccgccgccugcccccacgccggcgccaagagcuucuacaagaaccugaucuggcuggugaagaagggcaacagcuaccccaagcugagcaagagcuacaucaacgacaagggcaaggaggugcuggugcuguggggcauccaccaccccagcaccaccgccgaccagcagagccuguaccagaacgccgacaccuacguguucgugggcaccagcagauacagcaagaaguucaagcccgagaucgccaucagacccaaggugagagaccaggagggcagaaugaacuacuacuggacccugguggagcccggcgacaagaucaccuucgaggccaccggcaaccugguggugcccagauacgccuucgccauggagagaaacgccggcagcggcaucaucaucagcgacacccccgugcacgacugcaacaccaccugccagacccccaagggcgccaucaacaccagccugcccuuccagaacauccaccccaucaccaucggcaagugccccaaguacgugaagagcaccaagcugagacuggccaccggccugagaaacgugcccagcauccagagcagaggccuguucggcgccaucgccggcuucaucgagggcggcuggaccggcaugguggacggcugguacggcuaccaccaccagaacgagcagggcagcggcuacgccgccgaccugaagagcacccagaacgccaucgacaagaucaccaacaaggugaacagcgugaucgagaagaugaacacccaguucaccgccgugggcaaggaguucaaccaccuggagaagagaaucgagaaccugaacaagaagguggacgacggcuuccuggacaucuggaccuacaacgccgagcugcuggugcugcuggagaacgagagaacccuggacuaccacgacagcaacgugaagaaccuguacgagaaggugagaaaccagcugaagaacaacgccaaggagaucggcaacggcugcuucgaguucuaccacaagugcgacaacaccugcauggagagcgugaagaacggcaccuacgacuaccccaaguacagcgaggaggccaagcugaacagagaggagaucgacggcgugaagcuggagagcaccagaaucuaccagauccuggccaucuacagcaccguggccagcagccuggugcugguggugagccugggcgccaucagcuucuggaugugcagcaacggcagccugcagugcagaaucugcaucuga

SEQ ID NO: 166679 - RNA, 1701 nt, Artificial Sequence; identical to SEQ ID NO: 166495
  derived and/or modified CDS sequence (opt4) from hemagglutinin__InfluenzaA__AEA72759

SEQ ID NO: 166680 - RNA, 1701 nt, Artificial Sequence
  derived and/or modified CDS sequence (opt4) from hemagglutinin__InfluenzaA__AEA72777
augaaggccauccugguggugcugcuguacacccuggccaccgccaacgccgacacccugugcaucggcuaccacgccaacaacagcaccgacaccguggacaccgugcuggagaagaacgugaccgugacccacagcgugaaccugcuggaggacaagcacgacggcaagcugugcaagcugagaggcguggccccccugcaccugggcaagugcaacaucgccggcuggauccugggcaaccccgagugcgagagccugagcaccgccagcagcuggagcuacaucguggagaccagcagcagcgacaacggcaccugcuaccccggcgacuucaucgacuacgaggagcugagagagcagcugagcagcgugagcagcuucgagagauucgagaucuuccccaagaccagcagcuggcccaaccacgacagcaacaagggcgugaccgccgccugcccccacgccggcgccaagagcuucuacaagaaccugaucuggcuggugaagaagggcaacagcuaccccaagcugagcaagagcuacaucaacgacaagggcaaggagauccuggugcuguggggcauccaccaccccagcaccagcgccgaccagcagagccuguaccagaacgccgacgccuacguguucgugggcaccagcagauacagcaagaaguucaagcccgagaucgccaucagacccaaggugagagaccaggagggcagaaugaacuacuacuggacccugguggagcccggcgacaagaucaccuucgaggccaccggcaaccugguggugcccagauacgccuucgccauggagagaaacgccggcagcggcaucaucaucagcgacacccccgugcacgacugcaacgccaccugccagacccccaagggcgccaucaacaccagccugcccuuccagaacauccaccccaucaccaucggcaagugccccaaguacgugaagagcaccaagcugagacuggccaccggccugagaaacgugcccagcauccagagcagaggccuguucggcgccaucgccggcuucaucgagggcggcuggaccggcaugguggacggcugguacggcuaccaccaccagaacgagcagggcagcggcuacgccgccgaccugaagagcacccagaacgccaucgacaagaucaccaacaaggugaacagcgugaucgagaagaugaacacccaguucaccgccgugggcaaggaguucaaccaccuggagaagagaaucgagaaccugaacaagaagguggacgacggcuuccuggacaucuggaccuacaacgccgagcugcuggugcugcuggagaacgagagaacccuggacuaccacgacagcaacgugaagaaccuguacgagaaggugagaagccagcugaagaacaacgccaaggagaucggcaacggcugcuucgaguucuaccacaagugcgacaacaccugcauggagagcgugaagaacggcaccuacgacuaccccaaguacagcgaggaggccaagcugaacagagaggagaucgacggcgugaagcuggagagcaccagaaucuaccagauccuggccaucuacagcaccguggccagcagccuggugcugguggugagccugggcgccaucagcuucuggaugugcagcaacggcagccugcagugcagaaucugcaucuga

SEQ ID NO: 166681 - RNA, 1701 nt, Artificial Sequence; identical to SEQ ID NO: 166495
  derived and/or modified CDS sequence (opt4) from hemagglutinin__InfluenzaA__AEA72787

SEQ ID NO: 166682 - RNA, 1701 nt, Artificial Sequence; identical to SEQ ID NO: 165593
  derived and/or modified CDS sequence (opt4) from hemagglutinin__InfluenzaA__AEA73288

SEQ ID NO: 166683 - RNA, 1701 nt, Artificial Sequence; identical to SEQ ID NO: 165593
  derived and/or modified CDS sequence (opt4) from hemagglutinin__InfluenzaA__AEA73299

SEQ ID NO: 166684 - RNA, 1701 nt, Artificial Sequence; identical to SEQ ID NO: 165593
  derived and/or modified CDS sequence (opt4) from hemagglutinin__InfluenzaA__AEA73310

SEQ ID NO: 166685 - RNA, 1701 nt, Artificial Sequence
  derived and/or modified CDS sequence (opt4) from hemagglutinin__InfluenzaA__AEA73321
augaagaccaucaucgcccugagcuacauccugugccugguguucgcccagaagcugcccggcaacgacaacagcaccgccacccugugccugggccaccacgccgugcccaacggcaccaucgugaagaccaucaccaacgaccagaucgaggugaccaacgccaccgagcuggugcagagcagcagcaccggcgagaucugcgacagcccccaccagauccuggacggcgagaacugcacccugaucgacgcccugcugggcgacccccagugcgacggcuuccagaacaagaagugggaccuguucguggagagaagcaaggccuacagcaacugcuaccccuacgacgugcccgacuacgccagccugagaagccugguggccagcagcggcacccuggaguucaacaacgagagcuucaacuggaccggcgugacccagaacggcaccagcagcgccugcaucagaagaagcaacaacagcuucuucagcagacugaacuggcugacccaccugaacuucaaguaccccgcccugaacgugaccaugcccaacaacgagcaguucgacaagcuguacaucuggggcgugcaccaccccggcaccgacaaggaccagaucuuccuguacgcccaggccagcggcagaaucaccgugagcaccaagagaagccagcaggccgugauccccaacaucggcagcagacccagagugagaaacauccccagcagaaucagcaucuacuggaccaucgugaagcccggcgacauccugcugaucaacagcaccggcaaccugaucgcccccagaggcuacuucaagaucagaagcggcaagagcagcaucaugagaagcgacgcccccaucggcaagugcaacagcgagugcaucacccccaacggcagcauccccaacgacaagcccuuccagaacgugaacagaaucaccuacggcgccugccccagauacgugaagcagagcacccugaagcuggccaccggcaugagaaacgugcccgagaagcagaccagaggcaucuucggcgccaucgccggcuucaucgagaacggcugggagggcaugguggacggcugguacggcuucagacaccagaacagcgagggcagaggccaggccgccgaccugaagagcacccaggccgccaucgaccagaucaacggcaagcugaacagacugaucggcaagaccaacgagaaguuccaccagaucgagaaggaguucagcgagguggagggcagaauccaggaccuggagaaguacguggaggacaccaagaucgaccuguggagcuacaacgccgagcugcuggugacccuggagaaccagcacaccaucgaccugaccgacagcgagaugaacaagcuguucgagaagaccaagaagcagcugagagagaacgccgaggacaugggcaacggcugcuucaccaucuaccacaagugcgacaacgccugcaucggcagcaucagaaacggcaccuacgaccacaacguguacagagacgaggcccugaacaacagauuccagaucaagggcguggagcugaagagcggcuacaaggacuggauccuguggaucagcuucgccaucagcugcuuccugcugugcguggcccugcugggcuucaucaugugggccugccagaagggcaacaucagaugcaacaucugcaucuga

SEQ ID NO: 166686 - RNA, 1701 nt, Artificial Sequence; identical to SEQ ID NO: 165593
  derived and/or modified CDS sequence (opt4) from hemagglutinin__InfluenzaA__AEA73332

SEQ ID NO: 166687 - RNA, 1701 nt, Artificial Sequence; identical to SEQ ID NO: 165593
  derived and/or modified CDS sequence (opt4) from hemagglutinin__InfluenzaA__AEA73343

SEQ ID NO: 166688 - RNA, 1701 nt, Artificial Sequence; identical to SEQ ID NO: 165593
  derived and/or modified CDS sequence (opt4) from hemagglutinin__InfluenzaA__AEA73354

SEQ ID NO: 166689 - RNA, 1701 nt, Artificial Sequence
  derived and/or modified CDS sequence (opt4) from hemagglutinin__InfluenzaA__AEA73365
augaagaccaucaucgcccugagcuacacccugugccugguguucgcccagaagcugcccggcaacgacaacagcaccgccacccugugccugggccaccacgccgugcccaacggcaccaucgugaagaccaucaccaacgaccagaucgaggugaccaacgccaccgagcuggugcagagcagcagcaccggcgagaucugcgacagcccccaccagauccuggacggcgagaacugcacccugaucgacgcccugcugggcgacccccagugcgacggcuuccagaacaagaagugggaccuguucguggagagaagcaaggccuacagcaacugcuaccccuacgacgugcccgacuacgccagccugagaagccugguggccagcagcggcacccuggaguucaacaacgagagcuucaacuggaccggcgugacccagaacggcaccagcagcgccugcaucagaagaagcaacaacagcuucuucagcagacugaacuggcugacccaccugaacuucaaguaccccgcccugaacgugaccaugcccaacaacgagcaguucgacaagcuguacaucuggggcgugcaccaccccggcaccgacaaggaccagaucuuccuguacgcccaggccagcggcagaaucaccgugagcaccaagagaagccagcaggccgugauccccaacaucggcagcagacccagagugagaaacauccccagcagaaucagcaucuacuggaccaucgugaagcccggcgacauccugcugaucaacagcaccggcaaccugaucgcccccagaggcuacuucaagaucagaagcggcaagagcagcaucaugagaagcgacgcccccaucggcaagugcaacagcgagugcaucacccccaacggcagcauccccaacgacaagcccuuccagaacgugaacagaaucaccuacggcgccugccccagauacgugaagcagagcacccugaagcuggccaccggcaugagaaacgugcccgagaagcagaccagaggcaucuucggcgccaucgccggcuucaucgagaacggcugggagggcaugguggacggcugguacggcuucagacaccagaacagcgagggcagaggccaggccgccgaccugaagagcacccaggccgccaucgaccagaucaacggcaagcugaacagacugaucggcaagaccaacgagaaguuccaccagaucgagaaggaguucagcgagguggagggcagaauccaggaccuggagaaguacguggaggacaccaagaucgaccuguggagcuacaacgccgagcugcugguggcccuggagaaccagcacaccaucgaccugaccgacagcgagaugaacaagcuguucgagaagaccaagaagcagcugagagagaacgccgaggacaugggcaacggcugcuucaccaucuaccacaagugcgacaacgccugcaucggcagcaucagaaacggcaccuacgaccacaacguguacagagacgaggcccugaacaacagauuccagaucaagggcguggagcugaagagcggcuacaaggacuggauccuguggaucagcuucgccaucagcugcuuccugcugugcguggcccugcugggcuucaucaugugggccugccagaagggcaacaucagaugcaacaucugcaucuga

SEQ ID NO: 166690 - RNA, 1701 nt, Artificial Sequence; identical to SEQ ID NO: 165593
  derived and/or modified CDS sequence (opt4) from hemagglutinin__InfluenzaA__AEA73376

SEQ ID NO: 166691 - RNA, 1701 nt, Artificial Sequence; identical to SEQ ID NO: 165593
  derived and/or modified CDS sequence (opt4) from hemagglutinin__InfluenzaA__AEA73387

SEQ ID NO: 166692 - RNA, 1701 nt, Artificial Sequence; identical to SEQ ID NO: 165593
  derived and/or modified CDS sequence (opt4) from hemagglutinin__InfluenzaA__AEA73398

SEQ ID NO: 166693 - RNA, 1701 nt, Artificial Sequence; identical to SEQ ID NO: 165593
  derived and/or modified CDS sequence (opt4) from hemagglutinin__InfluenzaA__AEA73409

SEQ ID NO: 166694 - RNA, 1701 nt, Artificial Sequence; identical to SEQ ID NO: 165593
  derived and/or modified CDS sequence (opt4) from hemagglutinin__InfluenzaA__AEA73420

SEQ ID NO: 166695 - RNA, 1701 nt, Artificial Sequence; identical to SEQ ID NO: 165593
  derived and/or modified CDS sequence (opt4) from hemagglutinin__InfluenzaA__AEA73452

SEQ ID NO: 166696 - RNA, 1701 nt, Artificial Sequence; identical to SEQ ID NO: 165593
  derived and/or modified CDS sequence (opt4) from hemagglutinin__InfluenzaA__AEA73463

SEQ ID NO: 166697 - RNA, 1701 nt, Artificial Sequence; identical to SEQ ID NO: 165593
  derived and/or modified CDS sequence (opt4) from hemagglutinin__InfluenzaA__AEA73474

SEQ ID NO: 166698 - RNA, 1701 nt, Artificial Sequence
  derived and/or modified CDS sequence (opt4) from hemagglutinin__InfluenzaA__AEA73485
augaagaccaucaucgcccugagcuacauccugugccugguguucgcccagaagcugcccggcaacgacaacagcaccgccacccugugccugggccaccacgccgugcccaacggcaccaucgugaagaccaucaccaacgaccagaucgaggugaccaacgccaccgagcuggugcagagcagcagcaccggcgagaucugcgacagcccccaccagauccuggacggcgagaacugcacccugaucgacgcccugcugggcgacccccagugcgacggcuuccagaacaagaagugggaccuguucguggagagaagcaaggcccacagcaacugcuaccccuacgacgugcccgacuacgccagccugagaagccugguggccagcagcggcacccuggaguucaacaacgagagcuucaacuggaccggcgugacccagaacggcaccagcagcgccugcaucagaagaagcaacaacagcuucuucagcagacugaacuggcugacccaccugaacuucaaguaccccgcccugaacgugaccaugcccaacaacgagcaguucgacaagcuguacaucuggggcgugcaccaccccggcaccgacaaggaccagaucuuccuguacgcccaggccagcggcagaaucaccgugagcaccaagagaagccagcaggccgugauccccaacaucggcagcagacccagagugagaaacauccccagcagaaucagcaucuacuggaccaucgugaagcccggcgacauccugcugaucaacagcaccggcaaccugaucgcccccagaggcuacuucaagaucagaagcggcaagagcagcaucaugagaagcgacgcccccaucggcaagugcaacagcgagugcaucacccccaacggcagcauccccaacgacaagcccuuccagaacgugaacagaaucaccuacggcgccugccccagauacgugaagcagagcacccugaagcuggccaccggcaugagaaacgugcccgagaagcagaccagaggcaucuucggcgccaucgccggcuucaucgagaacggcugggagggcaugguggacggcugguacggcuucagacaccagaacagcgagggcagaggccaggccgccgaccugaagagcacccaggccgccaucgaccagaucaacggcaagcugaacagacugaucggcaagaccaacgagaaguuccaccagaucgagaaggaguucagcgagguggagggcagaauccaggaccuggagaaguacguggaggacaccaagaucgaccuguggagcuacaacgccgagcugcugguggcccuggagaaccagcacaccaucgaccugaccgacagcgagaugaacaagcuguucgagaagaccaagaagcagcugagagagaacgccgaggacaugggcaacggcugcuucaccaucuaccacaagugcgacaacgccugcaucggcagcaucagaaacggcaccuacgaccacaacguguacagagacgaggcccugaacaacagauuccagaucaagggcguggagcugaagagcggcuacaaggacuggauccuguggaucagcuucgccaucagcugcuuccugcugugcguggcccugcugggcuucaucaugugggccugccagaagggcaacaucagaugcaacaucugcaucuga

SEQ ID NO: 166699 - RNA, 1701 nt, Artificial Sequence; identical to SEQ ID NO: 165593
  derived and/or modified CDS sequence (opt4) from hemagglutinin__InfluenzaA__AEA73496

SEQ ID NO: 166700 - RNA, 1701 nt, Artificial Sequence; identical to SEQ ID NO: 165593
  derived and/or modified CDS sequence (opt4) from hemagglutinin__InfluenzaA__AEA73507

SEQ ID NO: 166701 - RNA, 1701 nt, Artificial Sequence; identical to SEQ ID NO: 165593
  derived and/or modified CDS sequence (opt4) from hemagglutinin__InfluenzaA__AEA73518

SEQ ID NO: 166702 - RNA, 1701 nt, Artificial Sequence; identical to SEQ ID NO: 165593
  derived and/or modified CDS sequence (opt4) from hemagglutinin__InfluenzaA__AEA73529

SEQ ID NO: 166703 - RNA, 1701 nt, Artificial Sequence; identical to SEQ ID NO: 165593
  derived and/or modified CDS sequence (opt4) from hemagglutinin__InfluenzaA__AEA73540

SEQ ID NO: 166704 - RNA, 1701 nt, Artificial Sequence; identical to SEQ ID NO: 165593
  derived and/or modified CDS sequence (opt4) from hemagglutinin__InfluenzaA__AEA73551

SEQ ID NO: 166705 - RNA, 1701 nt, Artificial Sequence; identical to SEQ ID NO: 165593
  derived and/or modified CDS sequence (opt4) from hemagglutinin__InfluenzaA__AEA73562

SEQ ID NO: 166706 - RNA, 1698 nt, Artificial Sequence
  derived and/or modified CDS sequence (opt4) from hemagglutinin__InfluenzaA__AEA73573
augaaggugaagcugcuggugcugcugugcaccuucaccgccaccuacgccgacaccaucugcaucggcuaccacgccaacaacagcaccgacaccguggacaccgugcuggagaagaacgugaccgugacccacagcgugaaccugcuggagaacagccacaacggcaagcugugccugcugaagggcaucgccccccugcagcugggcaacugcagcguggccggcuggauccugggcaaccccgagugcgagcugcugaucagcaaggagagcuggagcuacaucguggagaagcccaaccccgagaacggcaccugcuaccccggccacuucgccgacuacgaggagcugagagagcagcugagcagcgugagcagcuucgagagauucgagaucuuccccaaggagagcagcuggcccaaccacaccgugaccggcgugagcgccagcugcagccacaacggcgagagcagcuucuacagaaaccugcuguggcugaccgagaagaacggccuguaccccaaccugagcaagagcuacgccaacaacaaggagaaggaggugcuggugcuguggggcgugcaccacccccccaacaucggcgaccagaagacccuguaccacaccgagaacgccuacgugagcguggugagcagccacuacagcagaaaguucacccccgagaucgccaagagacccaaggugagagaccaggagggcagaaucaacuacuacuggacccugcuggagcccggcgacaccaucaucuucgaggccaacggcaaccugaucgcccccagauacgccuucgcccugagcagaggcuucggcagcggcaucaucaacagcaacgcccccauggacaagugcgacgccaagugccagaccccccagggcgccaucaacagcagccugcccuuccagaacgugcaccccgugaccaucggcgagugccccaaguacgugagaagcgccaagcugagaauggugaccggccugagaaacauccccagcauccagagcagaggccuguucggcgccaucgccggcuucaucgagggcggcuggaccggcaugguggacggcugguacggcuaccaccaccagaacgagcagggcagcggcuacgccgccgaccagaagagcacccagaacgccaucaacggcaucaccaacaaggugaacagcgugaucgagaagaugaacacccaguucaccgccgugggcaaggaguucaacaagcuggagagaagaauggagaaccugaacaagaagguggacgacggcuucaucgacaucuggaccuacaacgccgagcugcuggugcugcuggagaacgagagaacccuggacuuccacgacagcaacgugaagaaccuguacgagaaggugaagagccagcugaagaacaacgccaaggagaucggcaacggcugcuucgaguucuaccacaagugcaacgacgagugcauggagagcgugaagaacggcaccuacgacuaccccaaguacagcgaggagagcaagcugaacagagagaagaucgacggcgugaagcuggagagcaugggcguguaccagauccuggccaucuacagcaccguggccagcagccuggugcugcuggugagccugggcgccaucagcuucuggaugugcagcaacggcagccugcagugcagaaucugcaucuga

SEQ ID NO: 166707 - RNA, 1698 nt, Artificial Sequence
  derived and/or modified CDS sequence (opt4) from hemagglutinin__InfluenzaA__AEA73584
augaaggugaagcugcuggugcugcugugcaccuucaccgccaccuacgccgacaccaucugcaucggcuaccacgccaacaacagcaccgacaccguggacaccgugcuggagaagaacgugaccgugacccacagcgugaaccugcuggagaacagccacaacggcaagcugugccugcugaagggcaucgccccccugcagcugggcaacugcagcguggccggcuggauccugggcaaccccgagugcgagcugcugaucagcaaggagagcuggagcuacaucguggagaagcccaaccccgagaacggcaccugcuaccccggccacuucgccgacuacgaggagcugagagagcagcugagcagcgugagcagcuucgagagauucgagaucuuccccaaggagagcagcuggcccaaccacaccgugaccggcgugagcgccagcugcagccacaacggcgagagcagcuucuacagaaaccugcuguggcugaccggcaagaacggccuguaccccaaccugagcaagagcuacgccaacaacaaggagaaggaggugcuggugcuguggggcgugcaccacccccccaacaucguggaccagaagacccuguacagaaccgagaacgccuacgugagcguggugagcagccacuacagcagaaaguucacccccgagaucgccaagagacccaaggugagaaaccaggagggcagaaucaacuacuacuggacccugcuggagcccggcgacaccaucaucuucgaggccaacggcaaccugaucgcccccagauacgccuucgcccugagcagaggcuucggcagcggcaucaucaacagcaacgcccccauggacaagugcgacgccaagugccagaccccccagggcgccaucaacagcagccugcccuuccagaacgugcaccccgugaccaucggcgagugccccaaguacgugagaagcgccaagcugagaauggugaccggccugagaaacauccccagcauccagagcagaggccuguucggcgccaucgccggcuucaucgagggcggcuggaccggcaugguggacggcugguacggcuaccaccaccagaacgagcagggcagcggcuacgccgccgaccagaagagcacccagaacgccaucaacggcaucaccaacaaggugaacagcgugaucgagaagaugaacacccaguucaccgccgugggcaaggaguucaacaagcuggagagaagaauggagaaccugaacaagaagguggacgacggcuucaucgacaucuggaccuacaacgccgagcugcuggugcugcuggagaacgagagaacccuggacuuccacgacagcaacgugaagaaccuguacgagaaggugaagagccagcugaagaacaacgccaaggagaucggcaacggcugcuucgaguucuaccacaagugcaacgacgagugcauggagagcgugaagaacggcaccuacgacuaccccaaguacagcgaggagagcaagcugaacagagagaagaucgacggcgugaagcuggagagcaugggcguguaccagauccuggccaucuacagcaccguggccagcagccuggugcugcuggugagccugggcgccaucagcuucuggaugugcagcaacggcagccugcagugcagaaucugcaucuga

SEQ ID NO: 166708 - RNA, 1698 nt, Artificial Sequence
  derived and/or modified CDS sequence (opt4) from hemagglutinin__InfluenzaA__AEA73595
augaaggugaagcugcuggugcugcugugcaccuucaccgccaccuacgccgacaccaucugcaucggcuaccacgccaacaacagcaccgacaccguggacaccgugcuggagaagaacgugaccgugacccacagcgugaaccugcuggagaacagccacaacggcaagcugugccugcugaagggcaucgccccccugcagcugggcaacugcagcguggccggcuggauccugggcaaccccgagugcgagcugcugaucagcaaggagagcuggagcuacaucguggagaagcccaaccccgagaacggcaccugcuaccccggccacuucgccgacuacgaggagcugagagagcagcugagcagcgugagcagcuucgagagauucgagaucuuccccaaggagagcagcuggcccaaccacaccgugaccggcgugagcgccagcugcagccacaacggcgagagcagcuucuacagaaaccugcuguggcugaccgugaagaacggccuguaccccaaccugagcaagagcuacgccaacaacaaggagaaggaggugcuggugcuguggggcgugcaccacccccccaacaucguggaccagaagacccuguaccacaccgagaacgccuacgugagcguggugagcagccacuacagcagaaaguucacccccgagaucgccaagagacccaaggugagagaccaggagggcagaaucaacuacuacuggacccugcuggagcccggcgacaccaucaucuucgaggccaacggcaaccugaucgcccccagauacgccuucgcccugagcagaggcuucggcagcggcaucaucaacagcaacgcccccauggacaagugcgacgccaagugccagacccccagaggcgccaucaacagcagccugcccuuccagaacgugcaccccgugaccaucggcgagugccccaaguacgugagaagcgccaagcugagaauggugaccggccugagaaacauccccagcauccagagcagaggccuguucggcgccaucgccggcuucaucgagggcggcuggaccggcaugguggacggcugguacggcuaccaccaccagaacgagcagggcagcggcuacgccgccgaccagaagagcacccagaacgccaucaacggcaucaccaacaaggugaacagcgugaucgagaagaugaacacccaguucaccgccgugggcaaggaguucaacaagcuggagagaagaauggagaaccugaacaagaagguggacgacggcuucaucgacaucuggaccuacaacgccgagcugcuggugcugcuggagaacgagagaacccuggacuuccacgacagcaacgugaagaaccuguacgagaaggugaagagccagcugaagaacaacgccaaggagaucggcaacggcugcuucgaguucuaccacaagugcaacgacgagugcauggagagcgugaagaacggcaccuacgacuaccccaaguacagcgaggagagcaagcugaacagagagaagaucgacggcgugaagcuggagagcaugggcguguaccagauccuggccaucuacagcaccguggccagcagccuggugcugcuggugagccugggcgccaucagcuucuggaugugcagcaacggcagccugcagugcagaaucugcaucuga

SEQ ID NO: 166709 - RNA, 1698 nt, Artificial Sequence; identical to SEQ ID NO: 166013
  derived and/or modified CDS sequence (opt4) from hemagglutinin__InfluenzaA__AEA73606

SEQ ID NO: 166710 - RNA, 1698 nt, Artificial Sequence; identical to SEQ ID NO: 163191
  derived and/or modified CDS sequence (opt4) from hemagglutinin__InfluenzaA__AEA73617

SEQ ID NO: 166711 - RNA, 1698 nt, Artificial Sequence; identical to SEQ ID NO: 163676
  derived and/or modified CDS sequence (opt4) from hemagglutinin__InfluenzaA__AEA73628

SEQ ID NO: 166712 - RNA, 1698 nt, Artificial Sequence; identical to SEQ ID NO: 166032
  derived and/or modified CDS sequence (opt4) from hemagglutinin__InfluenzaA__AEA73639

SEQ ID NO: 166713 - RNA, 1698 nt, Artificial Sequence; identical to SEQ ID NO: 163191
  derived and/or modified CDS sequence (opt4) from hemagglutinin__InfluenzaA__AEA73650

SEQ ID NO: 166714 - RNA, 1698 nt, Artificial Sequence; identical to SEQ ID NO: 163676
  derived and/or modified CDS sequence (opt4) from hemagglutinin__InfluenzaA__AEA73661

SEQ ID NO: 166715 - RNA, 1698 nt, Artificial Sequence
  derived and/or modified CDS sequence (opt4) from hemagglutinin__InfluenzaA__AEA73672
augaaggugaagcugcuggugcugcugugcaccuucaccgccaccuucgccgacaccaucugcaucggcuaccacgccaacaacagcaccgacaccguggacaccgugcuggagaagaacgugaccgugacccacagcgugaaccugcuggagaacagccacaacggcaagcugugccugcugaagggcaucgccccccugcagcugggcaacugcagcguggccggcuggauccugggcaaccccgagugcgagcugcugaucagcaaggagagcuggagcuacaucguggagaagcccaaccccgagaacggcaccugcuaccccggccacuucgccgacuacgaggagcugagagagcagcugagcagcgugagcagcuucgagagauucgagaucuuccccaaggagagcagcuggcccaaccacaccgugaccggcgugagcgccagcugcagccacaacggcgagagcagcuucuacagaaaccugcuguggcugaccgugaagaacggccuguaccccaaccugagcaagagcuacgccaacaacaaggagaaggaggugcuggugcuguggggcgugcaccacccccccaacaucguggaccagaagacccuguacagaaccgagaacgccuacgugagcguggugagcagccacuacagcagaaaguucacccccgagaucgccaagagacccaaggugagagaccaggagggcagaaucaacuacuacuggacccugcuggagcccggcgacaccaucaucuucgaggccaacggcaaccugaucgcccccagauacgccuucgcccugagcagaggcuucggcagcggcaucaucaacagcaacgcccccauggacaagugcgacgccaagugccagacccccagaggcgccaucaacagcagccugcccuuccagaacgugcaccccgugaccaucggcgagugccccaaguacgugagaagcgccaagcugagaauggugaccggccugagaaacauccccagcauccagagcagaggccuguucggcgccaucgccggcuucaucgagggcggcuggaccggcaugguggacggcugguacggcuaccaccaccagaacgagcagggcagcggcuacgccgccgaccagaagagcacccagaacgccaucaacggcaucaccaacaaggugaacagcgugaucgagaagaugaacacccaguucaccgccgugggcaaggaguucaacaagcuggagagaagaauggagaaccugaacaagaagguggacgacggcuucaucgacaucuggaccuacaacgccgagcugcuggugcugcuggagaacgagagaacccuggacuuccacgacagcaacgugaagaaccuguacgagaaggugaagagccagcugaagaacaacgccaaggagaucggcaacggcugcuucgaguucuaccacaagugcaacgacgagugcauggagagcgugaagaacggcaccuacgacuaccccaaguacagcgaggagagcaagcugaacagagagaagaucgacggcgugaagcuggagagcaugggcguguaccagauccuggccaucuacagcaccguggccagcagccuggugcugcuggugagccugggcgccaucagcuucuggaugugcagcaacggcagccugcagugcagaaucugcaucuga

SEQ ID NO: 166716 - RNA, 1698 nt, Artificial Sequence; identical to SEQ ID NO: 163676
  derived and/or modified CDS sequence (opt4) from hemagglutinin__InfluenzaA__AEA73683

SEQ ID NO: 166717 - RNA, 1698 nt, Artificial Sequence
  derived and/or modified CDS sequence (opt4) from hemagglutinin__InfluenzaA__AEA73694
augaaggugaagcugcuggugcugcugugcaccuucaccgccaccuacgccgacaccaucugcaucggcuaccacgccaacaacagcaccgacaccguggacaccgugcuggagaagaacgugaccgugacccacagcgugaaccugcuggagaacagccacaacggcaagcugugccugcugaagggcaucgccccccugcagcugggcaacugcagcguggccggcuggauccugggcaaccccgagugcgagcugcugaucagcaaggagagcuggagcuacaucguggagaagcccaaccccgagaacggcaccugcuaccccggccacuucgccgacuacgaggagcugagagagcagcugagcagcgugagcagcuucgagagauucgagaucuuccccaaggagagcagcuggcccaaccacaccgugaccggcgugagcgccagcugcagccacaacggcgagagcagcuucuacagaaaccugcuguggcugaccgugaagaacggccuguaccccaaccugagcaagagcuacgccaacaacaaggagaaggaggugcuggugcuguggggcgugcaccacccccccaacaucguggaccagaagacccuguacagaaccgagaacgccuacgugagcguggugagcagccacuacagcagaaaguucacccccgagaucgccaagagacccaaggugagagaccaggagggcagaaucaacuacuacuggacccugcuggagcccggcgacaccaucaucuucgaggccaacggcaaccugaucgcccccagauacgccuucgcccugagcagaggcuucggcagcggcaucaucaacagcaacgcccccauggacaagugcgacgccaagugccagacccccagaggcgccaucaacagcagccugcccuuccagaacgugcaccccgugaccaucggcgagugccccaaguacgugagaagcgccaagcugagaauggugaccggccugagaaacauccccagcauccagagcagaggccuguucggcgccaucgccggcuucaucgagggcggcuggaccggcaugguggacggcugguacggcuaccaccaccagaacgagcagggcagcggcuacgccgccgaccagaagagcacccagaacgccaucaacggcaucaccaacaaggugaacagcgugaucgagaagaugaacacccaguucaccgccgugggcaaggaguucaacaagcuggagagaagaauggagaaccugaacaagaagguggacgacggcuucaucgacaucuggaccuacaacgccgagcugcuggugcugcuggagaacgagagaacccuggacuuccacgacagcaacgugaagaaccuguacgagaaggugaagagccagcugaagaacaacgccaaggagaucggcaacggcugcuucgaguucuaccacaagugcaacgacgagugcauggagagcgugaagaacggcaccuacgacuaccccaaguacagcgaggagagcaagcugaacagagagaagaucgacggcguggagcuggagagcaugggcguguaccagauccuggccaucuacagcaccguggccagcagccuggugcugcuggugagccugggcgccaucagcuucuggaugugcagcaacggcagccugcagugcagaaucugcaucuga

SEQ ID NO: 166718 - RNA, 1698 nt, Artificial Sequence; identical to SEQ ID NO: 163676
  derived and/or modified CDS sequence (opt4) from hemagglutinin__InfluenzaA__AEA73705

SEQ ID NO: 166719 - RNA, 1698 nt, Artificial Sequence; identical to SEQ ID NO: 163191
  derived and/or modified CDS sequence (opt4) from hemagglutinin__InfluenzaA__AEA73716

SEQ ID NO: 166720 - RNA, 1698 nt, Artificial Sequence; identical to SEQ ID NO: 163191
  derived and/or modified CDS sequence (opt4) from hemagglutinin__InfluenzaA__AEA73727

SEQ ID NO: 166721 - RNA, 1698 nt, Artificial Sequence; identical to SEQ ID NO: 163191
  derived and/or modified CDS sequence (opt4) from hemagglutinin__InfluenzaA__AEA73738

SEQ ID NO: 166722 - RNA, 1698 nt, Artificial Sequence; identical to SEQ ID NO: 163191
  derived and/or modified CDS sequence (opt4) from hemagglutinin__InfluenzaA__AEA73749

SEQ ID NO: 166723 - RNA, 1698 nt, Artificial Sequence
  derived and/or modified CDS sequence (opt4) from hemagglutinin__InfluenzaA__AEA73760
augaaggugaagcugcuggugcugcugugcaccuucaccgccaccuacgccgacaccaucugcaucggcuaccacgccaacaacagcaccgacaccguggacaccgugcuggagaagaacgugaccgugacccacagcgugaaccugcuggagaacagccacaacggcaagcugugccugcugaagggcaucgccccccugcagcugggcaacugcagcguggccggcuggauccugggcaaccccgagugcgagcugcugaucagcaaggagagcuggagcuacaucguggagaagcccaaccccgagaacggcaccugcuaccccggccacuucgccgacuacgaggagcugagagagcagcugagcagcgugagcagcuucgagagauucgagaucuuccccaaggagagcagcuggcccaaccacaccgugaccggcgugagcgccagcugcagccacaacggcgagagcagcuucuacagaaaccugcuguggcugaccgugaagaacggccuguaccccaaccugagcaagagcuacgccaacaacaaggagaaggaggugcuggugcuguggggcgugcaccacccccccaacaucguggaccagaagacccuguacagaaccgagaacgccuacgugagcguggugagcagccacuacagcagaaaguucacccccgagaucgccaagagacccaagaucagagaccaggagggcagaaucaacuacuacuggacccugcuggagcccggcgacaccaucaucuucgaggccaacggcaaccugaucgcccccagauacgccuucgcccugagcagaggcuucggcagcggcaucaucaacagcaacgcccccauggacaagugcgacgccaagugccagacccccagaggcgccaucaacagcagccugcccuuccagaacgugcaccccgugaccaucggcgagugccccaaguacgugagaagcgccaagcugagaauggugaccggccugagaaacauccccagcauccagagcagaggccuguucggcgccaucgccggcuucaucgagggcggcuggaccggcaugguggacggcugguacggcuaccaccaccagaacgagcagggcagcggcuacgccgccgaccagaagagcacccagaacgccaucaacggcaucaccaacaaggugaacagcgugaucgagaagaugaacacccaguucaccgccgugggcaaggaguucaacaagcuggagagaagaauggagaaccugaacaagaagguggacgacggcuucaucgacaucuggaccuacaacgccgagcugcuggugcugcuggagaacgagagaacccuggacuuccacgacagcaacgugaagaaccuguacgagaaggugaagagccagcugaagaacaacgccaaggagaucggcaacggcugcuucgaguucuaccacaagugcaacgacgagugcauggagagcgugaagaacggcaccuacgacuaccccaaguacagcgaggagagcaagcugaacagagagaagaucgacggcgugaagcuggagagcaugggcguguaccagauccuggccaucuacagcaccguggccagcagccuggugcugcuggugagccugggcgccaucagcuucuggaugugcagcaacggcagccugcagugcagaaucugcaucuga

SEQ ID NO: 166724 - RNA, 1701 nt, Artificial Sequence; identical to SEQ ID NO: 162729
  derived and/or modified CDS sequence (opt4) from hemagglutinin__InfluenzaA__AEA73771

SEQ ID NO: 166725 - RNA, 1701 nt, Artificial Sequence; identical to SEQ ID NO: 164359
  derived and/or modified CDS sequence (opt4) from hemagglutinin__InfluenzaA__AEA73781

SEQ ID NO: 166726 - RNA, 1701 nt, Artificial Sequence; identical to SEQ ID NO: 164281
  derived and/or modified CDS sequence (opt4) from hemagglutinin__InfluenzaA__AEA73791

SEQ ID NO: 166727 - RNA, 1701 nt, Artificial Sequence; identical to SEQ ID NO: 162909
  derived and/or modified CDS sequence (opt4) from hemagglutinin__InfluenzaA__AEA73801

SEQ ID NO: 166728 - RNA, 1701 nt, Artificial Sequence; identical to SEQ ID NO: 163893
  derived and/or modified CDS sequence (opt4) from hemagglutinin__InfluenzaA__AEA73811

SEQ ID NO: 166729 - RNA, 1701 nt, Artificial Sequence; identical to SEQ ID NO: 164451
  derived and/or modified CDS sequence (opt4) from hemagglutinin__InfluenzaA__AEA73821

SEQ ID NO: 166730 - RNA, 1701 nt, Artificial Sequence
  derived and/or modified CDS sequence (opt4) from hemagglutinin__InfluenzaA__AEA73831
augaaggccauccugguggugcugcuguacaccuucgccaccgccaacgccgacacccugugcaucggcuaccacgccaacaacagcaccgacaccguggacaccgugcuggagaagaacgugaccgugacccacagcgugaaccugcuggaggacaagcacaacggcaagcugugcaagcugagaggcgugaccccccugcaccugggcaagugcaacaucgccggcuggauccugggcaaccccgagugcgagagccugagcaccgccagcagcuggagcuacaucguggagaccagcagcagcgacaacggcaccugcuaccccggcgacuucaucgacuacgaggagcugagagagcagcugagcagcgugagcagcuucgagagauucgagaucuuccccaagaccagcagcuggcccaaccacgacagcaacaagggcgugaccgccgccugcccccacgccggcgccaagagcuucuacaagaaccugaucuggcuggugaagaagggcaacagcuaccccaagcugagcaagagcuacaucaacgacaagggcaaggaggugcuggugcuguggggcauccaccaccccagcaccagcaccgaccagcagagccuguaccagaacgccgacgccuacguguucgugggcaccagcagauacagcaagaaguucaagcccgagaucgccaucagacccaaggugagagaccaggagggcagaaugaacuacuacuggacccugguggagcccggcgacaagaucaccuucgaggccaccggcaaccugguggugcccagauacgccuucgccauggagagaaacgccggcagcggcaucaucaucagcgacacccccgugcacgacugcaacaccaccugccagacccccaagggcgccaucaacaccagccugcccuuccagaacauccaccccaucaccaucggcaagugccccaaguacgugaagagcaccaagcugagacuggccaccggccugagaaacgugcccagcauccagagcagaggccuguucggcgccaucgccggcuucaucgagggcggcuggaccggcaugguggacggcugguacggcuaccaccaccagaacgagcagggcagcggcuacgccgccgaccugaagagcacccagaacgccaucgacaagaucaccaacaaggugaacagcgugaucgagaagaugaacacccaguucaccgccgugggcaaggaguucaaccaccuggagaagagaaucgagaaccugaacaagaagguggacgacggcuuccuggacaucuggaccuacaacgccgagcugcuggugcugcuggagaacgagagaacccuggacuaccacgacagcaacgugaagaaccuguacgagaaggugagaagccagcugaagaacaacgccaaggagaucggcaacggcugcuucgaguucuaccacaagugcgacaacaccugcauggagagcgugaagaacggcaccuacgacuaccccaaguacagcgaggaggccaagcugaacagagaggagaucgacggcgugaagcuggagagcaccagaaucuaccagauccuggccaucuacagcaccguggccagcagccuggugcugguggugagccugggcgccaucagcuucuggaugugcagcaacggcagccugcagugcagaaucugcaucuga

SEQ ID NO: 166731 - RNA, 1701 nt, Artificial Sequence
  derived and/or modified CDS sequence (opt4) from hemagglutinin__InfluenzaA__AEA73841
augaaggccauccugguggugcugcuguacaccuucgccaccgccaacgccgacacccugugcaucggcuaccacgccaacaacagcaccgacaccguggacaccgugcuggagaagaacgugaccgugacccacagcgugaaccugcuggaggacaagcacaacggcaagcugugcaagcugagaggcguggccccccugcaccugggcaagugcaacaucgccggcuggauccugggcaaccccgagugcgagagccugagcaccgccagcagcuggagcuacaucguggagaccagcagcagcgacaacggcaccugcuaccccggcgacuucaucaacuacgaggagcugagagagcagcugagcagcgugagcagcuucgagagauucgagaucuuccccaagaccagcagcuggcccaaccacgacagcaacaagggcgugaccgccgccugcccccacgccggcgccaagagcuucuacaagaaccugaucuggcuggugaagaagggcaacagcuaccccaagcugagcaagagcuacaucaacgacaagggcaaggaggugcuggugcuguggggcauccaccaccccagcaccagcgccgaccagcagagccuguaccagaacgccgacgccuacguguucgugggcaccagcagauacagcaagaaguucaagcccgagaucgccaucagacccaaggugagagaccaggagggcagaaugaacuacuacuggacccugguggagcccggcgacaagaucaccuucgaggccaccggcaaccugguggugcccagauacgccuucgccauggagagaaacgccgagagcggcaucaucaucagcgacacccccgugcacgacugcaacaccaccugccagacccccaagggcgccaucaacaccagccugcccuuccagaacauccaccccaucaccaucggcaagugccccaaguacgugaagagcaccaagcugagacuggccaccggccugagaaacgugcccagcauccagagcagaggccuguucggcgccaucgccggcuucaucgagggcggcuggaccggcaugguggacggcugguacggcuaccaccaccagaacgagcagggcagcggcuacgccgccgaccugaagagcacccagaacgccaucgacaagaucaccaacaaggugaacagcgugguggagaagaugaacacccaguucaccgccgugggcaaggaguucaaccaccuggagaagagaaucgagaaccugaacaagaagguggacgacggcuuccuggacaucuggaccuacaacgccgagcugcuggugcugcuggagaacgagagaacccuggacuaccacgacagcaacgugaagaaccuguacgagaaggugagaagccagcugaagaacaacgccaaggagaucggcaacggcugcuucgaguucuaccacaagugcgacaacaccugcauggagagcgugaagaacggcaccuacgacuaccccaaguacagcgaggaggccaagcugaacagagaggagaucgacggcgugaagcuggagagcaccagaaucuaccagauccuggccaucuacagcaccguggccagcagccuggugcugguggugagccugggcgccaucagcuucuggaugugcagcaacggcagccugcagugcagaaucugcaucuga

SEQ ID NO: 166732 - RNA, 1701 nt, Artificial Sequence; identical to SEQ ID NO: 164359
  derived and/or modified CDS sequence (opt4) from hemagglutinin__InfluenzaA__AEA73851

SEQ ID NO: 166733 - RNA, 1701 nt, Artificial Sequence
  derived and/or modified CDS sequence (opt4) from hemagglutinin__InfluenzaA__AEA73861
augaaggccauccugguggugcugcuguacaccuucgccaccgccaacgccgacacccugugcaucggcuaccacgccaacaacagcaccgacaccguggacaccgugcuggagaagaacgugaccgugacccacagcgugaaccugcuggaggacaagcacaacggcaagcugugcaagcugagaggcguggccccccugcaccugggcgagugcaacaucgccggcuggauccugggcaaccccgagugcgagagccugagcaccgccagcagcuggagcuacaucguggagaccagcagcagcgacaacggcaccugcuaccccggcgacuucaucgacuacgaggagcugagagagcagcugagcagcgugagcagcuucgagagauucgagaucuuccccaagaccagcagcuggcccaaccacgacagcaacaagggcgugaccgccgccugcccccacgccggcgccaagagcuucuacaagaaccugaucuggcuggugaagaagggcaacagcuaccccaagcugagcaagagcuacaucaacgacaagggcaaggaggugcuggugcuguggggcauccaccaccccagcaccagcgccgaccagcagagccuguaccagaacgccgacgccuacguguucgugggcaccagcagauacagcaagaaguucaagcccgagaucgccaucagacccaaggugagagaccaggagggcagaaugaacuacuacuggacccugguggagcccggcgacaagaucaccuucgaggccaccggcaaccugguggugcccagauacgccuucgccauggagagaaacgccggcagcggcaucaucaucagcgacacccccgugcacgacugcaacaccaccugccagacccccaagggcgccaucaacaccagccugcccuuccagaacgugcaccccaucaccaucggcaagugccccaaguacgugaagagcaccaagcugagacuggccaccggccugagaaacgugcccagcauccagagcagaggccuguucggcgccaucgccggcuucaucgagggcggcuggaccggcaugguggacggcugguacggcuaccaccaccagaacgagcagggcagcggcuacgccgccgaccugaagagcacccagaacgccaucgacgagaucaccaacaaggugaacagcgugaucgagaagaugaacacccaguucaccgccgugggcaaggaguucaaccaccuggagaagagaaucgagaaccugaacaagaagaucgacgacggcuuccuggacaucuggaccuacaacgccgagcugcuggugcugcuggagaacgagagaacccuggacuaccacgacagcaacgugaagaaccuguacgagaaggugagaagccagcugaagaacaacgccaaggagaucggcaacggcugcuucgaguucuaccacaagugcgacaacaccugcauggagagcgugaagaacggcaccuacgacuaccccaaguacagcgaggaggccaagcugaacagagaggagaucgacggcgugaagcuggagagcaccagaaucuaccagauccuggccaucuacagcaccguggccagcagccuggugcugguggugagccugggcgccaucagcuucuggaugugcagcaacggcagccugcagugcagaaucugcaucuga

SEQ ID NO: 166734 - RNA, 1701 nt, Artificial Sequence; identical to SEQ ID NO: 164601
  derived and/or modified CDS sequence (opt4) from hemagglutinin__InfluenzaA__AEA73871

SEQ ID NO: 166735 - RNA, 1701 nt, Artificial Sequence; identical to SEQ ID NO: 164601
  derived and/or modified CDS sequence (opt4) from hemagglutinin__InfluenzaA__AEA73881

SEQ ID NO: 166736 - RNA, 1701 nt, Artificial Sequence; identical to SEQ ID NO: 164281
  derived and/or modified CDS sequence (opt4) from hemagglutinin__InfluenzaA__AEA73891

SEQ ID NO: 166737 - RNA, 1701 nt, Artificial Sequence
  derived and/or modified CDS sequence (opt4) from hemagglutinin__InfluenzaA__AEA73901
augaacgccauccugguggugcugcuguacaccuucgccaccgccaacgccgacacccugugcaucggcuaccacgccaacaacagcaccgacaccguggacacccugcuggagaagaacgugaccgugacccacagcgugaaccugcuggaggacaagcacaacggcaagcugugcaagcugagaggcguggccccccugcaccugggcaagugcaacaucgccggcuggauccugggcaaccccgagugcgagagccugagcaccgccagcagcuggagcuacaucguggagaccagcagcagcgacaacggcaccugcuaccccggcgacuucaucgacuacgaggagcugagagagcagcugagcagcgugagcagcuucgagagauucgagaucuuccccaagaccagcagcuggcccaaccacgacagcaacaagggcgugaccgccgccugcccccacgccggcgccaagagcuucuacaagaaccugaucuggcuggugaagaagggcaacagcuaccccaagcugagcaagagcuacaucaacgacaagggcaaggaggugcuggugcuguggggcauccaccaccccagcaccagcgccgaccagcagagccuguaccagaacgccgacgccuacguguucgugggcaccagcagauacagcaagaaguucaagcccgagaucgccaucagacccaaggugagagaccaggagggcagaaugaacuacuacuggacccugguggagcccggcgacaagaucaccuucgaggccaccggcaaccugguggugcccagauacgccuucgccauggagagaaacgccggcagcggcaucaucaucagcgacacccccgugcacgacugcaacaccaccugccagacccccaagggcgccaucaacaccagccugcccuuccagaacauccaccccaucaccaucggcaagugccccaaguacgugaagagcaccaagcugagacuggccaccggccugagaaacgugcccagcauccagagcagaggccuguucggcgccaucgccggcuucaucgagggcggcuggaccggcaugguggacggcugguacggcuaccaccaccagaacgagcagggcagcggcuacgccgccgaccugaagagcacccagaacgccaucgacgagaucaccaacaagaucaacagcgugaucgagaagaugaacacccaguucaccgccgugggcaaggaguucaaccaccuggagaagagaaucgagaaccugaacaagaagguggacgacggcuuccuggacaucuggaccuacaacgccgagcugcuggugcugcuggagaacgagagaacccuggacuaccacgacagcaacgugaagaaccuguacgagaaggugagaagccagcugaagaacaacgccaaggagaucggcaacggcugcuucgaguucuaccacaagugcgacaacaccugcauggagagcgugaagaacggcaccuacgacuaccccaaguacagcgaggaggccaagcugaacagagaggagaucgacggcgugaagcuggagagcaccagaaucuaccagauccuggccaucuacagcaccguggccagcagccuggugcugguggugagccugggcgccaucagcuucuggaugugcagcaacggcagccugcagugcagaaucugcaucuga

SEQ ID NO: 166738 - RNA, 1701 nt, Artificial Sequence; identical to SEQ ID NO: 163893
  derived and/or modified CDS sequence (opt4) from hemagglutinin__InfluenzaA__AEA73911

SEQ ID NO: 166739 - RNA, 1701 nt, Artificial Sequence; identical to SEQ ID NO: 164601
  derived and/or modified CDS sequence (opt4) from hemagglutinin__InfluenzaA__AEA73921

SEQ ID NO: 166740 - RNA, 1701 nt, Artificial Sequence; identical to SEQ ID NO: 164359
  derived and/or modified CDS sequence (opt4) from hemagglutinin__InfluenzaA__AEA73931

SEQ ID NO: 166741 - RNA, 1701 nt, Artificial Sequence; identical to SEQ ID NO: 164359
  derived and/or modified CDS sequence (opt4) from hemagglutinin__InfluenzaA__AEA73961

SEQ ID NO: 166742 - RNA, 1701 nt, Artificial Sequence
  derived and/or modified CDS sequence (opt4) from hemagglutinin__InfluenzaA__AEA73971
augaaggccauccugguggugcugcuguacaccuucgccaccgccaacgccgacacccugugcaucggcuaccacgccaacaacagcaccgacaccguggacaccgugcuggagaagaacgugaccgugacccacagcgugaaccugcuggaggacaagcacaacggcaagcugugcaagcugagaggcguggccccccugcaccugggcaagugcaacaucgccggcuggauccugggcaaccccgagugcgagagccugagcaccgccagcagcuggagcuacaucguggagaccagcagcagcgacaacggcaccugcuaccccggcgacuucaucgacuacgaggagcugagagagcagcugagcagcgugagcagcuucgagagauucgagaucuuccccaagaccagcagcuggcccaaccacgacagcaacaagggcgugaccgccgccugcccccacgccggcgccaagagcuucuacaagaaccugaucuggcuggugaagaagggcaacagcuaccccaagcugagcaagagcuacaucaacgacaagggcaaggaggugcuggugcuguggggcauccaccaccccagcaccagcgccgaccagcagagccuguaccagaacgccgacgccuacguguucgugggcaccagcagauacagcaagaaguucaagcccgagaucgccaucagacccaaggugagagagcaggagggcagaaugaacuacuacuggacccugguggagcccggcgacaagaucaccuucgaggccaccggcaaccugguggugcccagauacgccuucgccauggagagaaacgccggcagcggcaucaucaucagcgacacccccgugcacgacugcaacaccaccugccagacccccaagggcgccaucaacaccagccugcccuuccagaacauccacagcaucaccaucggcaagugccccaaguacgugaagagcaccaagcugagacuggccaccggccugagaaacgugcccagcauccagagcagaggccuguucggcgccaucgccggcuucaucgagggcggcuggaccggcaugguggacggcugguacggcuaccaccaccagaacgagcagggcagcggcuacgccgccgaccagaagagcacccagaacgccaucgacgagaucaccaacaaggugaacagcgugaucgagaagaugaacacccaguucaccgccgugggcaaggaguucaaccaccuggagaagagaaucgagaaccugaacaagaagguggacgacggcuuccuggacaucuggaccuacaacgccgagcugcuggugcugcuggagaacgagagaacccuggacuaccacgacagcaacgugaagaaccuguacgagaaggugagaagccagcugaagaacaacgccaaggagaucggcaacggcugcuucgaguucuaccacaagugcaacaacaccugcauggagagcgugaagaacggcaccuacgacuaccccaaguacagcgaggaggccaagcugaacagagaggagaucgacggcgugaagcuggagagcaccagaaucuaccagauccuggccaucuacagcaccguggccagcagccuggugcugguggugagccugggcgccaucagcuucuggaugugcagcaacggcagccugcagugcagaaucugcaucuga

SEQ ID NO: 166743 - RNA, 1701 nt, Artificial Sequence; identical to SEQ ID NO: 164359
  derived and/or modified CDS sequence (opt4) from hemagglutinin__InfluenzaA__AEA73981

SEQ ID NO: 166744 - RNA, 1701 nt, Artificial Sequence
  derived and/or modified CDS sequence (opt4) from hemagglutinin__InfluenzaA__AEA73991
augaaggccauccugguggugcugcuguacaccuucgccaccgccaacgccgacacccugugcaucggcuaccacgccaacaacagcaccgacaccguggacaccgugcuggagaagaacgugaccgugacccacagcgugaaccugcuggaggacaagcacaacggcaagcugugcaagcugagaggcguggccccccugcaccugggcaagugcaacaucgccggcuggauccugggcaaccccgagugcgagagccugagcaccgccagcagcuggagcuacaucguggagaccagcagcagcgacaacggcaccugcuaccccggcgacuucaucgacuacgaggagcugagagagcagcugagcagcgugagcagcuucgagaaguucgagaucuuccccaagaccagcagcuggcccaaccacgacagcaacaagggcgugaccgccgccugcccccacgccggcgccaagagcuucuacaagaaccugaucuggcuggugaagaagggcaacagcuaccccaagcugagcaagagcuacaucaacgacaagggcaaggaggugcuggugcuguggggcauccaccaccccagcaccagcgccgaccagcagagccuguaccagaacgccgacagcuacguguucgugggcaccagcagauacagcaagaaguucaagcccgagaucgccaucagacccaaggugagagaccaggagggcagaaugaacuacuacuggacccugguggagcccggcgacaagaucaccuucgaggccaccggcaaccugguggugcccagauacgccuucgccauggagagaaacgccggcagcggcaucaucaucagcgacacccccgugcacgacugcaacaccaccugccagacccccgagggcgccaucaacaccagccugcccuuccagaacauccaccccaucaccaucggcaagugccccaaguacgugaagagcaccaagcugagacuggccaccggccugagaaacgugcccagcauccagagcagaggccuguucggcgccaucgccggcuucaucgagggcggcuggaccggcaugguggacggcugguacggcuaccaccaccagaacgagcagggcagcggcuacgccgccgaccugaagagcacccagaacgccaucgacgagaucaccaacaaggugaacagcgugaucgagaagaugaacacccaguucaccgccgugggcaaggaguucaaccaccuggagaagagaaucgagaaccugaacaagaagguggacgacggcuuccuggacaucuggaccuacaacgccgagcugcuggugcugcuggagaacgagagaacccuggacuaccacgacagcaacgugaagaaccuguacgagaaggugagaagccagcugaagaacaacgccaaggagaucggcaacggcugcuucgaguucuaccacaagugcgacaacaccugcauggagagcgugaagaacggcaccuacgacuaccccaaguacagcgaggaggccaagcugaacagagaggagaucgacggcgugaagcuggagagcaccagaaucuaccagauccuggccaucuacagcaccguggccagcagccuggugcugguggugagccugggcgccaucagcuucuggaugugcagcaacggcagccugcagugcagaaucugcaucuga

SEQ ID NO: 166745 - RNA, 1701 nt, Artificial Sequence; identical to SEQ ID NO: 164342
  derived and/or modified CDS sequence (opt4) from hemagglutinin__InfluenzaA__AEA74001

SEQ ID NO: 166746 - RNA, 1701 nt, Artificial Sequence
  derived and/or modified CDS sequence (opt4) from hemagglutinin__InfluenzaA__AEA74011
augaaggccauccugguggugcugcuguacaccuucgccaccgccaacgccgacacccugugcaucggcuaccacgccaacaacagcaccgacaccguggacaccgugcuggagaagaacgugaccgugacccacagcgugaaccugcuggaggacaagcacaacggcaagcugugcaagcugagaggcguggccccccugcaccugggcaagugcaacaucgccggcuggauccugggcaaccccgagugcgagagccugagcaccgccagcagcuggagcuacaucguggagaccagcagcagcgacaacggcaccugcuaccccggcgacuucaucgacuacgaggagcugagagagcagcugagcagcgugagcagcuucgagagauucgagaucuuccccaagaccagcagcuggcccaaccacgacagcaacaagggcgugaccgccgccugcccccacgccggcgccaagagcuucuacaagaaccugaucuggcuggugaagaagagaaacagcuaccccaagcugagccagagcuacaucaacgacaagggcaaggaggugcuggugcuguggggcauccaccaccccagcaccagcgccgaccagcagagccuguaccagaacgccgacgccuacguguucgugggcaccagcagauacagcaagaaguucaagcccgagaucgccaucagacccaaggugagagaccaggagggcagaaugaacuacuacuggacccugguggagcccggcgacaagaucaccuucgaggccaccggcaaccugguggugcccagauacgccuucgccauggagagaaacgccggcagcggcaucaucaucagcgacacccccgugcacgacugcaacaccaccugccagacccccaagggcgccaucaacaccagccugcccuuccagaacauccaccccaucaccaucggcaagugccccaaguacgugaagagcaccaagcugagacuggccaccggccugagaaacgugcccagcauccagagcagaggccuguucggcgccaucgccggcuucaucgagggcggcuggaccggcaugguggacggcugguacggcuaccaccaccagaacgagcagggcagcggcuacgccgccgaccugaagagcacccagaacgccaucgacaagaucaccaacaaggugaacagcgugaucgagaagaugaacacccaguucaccgccgugggcaaggaguucaaccaccuggagaagagaaucgagaaccugaacaagaagguggacgacggcuuccuggacaucuggaccuacaacgccgagcugcuggugcugcuggagaacgagagaacccuggacuaccacgacagcaacgugaagaaccuguacgagaaggugagaagccagcugaagaacaacgccaaggagaucggcaacggcugcuucgaguucuaccacaagugcgacaacaccugcauggagagcaucaagaacggcaccuacgacuaccccaaguacagcgaggaggccaagcugaacagagaggagaucgacggcgugaagcuggagagcaccagaaucuaccagauccuggccaucuacagcaccguggccagcagccuggugcugguggugagccugggcgccaucagcuucuggaugugcagcaacggcagccugcagugcagaaucugcaucuga

SEQ ID NO: 166747 - RNA, 1701 nt, Artificial Sequence
  derived and/or modified CDS sequence (opt4) from hemagglutinin__InfluenzaA__AEA74021
augaaggccauccugguggugcugcuguacaccuucgccaccgccaacgccgacacccugugcaucggcuaccacgccaacaacagcaccgacaccguggacaccgugcuggagaagaacgugaccgugacccacagcgugaaccugcuggaggacaagcacaacggcaagcugugcaagcugagaggcguggccccccugcaccugggcaagugcaacaucgccggcuggauccugggcaaccccgagugcgagagccugagcaccgccagcagcuggagcuacaucguggagaccagcagcagcgacaacggcaccugcuaccccggcgacuucaucgacuacgaggagcugagagagcagcugagcagcgugagcagcuucgagagauucgagaucuuccccaagaccagcagcuggcccaaccacgacagcaacaagggcgugaccgccgccugcccccacgccggcgccaagagcuucuacaagaaccugaucuggcuggugaagaagggcaacagcuaccccaagcugagccagagcuacaucaacgacaagggcaaggaggugcuggugcuguggggcauccaccaccccagcaccagcgccgaccagcagagccuguaccagaacgccgacgccuacguguucgugggcaccagcagauacagcaagaaguucaagcccgagaucgccaucagacccaaggugagagaccaggagggcagaaugaacuacuacuggacccugguggagcccggcgacaagaucaccuucgaggccaccggcaaccugguggugcccagauacgccuucgccauggagagaaacgccggcagcggcaucaucaucagcgacacccccgugcacgacugcaacaccaccugccagacccccaagggcgccaucaacaccagccugcccuuccagaacauccaccccaucaccaucggcaagugccccaaguacgugaagagcaccaagcugagacuggccaccggccugagaaacgugcccagcauccagagcagaggccuguucggcgccaucgccggcuucaucgagggcggcuggaccggcaugguggacggcugguacggcuaccaccaccagaacgagcagggcagcggcuacgccgccgaccugaagagcacccagaacgccaucgacaagaucaccaacaaggugaacagcgugaucgagaagaugaacacccaguucaccgccgugggcaaggaguucaaccaccuggagaagagaaucgagaaccugaacaagaagguggacgacggcuuccuggacaucuggaccuacaacgccgagcugcuggugcugcuggagaacgagagaacccuggacuaccacgacagcaacgugaagaaccuguacgagaaggugagaagccagcugaagaacaacgccaaggagaucggcaacggcugcuucgaguucuaccacaagugcgacaacaccugcauggagagcaucaagaacggcaccuacgacuaccccaaguacagcgaggaggccaagcugaacagagaggagaucgacggcgugaagcuggagagcaccagaaucuaccagauccuggccaucuacagcaccguggccagcagccuggugcugguggugagccugggcgccaucagcuucuggaugugcagcaacggcagccugcagugcagaaucugcaucuga

SEQ ID NO: 166748 - RNA, 1701 nt, Artificial Sequence
  derived and/or modified CDS sequence (opt4) from hemagglutinin__InfluenzaA__AEA74031
augaaggccauccugguggugcugcuguacaccuucgccaccgccaacgccgacacccugugcaucggcuaccacgccaacaacagcaccgacaccguggacaccgugcuggagaagaacgugaccgugacccacagcguggaccugcuggaggacaagcacaacggcaagcugugcaagcugagaggcguggccccccugcaccugggcaagugcaacaucgccggcuggauccugggcaaccccgagugcgagagccugagcaccgccagcagcuggagcuacaucguggagaccagcagcagcgacaacggcaccugcuaccccggcgacuucaucgacuacgaggagcugagagagcagcugagcagcgugagcagcuucgagagauucgagaucuuccccaagaccagcagcuggcccaaccacgacagcaacaagggcgugaccgccgccugcccccacgccggcgccaagagcuucuacaacaaccugaucuggcuggugaagaagggcaacagcuaccccaagcugaacaagagcuacaucaacgacaagggcaaggaggugcuggugcuguggggcauccaccaccccagcaccagcaccgaccagcagagccuguaccagaacgccgacgccuacguguucgugggcaccagcagauacagcaagaaguucaagcccgagaucgccaucagacccaaggugagaaaccaggagggcagaaugaacuacuacuggacccugguggagcccggcgacaagaucaccuucgaggccaccggcaaccugguggugcccagauacgccuucgccauggagagaaacgccggcagcggcaucaucaucagcgacacccccauccacgacugcaacaccaccugccagacccccaagggcgccaucaacaccagccugcccuuccagaacauccaccccaucaccaucggcaagugccccaaguacgugaagagcaccaagcugagacuggccaccggccugagaaacgugcccagcauccagagcagaggccuguucggcgccaucgccggcuucaucgagggcggcuggaccggcaugguggacggcugguacggcuaccaccaccagaacgagcagggcagcggcuacgccgccgaccugaagagcacccagaacgccaucgacgagaucaccaacaaggugaacagcgugaucgagaagaugaacacccaguucaccgccgugggcaaggaguucaaccaccuggagaagagaaucgagaaccugaacaagaagguggacgacggcuuccuggacaucuggaccuacaacgccgagcugcuggugcugcuggagaacgagagaacccuggacuaccacgacagcaacgugaagaaccuguacgagaaggugagaagccagcugaagaacaacgccaaggagaucggcaacggcugcuucgaguucuaccacaagugcgacaacaccugcauggagagcgugaagaacggcaccuacgacuaccccaaguacagcgaggaggccaagcugaacagagaggagaucgacggcgugaagcuggagagcaccagaaucuaccagauccuggccaucuacagcaccguggccagcagccuggugcugguggugagccugggcgccaucagcuucuggaugugcagcaacggcagccugcagugcagaaucugcaucuga

SEQ ID NO: 166749 - RNA, 1701 nt, Artificial Sequence
  derived and/or modified CDS sequence (opt4) from hemagglutinin__InfluenzaA__AEA74035
augaaggccauccugguggugcugcuguacaccuucgccaccgccaacgccgacacccugugcaucggcuaccacgccaacaacagcaccgacaccguggacaccgugcuggagaagaacgugaccgugacccacagcguggaccugcuggaggacaagcacaacggcaagcugugcaagcugagaggcguggccccccugcaccugggcaagugcaacaucgccggcuggauccugggcaaccccgagugcgagagccugagcaccgccagcagcuggagcuacaucguggagaccagcagcagcgacaacggcaccugcuaccccggcgacuucaucgacuacgaggagcugagagagcagcugagcagcgugagcagcuucgagagauucgagaucuuccccaagaccagcagcuggcccaaccacgacagcaacaagggcgugaccgccgccugcccccacgccggcgccaagagcuucuacaacaaccugaucuggcuggugaagaagggcaacagcuaccccaagcugaacaagagcuacaucaacgacaagggcaaggaggugcuggugcuguggggcauccaccaccccagcaccagcaccgaccagcagagccuguaccagaacgccgacgccuacguguucgugggcaccagcagauacagcaagaaguucaagcccgagaucgccaucagacccaaggugagagaccaggagggcagaaugaacuacuacuggacccugguggagcccggcgacaagaucaccuucgaggccaccggcaaccugguggugcccagauacgccuucgccauggagagaaacgccggcagcggcaucaucaucagcgacacccccauccacgacugcaacaccaccugccagacccccaagggcgccaucaacaccagccugcccuuccagaacauccaccccaucaccaucggcaagugccccaaguacgugaagagcaccaagcugagacuggccaccggccugagaaacgugcccagcauccagagcagaggccuguucggcgccaucgccggcuucaucgagggcggcuggaccggcaugguggacggcugguacggcuaccaccaccagaacgagcagggcagcggcuacgccgccgaccugaagagcacccagaacgccaucgacgagaucaccaacaaggugaacagcgugaucgagaagaugaacacccaguucaccgccgugggcaaggaguucaaccaccuggagaagagaaucgagaaccugaacaagaagguggacgacggcuuccuggacaucuggaccuacaacgccgagcugcuggugcugcuggagaacgagagaacccuggacuaccacgacagcaacgugaagaaccuguacgagaaggugagaagccagcugaagaacaacgccaaggagaucggcaacggcugcuucgaguucuaccacaagugcgacaacaccugcauggagagcgugaagaacggcaccuacgacuaccccaaguacagcgaggaggccaagcugaacagagaggagaucgacggcgugaagcuggagagcaccagaaucuaccagauccuggccaucuacagcaccguggccagcagccuggugcugguggugagccugggcgccaucagcuucuggaugugcagcaacggcagccugcagugcagaaucugcaucuga

SEQ ID NO: 166750 - RNA, 1701 nt, Artificial Sequence; identical to SEQ ID NO: 162494
  derived and/or modified CDS sequence (opt4) from hemagglutinin__InfluenzaA__AEA77299

SEQ ID NO: 166751 - RNA, 1701 nt, Artificial Sequence; identical to SEQ ID NO: 166495
  derived and/or modified CDS sequence (opt4) from hemagglutinin__InfluenzaA__AEB21316

SEQ ID NO: 166752 - RNA, 1701 nt, Artificial Sequence; identical to SEQ ID NO: 166514
  derived and/or modified CDS sequence (opt4) from hemagglutinin__InfluenzaA__AEB21326

SEQ ID NO: 166753 - RNA, 1701 nt, Artificial Sequence; identical to SEQ ID NO: 166495
  derived and/or modified CDS sequence (opt4) from hemagglutinin__InfluenzaA__AEB21338

SEQ ID NO: 166754 - RNA, 1701 nt, Artificial Sequence; identical to SEQ ID NO: 166514
  derived and/or modified CDS sequence (opt4) from hemagglutinin__InfluenzaA__AEB21348

SEQ ID NO: 166755 - RNA, 1701 nt, Artificial Sequence; identical to SEQ ID NO: 163648
  derived and/or modified CDS sequence (opt4) from hemagglutinin__InfluenzaA__AEB40206

SEQ ID NO: 166756 - RNA, 1701 nt, Artificial Sequence; identical to SEQ ID NO: 163648
  derived and/or modified CDS sequence (opt4) from hemagglutinin__InfluenzaA__AEB66895

SEQ ID NO: 166757 - RNA, 1698 nt, Artificial Sequence
  derived and/or modified CDS sequence (opt4) from hemagglutinin__InfluenzaA__AEB71102
auggacgugcccguguucgugcugcugaugcugaccagcaucugcgugcaggccgacagaaucugcgugggcuaccugagcaccaacagcagcgagagaguggacacccugcuggagaacaacgugcccgugaccagcagcguggaccugguggagaccaaccacaccggcaccuacugcagccugggcggcaucagccccgugcaccugggcgacugcagcuucgagggcuggaucgugggcaaccccgccugcgccagcaaccugggcaucagagaguggagcuaccugaucgaggaccccagcgccccccacggccugugcuaccccggcgagcuggacaacaacggcgagcugagacaccuguucagcggcaucagaagcuucagcagaaccgagcugaucgcccccaccagcuggggcgaggugaacgacggcgugaccgccgccugccaggacaagggcgccagcagcuucuacagaaaccuggugugguucguggagagaggcaacaaguaccccgugaucagaagaaccuacaacaacaccaccggcagagacgugcuggugaucuggggcauccaccaccccgugagcaccgacgaggccagaaagcuguacgccaaggacaaccccuacacccuggugagcaccagcagcuggagcagaaaguacaaccuggagaccggcaccagacccggcuacaacggccagaagagcuggaccaagaucuacugguaccugaugcaccccggcgacagcaucagcuucgagagcaacggcggccugcuggcccccaaguacggcuacaucaucgaggaguacggcaagggcagaaucuuccagagcagaaucagaaucgccaagugcaacaccaagugccagaccagcgugggcggcaucaacaccaacaagaccuuccagaacaucgagagaaacgcccugggcgacugccccaaguacaucaagagcggccagcugaagcuggccaccggccugagaaacgugcccgccaucagcaacagaggccuguucggcgccaucgccggcuucaucgagggcggcuggcccggccugaucaacggcugguacggcuuccagcaccagaacgagcagggcaugggcauggccgccgacaaggagagcacccagaaggccaucgaccagaucaccaccaagaucaacaacaucaucgagaagaugaacggcaacuacgacagcaucagaggcgaguucagccagguggagcagagaaucaacaugcuggccgacagaaucgacgacgccgugaccgacguguggagcuacaacgccaagcugcuggugcugcuggagaacgacaagacccuggacaugcacgacgccaacgugagaaaccugcacgaccaggugagaagagugcugagaaccaacgccaucgacgagggcaacggcugcuucgagcugcugcacaagugcaacgacagcugcauggagaccaucagaaacggcaccuacaaccacaucgaguacgaggaggagagcaagcugaagagacaggagaucgagggcaucaagcugaagagcgacgacaacguguacaaggcccugagcaucuacagcugcaucgccagcagcaucgugcuggugggccugauccuggccuucaucaugugggccugcagcagcggcaacugcagauucaacaucugcaucuga

SEQ ID NO: 166758 - RNA, 1698 nt, Artificial Sequence
  derived and/or modified CDS sequence (opt4) from hemagglutinin__InfluenzaA__AEB71896
augaaggugaagcugcuggugcugcugugcaccuucaccgccaccuacgccgacaccaucugcaucggcuaccacgccaacaacagcaccgacaccguggacaccgugcuggagaagaacgugaccgugacccacagcgugaaccugcuggagaacagccacaacggcaagcugugccugcugaagggcaucgccccccugcagcugggcaacugcagcguggccggcuggauccugggcaaccccgagugcgagcugcugaucagcaaggagagcuggagcuacaucguggagaagcccaaccccgagaacggcaccugcuaccccggccacuucgccgacuacgaggagcugagagagcagcugagcagcgugagcagcuucgagagauucgagaucuuccccaaggagagcagcuggcccaaccacaccgugaccggcgugagcgccagcugcagccacaacggcgagagcagcuucuacagaaaccugcuguggcugaccggcaagaacggccuguaccccaaccugagcaagagcuacgccaacaacaaggagaaggaggugcuggugcuguggggcgugcaccacccccccaacaucguggaccagaagacccuguacagaaccgagaacgccuacgugagcguggugagcagccacuacagcagaaaguucacccccgagaucgccaagagacccaaggugagagaccaggagggcagaaucaacuacuacuggacccugcuggagcccggcgacaccaucaucuucgaggccaacggcaaccugaucgcccccagauacgccuucgcccugagcagaggcuucggcagcggcaucaucaacagcaacgcccccaugggcaagugcgacgccaagugccagaccccccagggcgccaucaacagcagccugcccuuccagaacgugcaccccgugaccaucggcgagugccccaaguacgugagaagcgccaagcugagaauggugaccggccugagaaacauccccagcauccagagcagaggccuguucggcgccaucgccggcuucaucgagggcggcuggaccggcaugguggacggcugguacggcuaccaccaccagaacgagcagggcagcggcuacgccgccgaccagaagagcacccagaacgccaucaacggcaucaccaacaaggugaacagcgugaucgagaagaugaacacccaguucaccgccgugggcaaggaguucaacaagcuggagagaagaauggagaaccugaacaagaagguggacgacggcuucaucgacaucuggaccuacaacgccgagcugcuggugcugcuggagaacgagagaacccuggacuuccacgacagcaacgugaagaaccuguacgagaaggugaagagccagcugaagaacaacgccaaggagaucggcaacggcugcuucgaguucuaccacaagugcaacgacgagugcauggagagcgugaagaacggcaccuacgacuaccccaaguacagcgaggagagcaagcugaacaaggagaagaucgacggcgugaagcuggagagcaugggcguguaccagauccuggccaucuacagcaccguggccagcagccuggugcugcuggugagccugggcgccaucagcuucuggaugugcagcaacggcagccugcagugcagaaucugcaucuga

SEQ ID NO: 166759 - RNA, 1701 nt, Artificial Sequence; identical to SEQ ID NO: 162971
  derived and/or modified CDS sequence (opt4) from hemagglutinin__InfluenzaA__AEB71916

SEQ ID NO: 166760 - RNA, 1701 nt, Artificial Sequence; identical to SEQ ID NO: 162494
  derived and/or modified CDS sequence (opt4) from hemagglutinin__InfluenzaA__AEB71925

SEQ ID NO: 166761 - RNA, 1701 nt, Artificial Sequence; identical to SEQ ID NO: 162494
  derived and/or modified CDS sequence (opt4) from hemagglutinin__InfluenzaA__AEB71936

SEQ ID NO: 166762 - RNA, 1701 nt, Artificial Sequence; identical to SEQ ID NO: 162494
  derived and/or modified CDS sequence (opt4) from hemagglutinin__InfluenzaA__AEB71947

SEQ ID NO: 166763 - RNA, 1698 nt, Artificial Sequence; identical to SEQ ID NO: 166032
  derived and/or modified CDS sequence (opt4) from hemagglutinin__InfluenzaA__AEB71958

SEQ ID NO: 166764 - RNA, 1701 nt, Artificial Sequence; identical to SEQ ID NO: 165479
  derived and/or modified CDS sequence (opt4) from hemagglutinin__InfluenzaA__AEB71969

SEQ ID NO: 166765 - RNA, 1701 nt, Artificial Sequence
  derived and/or modified CDS sequence (opt4) from hemagglutinin__InfluenzaA__AEB71980
augaagaccaucaucgcccugagcugcauccugugccugguguucgcccagaagcugcccggcaacgacaacagcaccgccacccugugccugggccaccacgccgugcccaacggcaccaucgugaagaccaucaccaacgaccagaucgaggugaccaacgccaccgagcuggugcagagcagcagcaccggcgagaucugcgacagcccccaccagauccuggacggcgagaacugcacccugaucgacgcccugcugggcgacccccagugcgacggcuuccagaacaagaagugggaccuguucguggagagaagcaaggccuacagcaacugcuaccccuacgacgugcccgacuacgccagccugagaagccugguggccagcagcggcacccuggaguucaacaacgagagcuucaacuggaccggcgugacccagaacggcaccagcagcgccugcaucagaagaagcaacaacagcuucuucagcagacugaacuggcugacccaccugaaguucaaguaccccgcccugaacgugaccaugcccaacaacgagcaguucgacaagcuguacaucuggggcgugcaccaccccggcaccgacaacgaccagaucuuccuguacgcccaggccagcggcagaaucaccgugagcaccaagagaagccagcagaccgugauccccaacaucggcagcagacccagagugagaaacauccccagcagaaucagcaucuacuggaccaucgugaagcccggcgacauccugcugaucaacagcaccggcaaccugaucgcccccagaggcuacuucaagaucagaagcggcaagagcagcaucaugagaagcgacgcccccaucggcaagugcaacagcgagugcaucacccccaacggcagcauccccaacgacaagcccuuccagaacgugaacagaaucaccuacggcgccugccccagauacgugaagcagaacacccugaagcuggccaccggcaugagaaacgugcccgagaagcagaccagaggcaucuucggcgccaucgccggcuucaucgagaacggcugggagggcaugguggacggcugguacggcuucagacaccagaacagcgagggcagaggccaggccgccgaccugaagagcacccaggccgccaucgaccagaucaacggcaagcugaacagacugaucggcaagaccaacgagaaguuccaccagaucgagaaggaguucagcgagguggagggcagaauccaggaccuggagaaguacguggaggacaccaagaucgaccuguggagcuacaacgccgagcugcugguggcccuggagaaccagcacaccaucgaccugaccgacagcgagaugaacaagcuguucgagaagaccaagaagcagcugagagagaacgccgaggacaugggcaacggcugcuucaagaucuaccacaagugcgacaacgccugcaucggcagcaucagaaacggcaccuacgaccacgacguguacagagacgaggcccugaacaacagauuccagaucaagggcguggagcugaagagcggcuacaaggacuggauccuguggaucagcuucgccaucagcugcuuccugcugugcguggcccugcugggcuucaucaugugggccugccagaagggcaacaucagaugcaacaucugcaucuga

SEQ ID NO: 166766 - RNA, 1698 nt, Artificial Sequence; identical to SEQ ID NO: 163676
  derived and/or modified CDS sequence (opt4) from hemagglutinin__InfluenzaA__AEB71992

SEQ ID NO: 166767 - RNA, 1698 nt, Artificial Sequence; identical to SEQ ID NO: 163676
  derived and/or modified CDS sequence (opt4) from hemagglutinin__InfluenzaA__AEC13313

SEQ ID NO: 166768 - RNA, 1701 nt, Artificial Sequence
  derived and/or modified CDS sequence (opt4) from hemagglutinin__InfluenzaA__AEC46553
augaaggccauccugguggugcugcuguacaccuucgccaccgccaacgccgacacccugugcaucggcuaccacgccaacaacagcaccgacaccguggacaccgugcuggagaagaacgugaccgugacccacagcgugaaccugcuggaggacaagcacaacggcaagcugugcaagcugagaggcguggccccccugcaccugggcaagugcaacaucgccggcuggauccugggcaaccccgagugcgagagccugagcaccgccagcagcuggagcuacaucguggagaccagcagcagcgacaacggcaccugcuaccccggcgacuucaucgacuacgaggagcugagagagcagcugagcagcgugagcagcuucgagagauucgagaucuuccccaagaccagcagcuggcccaaccacgaccccaacaagggcgugaccgccgccugcccccacgccggcgccaagagcuucuacaagaaccugaucuggcuggugaagaagggcaacagcuaccccaagcugagcaccagcuacaucaacgacaagggcaaggaggugcuggugcuguggggcauccaccaccccagcaccagcgccgaccagcagagccuguaccagaacgccgacgccuacgccuucgugggcaccagcagauacagcaagaaguucaagcccgagaucgccaucagacccaaggugagagaccaggagggcagaaugaacuacuacuggacccugguggagcccggcgacaagaucaccuucgaggccaccggcaaccugguggugcccagauacgccuucgccauggagagaaacgccggcagcggcaucaucaucagcgacaccagcgugcacgacugcaacaccaccugccagacccccaagggcgccaucaacaccagccugcccuuccagaacgugcaccccaucaccaucggcaagugccccaaguacgugaagagcaccaagcugagacuggccaccggccugagaaacgugcccagcauccagagcagaggccuguucggcgccaucgccggcuucaucgagggcggcuggaccggcaugguggacggcugguacggcuaccaccaccagaacgagcagggcagcggcuacgccgccgaccugaagagcacccagaacgccuucgacaagaucaccaacaaggugaacagcgugaucgagaagaugaacacccaguucaccgccgugggcaaggaguucaaccaccuggagaagagaaucgagaaccugaacaagaagguggacgacggcuuccuggacaucuggaccuacaacgccgagcugcuggugcugcuggagaacgagagaacccuggacuaccacgacagcaacgugaagaaccuguacgagaaggugagaagccagcugaagaacaacgccaaggagaucggcaacggcugcuucgaguucuaccacaagugcgacaacaccugcauggagagcgugaagaacggcaccuacgacuaccccaaguacagcgaggaggccaagcugaacagagaggagaucgacggcgugaagcuggagagcaccagaaucuaccagauccuggccaucuacagcaccguggccagcagccuggugcugguggugagccugggcgccaucagcuucuggaugugcagcaacggcagccugcagugcagaaucugcaucuga

SEQ ID NO: 166769 - RNA, 1701 nt, Artificial Sequence
  derived and/or modified CDS sequence (opt4) from hemagglutinin__InfluenzaA__AEC46555
augaaggccauccugguggugcugcuguacaccuucgccaccgccaacgccgacacccugugcaucggcuaccacgccaacaacagcaccgacaccguggacaccgugcuggagaagaacgugaccgugacccacagcgugaaccugcuggaggacaagcacaacggcaagcugugcaagcugagaggcguggccccccugcaccugggcaagugcaacaucgccggcuggauccugggcaaccccgagugcgagagccugagcaccgccagcagcuggagcuacaucguggagaccagcagcagcgacaacggcaccugcuaccccggcgacuucaucgacuacgaggagcugagagagcagcugagcagcgugagcagcuucgagagauucgagaucuuccccaagaccagcagcuggcccaaccacgaccccaacaagggcgugaccgccgccugcccccacgccggcgccaagagcuucuacaagaaccugaucuggcuggugaagaagggcaacagcuaccccaagcugagcaccagcuacaucaacgacaagggcaagaaggugcuggugcuguggggcauccaccaccccagcaccagcgccgaccagcagagccuguaccagaacgccgacgccuacgccuucgugggcaccagcagauacagcaagaaguucaagcccgagaucgccaucagacccaaggugagagaccaggagggcagaaugaacuacuacuggacccugguggagcccggcgacaagaucaccuucgaggccaccggcaaccugguggugcccagauacgccuucgccauggagagaaacgagggcagcggcaucaucaucagcgacaccagcgugcacgacugcaacaccaccugccagacccccaagggcgccaucaacaccagccugcccuuccagaacgugcaccccaucaccaucggcaagugccccaaguacgugaagagcaccaagcugagacuggccaccggccugagaaacgugcccagcauccagagcagaggccuguucggcgccaucgccggcuucaucgagggcggcuggaccggcaugguggacggcugguacggcuaccaccaccagaacgagcagggcagcggcuacgccgccgaccugaagagcacccagaacgccuucgacaagaucaccaacaaggugaacagcgugaucgagaagaugaacacccaguucaccgccgugggcaaggaguucaaccaccuggagaagagaaucgagaaccugaacaagaagguggacgacggcuuccuggacaucuggaccuacaacgccgagcugcuggugcugcuggagaacgagagaacccuggacuaccacgacagcaacgugaagaaccuguacgagaaggugagaagccagcugaagaacaacgccaaggagaucggcaacggcugcuucgaguucuaccacaagugcgacaacaccugcauggagagcgugaagaacggcaccuacgacuaccccaaguacagcgaggaggccaagcugaacagagaggagaucgacggcgugaagcuggagagcaccagaaucuaccagauccuggccaucuacagcaccguggccagcagccuggugcugguggugagccugggcgccaucagcuucuggaugugcagcaacggcagccugcagugcagaaucugcaucuga

SEQ ID NO: 166770 - RNA, 1701 nt, Artificial Sequence; identical to SEQ ID NO: 166768
  derived and/or modified CDS sequence (opt4) from hemagglutinin__InfluenzaA__AEC46557

SEQ ID NO: 166771 - RNA, 1701 nt, Artificial Sequence; identical to SEQ ID NO: 162716
  derived and/or modified CDS sequence (opt4) from hemagglutinin__InfluenzaA__AEC53259

SEQ ID NO: 166772 - RNA, 1701 nt, Artificial Sequence
  derived and/or modified CDS sequence (opt4) from hemagglutinin__InfluenzaA__AEC53269
augaaggccauccugguggugcugcuguacaccuucgccaccgccaacgccgacacccugugcaucggcuaccacgccaacaacagcaccgacaccguggacaccgugcuggagaagaacgugaccgugacccacagcgugaaccugcuggaggacaagcacaacggcaagcugugcaagcugagaggcguggccccccugcaccugggcaagugcaacaucgccggcuggauccugggcaaccccgagugcgagagccugagcaccgccagcagcuggagcuacaucguggagaccagcagcagcgacaacggcaccugcuaccccggcgacuucaucgacuacgaggagcugagagagcugcugagcagcgugagcagcuucgagagauucgagaucuuccccaagaccagcagcuggcccaaccacgacagcaacaagggcgugaccgccgccugcccccacgccggcgccaagagcuucuacaagaaccugaucuggcuggugaagaagggcaacagcuaccccaagcugagcaagagcuacaucaacgacaagggcaaggaggugcuggugcuguggggcauccaccaccccagcaccagcgccgaccagcagagccuguaccagaacgccgacgccuacguguucgugggcagcagcagauacagcaagaaguucaagcccgagaucgccaucagacccaaggugagagaccaggagggcagaaugaacuacuacuggacccugguggagcccggcgacaagaucaccuucgaggccaccggcaaccugguggugcccagauacgccuucgccauggagagaaacgccggcagcggcaucaucaucagcgacacccccgugcacgacugcaacaccaccugccagacccccaagggcgccaucaacaccagccugcccuuccagaacauccaccccaucaccaucggcaagugccccaaguacgugaagagcaccaagcugagacuggccaccggccugagaaacauccccagcauccagagcagaggccuguucggcgccaucgccggcuucaucgagggcggcuggaccggcaugguggacggcugguacggcuaccaccaccagaacgagcagggcagcggcuacgccgccgaccugaagagcacccagaacgccaucgacgagaucaccaacaaggugaacagcgugaucgagaagaugaacacccaguucaccgccgugggcaaggaguucaaccaccuggagaagagaaucgagaaccugaacaagaagguggacgacggcuuccuggacaucuggaccuacaacgccgagcugcuggugcugcuggagaacgagagaacccuggacuaccacgacagcaacgugaagaaccuguacgagaaggugagaagccagcugaagaacaacgccaaggagaucggcaacggcugcuucgaguucuaccacaagugcgacaacaccugcauggagagcgugaagaacggcaccuacgacuaccccaaguacagcgaggaggccaagcugaacagagaggagaucgacggcgugaagcuggagagcaccagaaucuaccagauccuggccaucuacagcaccguggccagcagccuggugcugguggugagccugggcgccaucagcuucuggaugugcagcaacggcagccugcagugcagaaucugcaucuga

SEQ ID NO: 166773 - RNA, 1701 nt, Artificial Sequence; identical to SEQ ID NO: 163459
  derived and/or modified CDS sequence (opt4) from hemagglutinin__InfluenzaA__AEC53279

SEQ ID NO: 166774 - RNA, 1701 nt, Artificial Sequence; identical to SEQ ID NO: 162716
  derived and/or modified CDS sequence (opt4) from hemagglutinin__InfluenzaA__AEC53289

SEQ ID NO: 166775 - RNA, 1701 nt, Artificial Sequence; identical to SEQ ID NO: 162716
  derived and/or modified CDS sequence (opt4) from hemagglutinin__InfluenzaA__AEC53299

SEQ ID NO: 166776 - RNA, 1701 nt, Artificial Sequence; identical to SEQ ID NO: 162909
  derived and/or modified CDS sequence (opt4) from hemagglutinin__InfluenzaA__AEC53327

SEQ ID NO: 166777 - RNA, 1701 nt, Artificial Sequence
  derived and/or modified CDS sequence (opt4) from hemagglutinin__InfluenzaA__AEC53347
augaaggccauccugguggugcugcuguacaccuucgccaccgccaacgccgacacccugugcaucggcuaccacgccaacaacagcaccgacaccguggacaccgugcuggagaagaacgugaccgugacccacagcgugaaccugcuggaggacaagcacaacggcaagcugugcaagcugagaggcguggccccccugcaccugggcaagugcaacaucgccggcuggauccugggcaaccccgagugcgagagccugagcaccgccagcagcuggagcuacaucguggagaccagcagcagcgacaacggcaccugcuaccccggcgacuucaucgacuacgaggagcugagagagcagcugagcagcgugagcagcuucgagagauucgagaucuuccccaagaccagcagcuggcccaaccacgacagcaacaagggcgugaccgccgccugcccccacgccggcgccaagagcuucuacaagaaccugaucuggcuggugaagaagggcaacagcuaccccaagcugagcaagagcuacaucaacgacaagggcaaggaggugcuggugcuguggggcauccaccaccccagcaccagcgccgaccagcagagccuguaccagaacgccgacgccuacguguucgugggcagcagcagauacagcaagaaguucaagcccgagaucgccaucagacccaaggugagagaccaggagggcagaaugaacuacuacuggacccugaucgagcccggcgacaagaucaccuucgaggccaccggcaaccugguggugcccagauacgccuucgccauggagagaaacgccggcagcggcaucaucaucagcgacacccccgugcacgacugcaacaccaccugccagacccccaagggcgccaucaacaccagccugcccuuccagaacauccaccccaucaccaucggcaagugccccaaguacgugaagagcaccaagcugagacuggccaccggccugagaaacgugcccagcauccagagcagaggccuguucggcgccaucgccggcuucaucgagggcggcuggaccggcaugguggacggcugguacggcuaccaccaccagaacgagcagggcagcggcuacgccgccgaccugaagagcacccagaacgccaucgacgagaucaccaacaaggugaacagcgugaucgagaagaugaacacccaguucaccgccgugggcaaggaguucaaccaccuggagaagagaaucgagaaccugaacaagaagguggacgacggcuuccuggacaucuggaccuacaacgccgagcugcuggugcugcuggagaacgagagaacccuggacuaccacgacagcaacgugaagaaccuguacgagaaggugagaagccagcugaagaacaacgccaaggagaucggcaacggcugcuucgaguucuaccacaagugcgacaacaccugcauggagagcgugaagaacggcaccuacgacuaccccaaguacagcgaggaggccaagcugaacagagaggagaucgacggcgugaagcuggagagcaccagaaucuaccagauccuggccaucuacagcaccguggccagcagccuggugcugguggugagccugggcgccaucagcuucuggaugugcagcaacggcagccugcagugcagaaucugcaucuga

SEQ ID NO: 166778 - RNA, 1701 nt, Artificial Sequence
  derived and/or modified CDS sequence (opt4) from hemagglutinin__InfluenzaA__AEC53404
augaaggccauccugguggugcugcuguacaccuucgccaccgccaacgccgacacccugugcaucggcuaccacgccaacaacagcaccgacaccguggacaccgugcuggagaagaacgugaccgugacccacagcgugaacauccuggaggacaagcacaacggcaagcugugcaagcugagaggcguggccccccugcaccugggcaagugcaacaucgccggcuggauccugggcaaccccgagugcgagagccugagcaccgccagcagcuggagcuacaucguggagaccagcagcagcgacaacggcaccugcuaccccggcgacuucaucgacuacgaggagcugagagagcagcugagcagcgugagcagcuucgagagauucgagaucuuccccaagaccagcagcuggcccaaccacgacagcaacaagggcaucaccgccgccugcccccacgccggcgccaagagcuucuacaagaaccugaucuggcuggugaagaagggcaacagcuaccccaagcugagcaagagcuacaucaacgacaagggcaaggaggugcuggugcuguggggcauccaccaccccagcaccagcgccgaccagcagagccuguaccagaacgccgacgccuacguguucgugggcagcagcagauacagcaagaaguucaagcccgagaucgccaucagacccaaggugagagaccaggagggcagaaugaacuacuacuggacccugguggagcccggcgacaagaucaccuucgaggccaccggcaaccugguggugcccagauacgccuucgccauggagagaaacgccggcagcggcaucaucaucagcgacacccccgugcacgacugcaacaccaccugccagacccccaagggcgccaucaacaccagccugcccuuccagaacauccaccccaucaccaucggcaagugccccaaguacgugaagagcaccaagcugagacuggccaccggccugagaaacgugcccagcauccagagcagaggccuguucggcgccaucgccggcuucaucgagggcggcuggaccggcaugguggacggcugguacggcuaccaccaccagaacgagcagggcagcggcuacgccgccgaccugaagagcacccagaacgccaucgacgagaucaccaacaaggugaacagcgugaucgagaagaugaacacccaguucaccgccgugggcaaggaguucaaccaccuggagaagagaaucgagaaccugaacaagaagguggacgacggcuuccuggacaucuggaccuacaacgccgagcugcuggugcugcuggagaacgagagaacccuggacuaccacgacagcaacgugaagaaccuguacgagaaggugagaagccagcugaagaacaacgccaaggagaucggcaacggcugcuucgaguucuaccacaagugcgacaacaccugcauggagagcgugaagaacggcaccuacgacuaccccaaguacagcgaggaggccaagcugaacagagaggagaucgacggcgugaagcuggagagcaccagaaucuaccagauccuggccaucuacagcaccguggccagcagccuggugcugguggugagccugggcgccaucagcuucuggaugugcagcaacggcagccugcagugcagaaucugcaucuga

SEQ ID NO: 166779 - RNA, 1701 nt, Artificial Sequence; identical to SEQ ID NO: 162716
  derived and/or modified CDS sequence (opt4) from hemagglutinin__InfluenzaA__AEC53414

SEQ ID NO: 166780 - RNA, 1701 nt, Artificial Sequence
  derived and/or modified CDS sequence (opt4) from hemagglutinin__InfluenzaA__AEE27177
augaagaccauccugguggugcugcuguacaccuucgccaccgccaacgccgacacccugugcaucggcuaccacgccaacaacagcaccgacaccguggacaccgugcuggagaagaacgugaccgugacccacagcgugaacauccuggaggacaagcacaacggcaagcugugcaagcugagaggcguggccccccugcaccugggcaagugcaacaucgccggcuggauccugggcaaccccgagugcgagagccugagcaccgccagcagcuggagcuacaucguggagaccagcagcagcgacaacggcaccugcuaccccggcgacuucaucgacuacgaggagcugagagagcagcugagcagcgugagcagcuucgagagauucgagaucuuccccaagaccagcagcuggcccaaccacgacagcaacaagggcgugaccgccgccugcccccacgccggcgccaagagcuucuacaagaaccugaucuggcuggugaagaagggcaacagcuaccccaagcugagcaagagcuacaucaacgacaagagaaaggaggugcuggugcuguggggcauccaccaccccagcaccagcgccgaccagcagagccuguaccagaacgccgacgccuacguguucgugggcagcagcagauacagcaagaaguucaagcccgagaucgccaucagacccaaggugagagaccaggagggcagaaugaacuacuacuggacccugguggagcccggcgacaagaucaccuucgaggccaccggcaaccugguggugcccagauacgccuucgccauggagagaaacgccggcagcggcaucaucaucagcgacacccccgugcacgacugcaacaccaccugccagacccccaagggcgccaucaacaccagccugcccuuccagaacauccaccccaucaccaucggcaagugccccaaguacgugaagagcaccaagcugagacuggccaccggccugagaaacgugcccagcauccagagcagaggccuguucggcgccaucgccggcuucaucgagggcggcuggaccggcaugguggacggcugguacggcuaccaccaccagaacgagcagggcagcggcuacgccgccgaccugaagagcacccagaacgccaucgacgagaucaccaacaaggugaacagcgugaucgagaagaugaacacccaguucaccgccgugggcaaggaguucaaccaccuggagaagagaaucgagaaccugaacaagaagguggacgacggcuuccuggacaucuggaccuacaacgccgagcugcuggugcugcuggagaacgagagaacccuggacuaccacgacagcaacgugaagaaccuguacgagaaggugagaagccagcugaagaacaacgccaaggagaucggcaacggcugcuucgaguucuaccacaagugcgacaacaccugcauggagagcgugaagaacggcaccuacgacuaccccaaguacagcgaggaggccaagcugaacagagaggagaucgacggcgugaagcuggagagcaccagaaucuaccagauccuggccaucuacagcaccguggccagcagccuggugcugguggugagccugggcgccaucagcuucuggaugugcagcaacggcagccugcagugcagaaucugcaucuga

SEQ ID NO: 166781 - RNA, 1701 nt, Artificial Sequence; identical to SEQ ID NO: 164501
  derived and/or modified CDS sequence (opt4) from hemagglutinin__InfluenzaA__AEE27187

SEQ ID NO: 166782 - RNA, 1701 nt, Artificial Sequence
  derived and/or modified CDS sequence (opt4) from hemagglutinin__InfluenzaA__AEE27207
augaaggccauccugguggugcugcuguacaccuucgccaccgccaacgccgacacccugugcaucggcuaccacgccaacaacagcaccgacaccguggacaccgugcuggagaagaacgugaccgugacccacagcgugaaccugcuggaggacaagcacaacggcaagcugugcaagcugagaggcguggccccccugcaccugggcaagugcaacaucgccggcuggauccugggcaaccccgagugcgagagccugagcaccgccagcagcuggagcuacaucguggagaccagcagcagcgacaacggcaccugcuaccccggcgacuucaucgacuacgaggagcugagagagcagcugagcagcgugagcagcuucgagagauucgagaucuuccccaagaccagcagcuggcccaaccacgacagcaacaagggcgugaccgccgccugcccccacgccggcgccaagagcuucuacaagaaccugaucuggcuggugaagaagggcaacagcuaccccaagcugagcaagagcuacaucaacgacaagggcaaggaggugcuggugcuguggggcauccaccaccccagcaccagcgccgaccagcagagccuguaccagaacgccgacgccuacguguucgugggcaccagcagauacagcaagaaguucaagcccgagaucgccaucagacccaaggugagagaccaggagggcagaaugaacuacuacuggacccugguggagcccggcgacaagaucaccuucgaggccaccggcaaccugguggugcccagauacgccuucgccauggagagaaacgccggcagcggcaucaucaucagcgacacccccgugcacgacugcaacaccaccugccagacccccaagggcgccaucaacaccagccugcccuuccagaacauccaccccaucaccaucggcaagugccccaaguacgugaagagcaccaagcugagacuggccaccggccugagaaacgugcccagcauccagagcagaggccuguucggcgccaucgccggcuucaucgagggcggcuggaccggcaugguggacggcugguacggcuaccaccaccagaacgagcagggcagcggcuacgccgccgaccugaagagcacccagaacgccaucgacgagaucaccaacaaggugaacagcgugaucgagaagaugaacacccaguucaccgccgugggcaaggaguucaaccaccuggagaagagaaucgagaaccugaacaagaagguggacgacggcuuccuggacaucuggaccuacaacgccgagcugcuggugcugcuggagaacgagagaacccuggacuaccacgacagcaaggugaagaaccuguacgagaaggugagaagccagcugaagaacaacgccaaggagaucggcaacggcugcuucgaguucuaccacaagugcgacaacaccugcauggagagcgugaagaacggcaccuacgacuaccccaaguacagcgaggaggccaagcugaacagagaggagaucgacggcgugaagcuggagagcaccagaaucuaccagauccuggccaucuacagcaccguggccagcagccuggugcugguggugagccugggcgccaucagcuucuggaugugcagcaacggcagccugcagugcagaaucugcaucuga

SEQ ID NO: 166783 - RNA, 1701 nt, Artificial Sequence
  derived and/or modified CDS sequence (opt4) from hemagglutinin__InfluenzaA__AEG64752
augaaggccauccugguggugcugcuguacaccuucgccaccgccaacgccgacacccugugcaucggcuaccacgccaacaacagcaccgacaccguggacaccgugcuggagaagaacgugaccgugacccacagcgugaaccugcuggaggacaagcacaacggcaagcugugcaagcugagaggcguggccccccugcaccugggcaagugcaacaucgccggcuggauccugggcaaccccgagugcgagagccugagcaccgccagcagcuggagcuacaucguggagaccagcagcagcgacaacggcaccugcuaccccggcgacuucaucgacuacgaggagcugagagagcagcugagcagcgugagcagcuucgagagauucgagaucuuccccaagaccagcagcuggcccaaccacgacagcaacaagggcgugaccgccgccugcccccacgccggcgccaagagcuucuacaagaaccugaucuggcuggugaagaagggcaacagcuaccccaagcugagcaagagcuacaucaacgacaagggcaaggaggugcuggugcuguggggcauccaccaccccagcaccagcgccgaccagcagagccuguaccagaacgccgacgccuacguguucgugggcagcagcagauacagcaagaaguucaagcccgagaucgccaucagacccaaggugagagaccaggagggcagaaugaacuacuacuggacccugguggagcccggcgacaagaucaccuucgaggccaccggcaaccugguggugcccagauacgccuucgccauggagagaaacgccggcagcggcaucaucaucagcgacacccccgugcacgacugcaacaccaccugccagacccccaagggcgccaucaacaccagccugcccuuccagaacauccaccccaucaccaucggcaagugccccaaguacgugagaagcaccaagcugagacuggccaccggccugagaaacgugcccagcauccagagcagaggccuguucggcgccaucgccggcuucaucgagggcggcuggaccggcaugguggacggcugguacggcuaccaccaccagaacgagcagggcagcggcuacgccgccgaccugaagagcacccagaacgccaucgacgagaucaccaacaaggugaacagcgugaucgagaagaugaacacccaguucaccgccgugggcaaggaguucaaccaccuggagaagagaaucgagaaccugaacaagaagguggacgacggcuuccuggacaucuggaccuacaacgccgagcugcuggugcugcuggagaacgagagaacccuggacuaccacgacagcaacgugaagaaccuguacgagaaggugagaagacagcugaagaacaacgccaaggagaucggcaacggcugcuucgaguucuaccacaagugcgacaacaccugcauggagagcgugaagaacggcaccuacgacuaccccaaguacagcgaggaggccaagcugaacagagaggagaucgacggcgugaagcuggagagcaccagaaucuaccagauccuggccaucuacagcaccguggccagcagccuggugcugguggugagccugggcgccaucagcuucuggaugugcagcaacggcagccugcagugcagaaucugcaucuga

SEQ ID NO: 166784 - RNA, 1701 nt, Artificial Sequence
  derived and/or modified CDS sequence (opt4) from hemagglutinin__InfluenzaA__AEG64762
augaaggccagacugcuggugcugcugugcgcccuggccgccaccgacgccgacaccaucugcaucggcuaccacgccaacaacagcaccgacaccguggacacccugcuggagaagaacgugaccgugacccacagcgugaaccugcuggaggacagccacaacggcaagcugugcaagcugaagggcaucgccccccugcagcugggcaagugcaacaucgccggcuggcugcugggcaaccccgagugcgacagccugcugcccgccagaagcuggagcuacaucguggagacccccaacagcgagaacggcgccugcuaccccggcgacuucaucgacuacgaggagcugagagagcagcugagcaccgugagcagccuggagagauucgagaucuuccccaaggagagcagcuggcccaaccacaacacccugaagggcgugaccgugagcugcagccacggcggcaagagcagcuucuacagaaaccugcuguggcugaccaagaccggcgacagcuaccccaagcugaacaacagcuacgugaacaacaagggcaaggaggugcuggugcuguggggcgugcaccaccccagcagcagcaacgagcagcagagccuguaccacaacgugaacgccuacgugagcguggugagcagcaacuacaacagaagauucacccccgagaucgccgccagacccaaggugagagaccagcccggcagaaugaacuacuacuggacccugcuggagcccggcgacaccauccuguucgaggccaccggcaaccugaucgcccccugguacgccuucgcccugagcagaggcuucggcagcggcaucaucaccagcaacgccagcaugcacgagugcaacaccaagugccagaccccccagggcgccaucaacagcagccugcccuuccagaacauccaccccgugaccaucggcgagugccccaaguacgugagaagcaccaagcugagaauggugaccggccugagaaacauccccagcauccagagcagaggccuguucggcgccaucgccggcuucaucgagggcggcuggaccggcaugaucgacggcugguacggcuaccaccaccagaacgagcagggcagcggcuacgccgccgaccagaagagcacccagaacgccaucaacggcaucaccaacaaggugaacagcgugaucgagaagaugaacacccaguucaccgccgugggcaaggaguucaacaaccuggagaagagaauggagaaccugaacaagaagguggacgacggcuuccuggacaucuggaccuacaacgccgagcugcuggugcugcuggagaacgagagaacccuggacuuccacgaccugaacgugaagaaccuguacgagaaggugaagagccagcugaagaacaacgccaaggagaucggcaacggcugcuucgaguucuaccacaagugcgacaacgagugcauggagagcgugagagacggcaccuacgacuaccccaaguacagcgaggagagcaagcugaacagagagaagaucgacggcgugaagcuggagagcaugggcguguaccagauccuggccaucuacagcaccguggccagcagccuggugcugcuggugagccugggcgccaucagcuucuggaugugcagcaacggcagccugcagugcagaaucugcaucuga

SEQ ID NO: 166785 - RNA, 1701 nt, Artificial Sequence; identical to SEQ ID NO: 162729
  derived and/or modified CDS sequence (opt4) from hemagglutinin__InfluenzaA__AEG64784

SEQ ID NO: 166786 - RNA, 1701 nt, Artificial Sequence
  derived and/or modified CDS sequence (opt4) from hemagglutinin__InfluenzaA__AEG64834
augaagaccaucaucgcccugagcuacauccugugccugguguucgcccagaagcugcccggcaacgacaacagcaccgccacccugugccugggccaccacgccgugcccaacggcaccaucgugaagaccaucaccaacgaccagaucgaggugaccaacgccaccgagcuggugcagaacagcagcgccggcgagaucugcgacagcccccaccagauccuggacggcgagaacugcacccugaucgacgcccugcugggcgacccccagugcgacggcuuccagaacaagaagugggaccuguucguggagagaagcagagccuacagcaacugcuaccccuacgacgugcccgacuacgccagccugagaagccugguggccagcagcggcacccuggaguucaacaacgagagcuucaacuggaccggcgugacccagaacggcaccagcagcgccugcaucagaagaagcaacaacagcuucuucagcagacugaacuggcugacccaccugaacuucaaguaccccgcccugaacgugaccaugcccaacaacgagcaguucgacaagcuguacaucuggggcgugcaccaccccggcaccgacaaggaccagaucuuccuguacgcccaggccagcggcagaaucaccgugagcaccaagagaagccagcaggccgugauccccaacaucggcagcagacccagagugagaaacauccccagcagaaucagcaucuacuggaccaucgugaagcccggcgacauccugcugaucaacagcaccggcaaccugaucgcccccagaggcuacuucaagaucagaagcggcaagagcagcaucaugagaagcgacgcccccaucggcaagugcaacagcgagugcaucacccccaacggcagcauccccaacgacaagcccuuccagaacgugaacagaaucaccuacggcgccugccccagauacgugaagcagagcacccugaagcuggccaccggcaugagaaacgugcccgagaagcagaccagaggcaucuucggcgccaucgccggcuucaucgagaacggcugggagggcaugguggacggcugguacggcuucagacaccagaacagcgagggcagaggccaggccgccgaccugaagagcacccaggccgccaucgaccagaucaacggcaagcugaacagacugaucggcaagaccaacgagaaguuccaccagaucgagaaggaguucagcgagguggagggcagaauccaggaccuggagaaguacguggaggacaccaagaucgaccuguggagcuacaacgccgagcugcugguggcccuggagaaccagcacaccaucgaccugaccgacagcgagaugaacaagcuguucgagaagaccaagaagcagcugagagagaacgccgaggacaugggcaacggcugcuucaagaucuaccacaagugcgacaacgccugcaucggcagcaucagaaacggcaccuacgaccacgacguguacagagacgaggcccugaacaacagauuccagaucaagggcguggagcugaagagcggcuacaaggacuggauccuguggaucagcuucgccaucagcugcuuccugcugugcguggcccugcugggcuucaucaugugggccugccagaagggcaacaucagaugcaacaucugcaucuga

SEQ ID NO: 166787 - RNA, 1701 nt, Artificial Sequence
  derived and/or modified CDS sequence (opt4) from hemagglutinin__InfluenzaA__AEG64845
augaagaccaucaucgcccugagcuacauccugugccugguguucgcccagaagcugcccggcaacgacaacagcaccgccacccugugccugggccaccacgccgugcccaacggcaccaucgugaagaccaucaccaacgaccagaucgaggugaccaacgccaccgagcuggugcagaacagcagcaccggcgagaucugcgacagcccccaccagauccuggacggcgagaacugcacccugaucgacgcccugcugggcgacccccagugcgacggcuuccagaacaagaagugggaccuguucguggagagaagcaaggccuacagcaacugcuaccccuacgacgugcccgacuacgccagccugagaagccugguggccagcagcggcacccuggaguucaacaacgagagcuucaacuggaccggcgugacccagaacggcaccagcagcgccugcaucagaagaagcaacaacagcuucuucagcagacugaacuggcugacccaccugaacuucaaguaccccgcccugaacgugaccaugcccaacaacgagcaguucgacaagcuguacaucuggggcgugcaccaccccggcaccgacaaggaccagaucuuccuguacgcccaggccagcggcagaaucaccgugagcaccaagagaagccagcagaccgugauccccaacaucggcagcagacccagagugagaaacauccccagcagaaucagcaucuacuggaccaucgugaagcccggcgacauccugcugaucaacagcaccggcaaccugaucgcccccagaggcuacuucaagaucagaagcggcaagagcagcaucaugagaagcgacgcccccaucggcaagugcaacagcgagugcaucacccccaacggcagcauccccaacgacaagcccuuccagaacgugaacagaaucaccuacggcgccugccccagauacgugaagcagaacacccugaagcuggccaccggcaugagaaacgugcccgagaagcagaccagaggcaucuucggcgccaucgccggcuucaucgagaacggcugggagggcaugguggacggcugguacggcuucagacaccagaacagcgagggcagaggccaggccgccgaccugaagagcacccaggccgccaucgaccagaucaacggcaagcugaacagacugaucggcaagaccaacgagaaguuccaccagaucgagaaggaguucagcgagguggagggcagaauccaggaccuggagaaguacguggaggacaccaagaucgaccuguggagcuacaacgccgagcugcugguggcccuggagaaccagcacaccaucgaccugaccgacagcgagaugaacaagcuguucgagaagaccaagaagcagcugagagagaacgccgaggacaugggcaacggcugcuucaagaucuaccacaagugcgacaacgccugcaucggcagcaucagaaacggcaccuacgaccacgacguguacagagacgaggcccugaacaacagauuccagaucaagggcguggagcugaagagcggcuacaaggacuggauccuguggaucagcuucgccaucagcugcuuccugcugugcguggcccugcugggcuucaucaugugggccugccagaagggcaacaucagaugcaacaucugcaucuga

SEQ ID NO: 166788 - RNA, 1701 nt, Artificial Sequence
  derived and/or modified CDS sequence (opt4) from hemagglutinin__InfluenzaA__AEG64856
augaagaccaucaucgcccugagcuacauccugugccugguguucgcccagaagcugcccggcaacgacaacagcaccgccacccugugccugggccaccacgccgugcccaacggcacccuggugaagaccaucaccaacgaccagaucgaggugaccaacgccaccgagcuggugcagagcagcagcaccggcagaaucugcgacagcccccaccagauccuggacggcgagaacugcacccugaucgacgcccugcugggcgacccccacugcgacggcuuccagaacaaggagugggaccuguucguggagagaagcaaggccuacagcaacugcuaccccuacgacgugcccgacuacgccagccugagaagccugguggccagcagcggcacccuggaguucaacaacgagagcuucaacuggaccggcguggcccagaacggcaccagcagcgccugcaagagaagaagcaacaagagcuucuucagcagacugaacuggcugcaccagcugaaguacaaguaccccgcccugaacgugaccaugcccaacaacgagaaguucgacaagcuguacaucuggggcgugcaccaccccagcaccgacagcgaccagaucagccuguacgcccaggccagcggcagagugaccgugagcaccaagagaagccagcagaccgugauccccaacaucggcagcagacccugggugagaggcgugagcagcagaaucagcaucuacuggaccaucgugaagcccggcgacauccugcugaucaacagcaccggcaaccugaucgcccccagaggcuacuucaagaucagaagcggcaagagcagcgugaugagaagcgacgccagcaucggcaagugcaacagcgagugcaucacccccaacggcagcauccccaacgacaagcccuuccagaacgugaacagaaucaccuacggcgccugccccagauacgugaagcagaacacccugaagcuggccaccggcaugagaaacgugcccgagaagcagaccagaggcaucuucggcgccaucgccggcuucaucgagaacggcugggagggcaugguggacggcugguacggcuucagacaccagaacagcgagggcaccggccaggccgccgaccugaagagcacccaggccgccaucaaccagaucaacggcaagcugaacagacugaucgagaagaccaacgagaaguuccaccagaucgagaaggaguucagcgagguggagggcagaauccaggaccuggagaaguacguggaggacaccaagaucgaccuguggagcuacaacgccgagcugcugguggcccuggagaaccagcacaccaucgaccugaccgacagcgagaugaacaagcuguucgagagaaccaagaagcagcugagagagaacgccgaggacaugggcaacggcugcuucaagaucuaccacaagugcgacaacgccugcaucgagagcaucagaaacggcaccuacgaccacgacguguacagagacgaggcccugaacaacagauuccagaucaagggcguggagcugaagagcggcuacaaggacuggauccuguggaucagcuucgccaucagcugcuuccugcugugcguggugcugcugggcuucaucaugugggccugccagaagggcaacaucagaugcaacaucugcaucuga

SEQ ID NO: 166789 - RNA, 1701 nt, Artificial Sequence; identical to SEQ ID NO: 160132
  derived and/or modified CDS sequence (opt4) from hemagglutinin__InfluenzaA__AEG64867

SEQ ID NO: 166790 - RNA, 1701 nt, Artificial Sequence
  derived and/or modified CDS sequence (opt4) from hemagglutinin__InfluenzaA__AEG64878
augaagaccaucaucgcccugagcuacauccugugccugguguucgcccagaagcugcccgugaacgacaacagcaccgccacccugugccugggccaccacgccgugcccaacggcacccuggugaagaccaucaccaacgaccacaucgaggugaccaacgccaccgagcuggugcagagcagcagcaccggcagaaucugcgacagcccccaccagauccuggacggcgagaacugcacccugaucgacgcccugcugggcgacccccacugcgacggcuuccagaacaaggagugggaccuguucguggagagaagcaccgccuacagcaacugcuaccccuacgacgugcccgacuacgccagccugagaagccugguggccagcagcggcacccuggaguucaacaacgagagcuucaacuggaccggcguggcccagaacggcaccagcagcgccugcaagagaagaagcaucaagagcuucuucagcagacugaacuggcugcaccagcugaaguacaaguaccccgcccugaacgugaccaugcccaacaacgagaaguucgacaagcuguacaucuggggcgugcaccaccccagcaccgacagcgaccagaucagccuguacgcccaggccagcggcagagugaccgugagcaccaagagaagccagcagaccgugauccccaacaucggcagcagacccugggugagaggcgugagcagcagaaucagcaucuacuggaccaucgugaagcccggcgacauccugcugaucaacagcaccggcaaccugaucgcccccagaggcuacuucaagaucagaagcggcaagagcagcaucaugagaagcaacgcccccaucggcaagugcaacagcgagugcaucacccccaacggcagcauccccaacgacaagcccuuccagaacgugaacagaaucaccuacggcgccugccccagauacgugaagcagaacacccugaagcuggccaccggcaugagaaacgugcccgagaagcagaccagaggcaucuucggcgccaucgccggcuucaucgagaacggcugggagggcaugguggacggcugguacggcuucagacaccagaacagcgagggcaucggccaggccgccgaccugaagagcacccaggccgccaucaaccagaucaacggcaagcugaacagacugaucgagaagaccaacgagaaguuccaccagaucgagaaggaguucagcgagguggagggcagaauccaggaccuggagaaguacguggaggacaccaagaucgaccuguggagcuacaacgccgagcugcugguggcccuggagaaccagcacaccaucgaccugaccgacagcgagaugaacaagcuguucgagagaaccagaaagcagcugagagagaacgccgaggacaugggcaacggcugcuucaagaucuaccacaagugcgacaacgccugcaucggcagcaucagaaacggcaccuacgaccacgacguguacagagacgaggcccugaacaacagauuccagaucaagggcguggagcugaagagcggcuacaaggacuggauccuguggaucagcuucgccaucagcugcuuccugcugugcguggugcugcugggcuucaucaugugggccugccagaagggcaacaucagaugcaacaucugcaucuga

SEQ ID NO: 166791 - RNA, 1701 nt, Artificial Sequence
  derived and/or modified CDS sequence (opt4) from hemagglutinin__InfluenzaA__AEG64889
augaagaccaucaucgcccugagcuacauccugugccugguguucgcccagaagcugcccgugaacgacaacagcaccgccacccugugccugggccaccacgccgugcccaacggcacccuggugaagaccaucaccaacgaccacaucgaggugaccaacgccaccgagcuggugcagagcagcagcaccggcagaaucugcgacagcccccaccagauccuggacggcgagaacugcacccugaucgacgcccugcugggcgacccccacugcgacggcuuccagaacaaggagugggaccuguucguggagagaagcaccgccuacagcaacugcuaccccuacgacgugcccgacuacgccagccugagaagccuguucgccagcagcggcacccuggaguucaacaacgagagcuucaacuggaccggcguggcccagaacggcaccagcagcgccugcaagagaagaagcaucaagagcuucuucagcagacugaacuggcugcaccagcugaaguacaaguaccccgcccugaacgugaccaugcccaacaacgagaaguucgacaagcuguacaucuggggcgugcaccaccccagcaccgacagcgaccagaucagccuguacgcccaggccagcggcagagugaccgugagcaccaagagaagccagcagaccgugauccccaacaucggcagcagacccugggugagaggcgugagcagcagaaucagcaucuacuggaccaucgugaagcccggcgacauccugcugaucaacagcaccggcaaccugaucgcccccagaggcuacuucaagaucagaagcggcaagagcagcaucaugagaagcaacgcccccaucggcaagugcaacagcgagugcaucacccccaacggcagcauccccaacgacaagcccuuccagaacgugaacagaaucaccuacggcgccugccccagauacgugaagcagaacacccugaagcuggccaccggcaugagaaacgugcccgagaagcagaccagaggcaucuucggcgccaucgccggcuucaucgagaacggcugggagggcaugguggacggcugguacggcuucagacaccagaacagcgagggcaccggccaggccgccgaccugaagagcacccaggccgccaucaaccagaucaacggcaagcugaacagacugaucgagaagaccaacgagaaguuccaccagaucgagaaggaguucagcgagguggagggcagaauccaggaccuggagaaguacguggaggacaccaagaucgaccuguggagcuacaacgccgagcugcugguggcccuggagaaccagcacaccaucgaccugaccgacagcgagaugaacaagcuguucgagaagaccagaaagcagcugagagagaacgccgaggacaugggcaacggcugcuucaagaucuaccacaagugcgacaacgccugcaucggcagcaucagaaacggcaccuacgaccacgacguguacagagacgaggcccugaacaacagauuccagaucaagggcguggagcugaagagcggcuacaaggacuggauccuguggaucagcuucgccaucagcugcuuccugcugugcguggugcugcugggcuucaucaugugggccugccagaagggcaacaucagaugcaacaucugcaucuga

SEQ ID NO: 166792 - RNA, 1701 nt, Artificial Sequence; identical to SEQ ID NO: 160092
  derived and/or modified CDS sequence (opt4) from hemagglutinin__InfluenzaA__AEG64911

SEQ ID NO: 166793 - RNA, 1701 nt, Artificial Sequence; identical to SEQ ID NO: 160092
  derived and/or modified CDS sequence (opt4) from hemagglutinin__InfluenzaA__AEG64922

SEQ ID NO: 166794 - RNA, 1701 nt, Artificial Sequence; identical to SEQ ID NO: 160092
  derived and/or modified CDS sequence (opt4) from hemagglutinin__InfluenzaA__AEG64933

SEQ ID NO: 166795 - RNA, 1701 nt, Artificial Sequence; identical to SEQ ID NO: 160178
  derived and/or modified CDS sequence (opt4) from hemagglutinin__InfluenzaA__AEG64944

SEQ ID NO: 166796 - RNA, 1701 nt, Artificial Sequence; identical to SEQ ID NO: 160092
  derived and/or modified CDS sequence (opt4) from hemagglutinin__InfluenzaA__AEG64955

SEQ ID NO: 166797 - RNA, 1701 nt, Artificial Sequence; identical to SEQ ID NO: 160092
  derived and/or modified CDS sequence (opt4) from hemagglutinin__InfluenzaA__AEG64966

SEQ ID NO: 166798 - RNA, 1701 nt, Artificial Sequence
  derived and/or modified CDS sequence (opt4) from hemagglutinin__InfluenzaA__AEG64977
augaagaccaucaucgcccugagcuacauccugugccugguguucgcccagaagcugcccgagaacgacaacagcaccgccacccugugccugggccaccacgccgugcccaacggcaccaucgugaagaccaucaccaacgaccagaucgaggugaccaacgccaccgagcuggugcagagcagcagcaccggcggcaucugcgacagcccccaccagauccuggacggcgagaacugcacccugaucgacgcccugcugggcgacccccagugcgacggcuuccagaacaagaagugggaccuguucguggagagaagcaaggccuacagcaacugcuaccccuacgacgugcccgacuacgccagccugagaagccugguggccagcagcggcacccuggaguucaacaacgagagcuucgacuggaccggcgugacccagaacggcaccagcagcgccugcaagagaagaagcaacaagagcuucuucagcagacugaacuggcugacccaccugaaguacaaguaccccgcccugaacgugaccaugcccaacaacgagaaguucgacaagcuguacaucuggggcgugcaccaccccggcaccgacagcgaccagaucagccuguacgcccaggccagcggcagaaucaccgugagcaccaagagaagccagcagaccgugauccccaacaucggcagcagacccagagugagagacgugagcagcagaaucagcaucuacuggaccaucgugaagcccggcgacauccugcugaucaacagcaccggcaaccugaucgcccccagaggcuacuucaagaucagaagcggcaagagcagcaucaugagaagcgacgcccccaucgacaagugcaacagcgagugcaucacccccaacggcagcauccccaacgacaagcccuuccagaacgugaacagaaucaccuacggcgccugccccagauacgugaagcagaacacccugaagcuggccaccggcaugagaaacgugcccgagaagcagaccagaggcaucuucggcgccaucgccggcuucaucgagaacggcugggagggcaugguggacggcugguacggcuucagacaccagaacagcgagggcaccggccaggccgccgaccugaagagcacccaggccgccaucaaccagaucaacggcaagcugaacagacugaucggcaagaccaacgagaaguuccaccagaucgagaaggaguucagcgagguggagggcagaauccaggaccuggagaaguacguggaggacaccaagaucgaccuguggagcuacaacgccgagcugcugguggcccuggagaaccagcacaccaucgaccugaccgacagcgagaugaacaagcuguucgagagaaccaagaagcagcugagagagaacgccgaggacaugggcaacggcugcuucaagaucuaccacaagugcgacaacgccugcaucggcagcaucagaaacggcaccuacgaccacgacguguacagagacgaggcccugaacaacagauuccagaucaagggcguggagcugaagagcggcuacaaggacuggauccuguggaucagcuucgccaucagcugcuuccugcugugcguggcccugcugggcuucaucaugugggccugccagaagggcaacaucagaugcaacaucugcaucuga

SEQ ID NO: 166799 - RNA, 1701 nt, Artificial Sequence
  derived and/or modified CDS sequence (opt4) from hemagglutinin__InfluenzaA__AEG64988
augaagaccaucaucgcccugagcuacauccugugccugguguucgcccagaagcugcccggcaacgacaacagcaccgccacccugugccugggccaccacgccgugcccaacggcaccaucgugaagaccaucaccaacgaccagaucgaggugaccaacgccaccgagcuggugcagagcagcagcaccggcgagaucugcgacaugccccaccagauccuggacggcgagaacugcacccugaucgacgcccugcugggcgacccccagugcgacggcuuccagaacaagaagugggaccuguucguggagagaagcaaggccuacagcaacugcuaccccuacgacgugcccgacuacgccagccugagaagccugguggccagcagcggcacccuggaguucaacaacgagagcuucaacuggaccggcgugacccagaacggcaccagcagcgccugcaagagaagaagcaacaacagcuucuucagcagacugaacuggcugacccaccugaaguucaaguaccccgcccugaacgugaccaugcccaacaacgagaaguucgacaagcuguacaucuggggcgugcaccaccccggcaccgacaacgaccagaucuuccuguacgcccaggccagcggcagaaucaccgugagcaccaagagaagccagcagaccgugauccccaacaucggcagcagacccagagugagaaacauccccagcagaaucagcaucuacuggaccaucgugaagcccggcgacauccugcugaucaacagcaccggcaaccugaucgcccccagaggcuacuucaagaucagaagcggcaagagcagcaucaugagaagcgacgcccccaucggcaagugcaacagcgagugcaucacccccaacggcagcauccccaacgacaagcccuuccagaacgugaacagaaucaccuacggcgccugccccagauacgugaagcagaacacccugaagcuggccaccggcaugagaaacgugcccgagaagcagaccagaggcaucuucggcgccaucgccggcuucaucgagaacggcugggagggcaugguggacggcugguacggcuucagacaccagaacagcgagggcaucggccaggccgccgaccugaagagcacccaggccgccaucaaccagaucaacggcaagcugaacagacugaucggcaagaccaacgagaaguuccaccagaucgagaaggaguucagcgagguggagggcagaauccaggaccuggagaaguacguggaggacaccaagaucgaccuguggagcuacaacgccgagcugcugguggcccuggagaaccagcacaccaucgaccugaccgacagcgagaugaacaagcuguucgagagaaccaagaagcagcugagagagaacgccgaggacaugggcaacggcugcuucaagaucuaccacaagugcgacaacgccugcaucggcagcaucagaaacggcaccuacgaccacgacguguacagagacgaggcccugaacaacagauuccagaucaagggcguggagcugaagagcggcuacaaggacuggauccuguggaucagcuucgccaucagcugcuuccugcugugcguggugcugcugggcuucaucaugugggccugccagaagggcaacaucagaugcaacaucugcaucuga

SEQ ID NO: 166800 - RNA, 1701 nt, Artificial Sequence
  derived and/or modified CDS sequence (opt4) from hemagglutinin__InfluenzaA__AEG64999
augaagaccaucaucgcccugagcuacauccugugccugguguucgcccagaagcugcccggcaacgacaacagcaccgccacccugugccugggccaccacgccgugcccaacggcaccaucgugaagaccaucaccaacgaccagaucgaggugaccaacgccaccgagcuggugcagaacagcagcaccggcggcaucugcgacagcccccaccagauccuggacggcgagaacugcacccugaucgacgcccugcugggcgacccccagugcgacggcuuccagaacaagaagugggaccuguucguggagagaagcaaggccuacagcaacugcuaccccuacgacgugcccgacuacgugagccugagaagccugguggccagcagcggcacccuggaguucaacaacgagagcuucaacuggaccggcgugacccagaacggcaccagcagcgccugcaagagaagaagcaacaacagcuucuucagcagacugaacuggcugacccaccugaaguucaaguaccccgcccugaacgugaccaugcccaacaacgagaaguucgacaagcuguacaucuggggcgugcaccaccccggcaccgacaacgaccagaucagccuguacgcccaggccagcggcagaaucaccgugagcaccaagagaagccagcagaccgugauccccaacaucggcagcagacccagagugagagacauccccagcagaaucagcaucuacuggaccaucgugaagcccggcgacauccugcugaucaacagcaccggcaaccugaucgcccccagaggcuacuucaagaucagaagcggcaagagcagcaucaugagaagcgacgcccccaucggcaagugcaacagcgagugcaucacccccaacggcagcauccccaacgacaagcccuuccagaacgugaacagaaucaccuacggcgccugccccagauacgugaagcagaacacccugaagcuggccaccggcaugagaaacgugcccgagaagcagaccagaggcaucuucggcgccaucgccggcuucaucgagaacggcugggagggcaugguggacggcugguacggcuucagacaccagaacagcgagggcaucggccaggccgccgaccugaagagcacccaggccgccaucaaccagaucaacggcaagcugaacagacugaucggcaagaccaacgagaaguuccaccagaucgagaaggaguucagcgagguggagggcagaauccaggaccuggagaaguacguggaggacaccaagaucgaccuguggagcuacaacgccgagcugcugguggcccuggagaaccagcacaccaucgaccugaccgacagcgagaugaacaagcuguucgagagaaccaagaagcagcugagagagaacgccgaggacaugggcaacggcugcuucaagaucuaccacaagugcgacaacgccugcaucggcagcaucagaaacggcaccuacgaccacgacguguacagagacgaggcccugaacaacagauuccagaucaagggcguggagcugaagagcggcuacaaggacuggauccuguggaucagcuucgccaucagcugcuuccugcugugcguggcccugcugggcuucaucaugugggccugccagaagggcaacaucagaugcaacaucugcaucuga

SEQ ID NO: 166801 - RNA, 1701 nt, Artificial Sequence; identical to SEQ ID NO: 160315
  derived and/or modified CDS sequence (opt4) from hemagglutinin__InfluenzaA__AEG65010

SEQ ID NO: 166802 - RNA, 1701 nt, Artificial Sequence
  derived and/or modified CDS sequence (opt4) from hemagglutinin__InfluenzaA__AEG65021
augaagaccaucaucgcccugagcuacauccugugccugguguucgcccagaagcugcccggcaacgacaacagcaccgccacccugugccugggccaccacgccgugcccaacggcaccaucgugaagaccaucaccaacgaccagaucgaggugaccaacgccaccgagcuggugcagagcagcagcaccggcggcaucugcgacagcccccaccagauccuggacggcgagaacugcacccugaucgacgcccugcugggcgacccccagugcgacggcuuccagaacaagaagugggaccuguucguggagagaagcaaggccuacagcaacugcuaccccuacgacgugcccgacuacgugagccugagaagccugguggccagcagcggcacccuggaguucaacaacgagagcuucaacuggaccggcgugacccagaacggcaccagcagcgccugcaagagaagaagcaacaacagcuucuucagcagacugaacuggcugacccaccugaaguucaaguaccccgcccugaacgugaccaugcccaacaccgagaaguucgacaagcuguacaucuggggcgugcaccaccccggcaccgacaacgaccagaucagccuguacgcccaggccagcggcagaaucaccgugagcaccaagagaagccagcagaccgugauccccaacaucggcagcagacccagagugagagacauccccagcagaaucagcaucuacuggaccaucgugaagcccggcgacauccugcugaucaacagcaccggcaaccugaucgcccccagaggcuacuucaagaucagaagcggcaagagcagcaucaugagaagcgacgcccccaucggcaagugcaacagcgagugcaucacccccaacggcagcauccccaacgacaagcccuuccagaacgugaacagaaucaccuacggcgccugccccagauacgugaagcagaacacccugaagcuggccaccggcaugagaaacgugcccgagaagcagaccagaggcaucuucggcgccaucgccggcuucaucgagaacggcugggagggcaugguggacggcugguacggcuucagacaccagaacagcgagggcaucggccaggccgccgaccugaagagcacccaggccgccaucaaccagaucaacggcaagcugaacagacugaucggcaagaccaacgagaaguuccaccagaucgagaaggaguucagcgagguggagggcagaauccaggaccuggagaaguacguggaggacaccaagaucgaccuguggagcuacaacgccgagcugcugguggcccuggagaaccagcacaccaucgaccugaccgacagcgagaugaacaagcuguucgagagaaccaagaagcagcugagagagaacgccgaggacaugggcaacggcugcuucaagaucuaccacaagugcgacaacgccugcaucggcagcaucagaaacggcaccuacgaccacgacguguacagagacgaggcccugaacaacagauuccagaucaagggcguggagcugaagagcggcuacaaggacuggauccuguggaucagcuucgccaucagcugcuuccugcugugcguggcccugcugggcuucaucaugugggccugccagaagggcaacaucagaugcaacaucugcaucuga

SEQ ID NO: 166803 - RNA, 1701 nt, Artificial Sequence
  derived and/or modified CDS sequence (opt4) from hemagglutinin__InfluenzaA__AEG65032
augaagaccaucaucgcccugagcuacauccugugccugguguucgcccagaagcugcccggcaacgacaacagcaccgccacccugugccugggccaccacgccgugcccaacggcaccaucgugaagaccaucaccaacgaccagaucgaggugaccaacgccaccgagcuggugcagagcagcagcaccggcggcaucugcgacagcccccaccagauccuggacggcgagaacugcacccugaucgacgcccugcugggcgacccccagugcgacggcuuccagaacaagaagugggaccuguucguggagagaagcaaggccuacagcaacugcuaccccuacgacgugcccgacuacgccagccugagaagccugguggccagcagcggcacccuggaguucaacaacgagagcuucaacuggaccggcgugacccagaacggcaccagcagcgccugcaagagaagaagcaacaacagcuucuucagcagacugaacuggcugacccaccugaaguucaaguaccccgcccugaacgugaccaugcccaacaacgagaaguucgacaagcuguacaucuggggcgugcaccaccccggcaccgacaacgaccagaucuuccuguacgcccaggccagcggcagaaucaccgugagcaccaagagaagccagcagaccgugauccccaacaucggcagcagacccagagugagaaacauccccagcagaaucagcaucuacuggaccaucgugaagcccggcgacauccugcugaucaacagcaccggcaaccugaucgcccccagaggcuacuucaagaucagaagcggcaagagcagcaucaugagaagcgacgcccccaucggcaagugcaacagcgagugcaucacccccaacggcagcauccccaacgacaagcccuuccagaacgugaacagaaucaccuacggcgccugccccagauacgugaagcagaacacccugaagcuggccaccggcaugagaaacgugcccgagaagcagaccagaggcaucuucggcgccaucgccggcuucaucgagaacggcugggagggcaugguggacggcugguacggcuucagacaccagaacagcgagggcaucggccaggccgccgaccugaagagcacccaggccgccaucaaccagaucaacggcaagcugaacaagcugaucggcaagaccaacgagaaguuccaccagaucgagaaggaguucagcgagguggagggcagaauccaggaccuggagaaguacguggaggacaccaagaucgaccuguggagcuacaacgccgagcugcugguggcccuggagaaccagcacaccaucgaccugaccgacagcgagaugaacaagcuguucgagagaaccaagaagcagcugagagagaacgccgaggacaugggcaacggcugcuucaagaucuaccacaagugcgacaacgccugcaucggcagcaucagaaacggcaccuacgaccacgacguguacagagacgaggcccugaacaacagauuccagaucaagggcguggagcugaagagcggcuacaaggacuggauccuguggaucagcuucgccaucagcugcuuccugcugugcguggcccugcugggcuucaucaugugggccugccagaagggcaacaucagaugcaacaucugcaucuga

SEQ ID NO: 166804 - RNA, 1701 nt, Artificial Sequence; identical to SEQ ID NO: 160690
  derived and/or modified CDS sequence (opt4) from hemagglutinin__InfluenzaA__AEG65043

SEQ ID NO: 166805 - RNA, 1701 nt, Artificial Sequence; identical to SEQ ID NO: 160690
  derived and/or modified CDS sequence (opt4) from hemagglutinin__InfluenzaA__AEG65054

SEQ ID NO: 166806 - RNA, 1701 nt, Artificial Sequence
  derived and/or modified CDS sequence (opt4) from hemagglutinin__InfluenzaA__AEG65065
augaagaccaucaucgcccugagcuacauccugugccugguguucgcccagaagcugcccggcaacgacaacagcaccgccacccugugccugggccaccacgccgugcccaacggcaccaucgugaagaccaucaccaacgaccagaucgaggugaccaacgccaccgagcuggugcagagcagcagcaccggcgagaucugcgacagcccccaccagauccuggacggcgagaacugcacccugaucgacgcccugcugggcgacccccagugcgacggcuuccagaacaagaagugggaccuguucguggagagaagcaaggccuacagcaacugcuaccccuacgacgugcccgacuacgccagccugagaagccugguggccagcagcggcacccuggaguucaacaacgagagcuucaacuggaccggcgugacccagaacggcaccagcagcgccugcaagagaagaagcaacaacagcuucuucagcagacugaacuggcugacccaccugaaguucaaguaccccgcccugaacgugaccaugcccaacaacgagaaguucgacaagcuguacaucuggggcgugcaccaccccggcaccgacaacgaccagaucuuccuguacgcccaggccagcggcagaaucaccgugagcaccaagagaagccagcagaccgugauccccaacaucggcagcagacccagagugagaaacauccccagcagaaucagcaucuacuggaccaucgugaagcccggcgacauccugcugaucaacagcaccggcaaccugaucgcccccagaggcuacuucaagaucagaagcggcaagagcagcaucaugagaagcgacgcccccaucggcaagugcaacagcgagugcaucacccccaacggcagcauccccaacgacaagcccuuccagaacgugaacagaaucaccuacggcgccugccccagauacgugaagcagaacacccugaagcuggccaccggcaugagaaacgugcccgagaagcagaccagaggcaucuucggcgccaucgccggcuucaucgagaacggcugggagggcaugguggacggcugguacggcuucagacaccagaacagcgagggcaucggccaggccgccgaccugaagagcacccaggccgccaucaaccagaucaacggcaagcugaacagacugaucggcaagaccaacgagaaguuccaccagaucgagaaggaguucagcgagguggagggcagaauccaggaccuggagaaguacguggaggacaccaagaucgaccuguggagcuacaacgccgagcugcugguggcccuggagaaccagcacaccaucgaccugaccgacagcgagaugaacaagcuguucgagagaaccaagaagcagcugagagagaacgccgaggacaugggcaacggcugcuucaagaucuaccacaagugcgacaacgccugcaucggcagcaucagaaacggcaccuacgaccacgacguguacagagacgaggcccugaacaacagauuccagaucaagggcguggagcugaagagcggcuacaaggacugggugcuguggaucagcuucgccaucagcugcuuccugcugugcguggugcugcugggcuucaucaugugggccugccagaagggcaacaucagaugcaacaucugcaucuga

SEQ ID NO: 166807 - RNA, 1701 nt, Artificial Sequence
  derived and/or modified CDS sequence (opt4) from hemagglutinin__InfluenzaA__AEG65076
augaagaccaucaucgcccugagcuacauccugugccugguguucgcccagaagcugcccggcaacgacaacagcaccgccacccugugccugggccaccacgccgugcccaacggcaccaucgugaagaccaucaccaacgaccagaucgaggugaccaacgccaccgagcuggugcagagcagcagcaccggcggcaucugcgacagcccccaccagauccuggacggcgagaacugcacccugaucgacgcccugcugggcgacccccagugcgacggcuuccagaacaagaagugggaccuguucguggagagaagcaaggccuacagcaacugcuaccccuacgacgugcccgacuacgccagccugagaagccugguggccagcagcggcacccuggaguucaacaacgagagcuucaacuggaccggcgugacccagaacggcaccagcagcgccugcaagagaagaagcaacaacagcuucuucagcagacugaacuggcugacccaccugagauucaaguaccccgcccugaacgugaccaugcccaacaacgagaaguucgacaagcuguacaucuggggcgugcaccaccccggcaccgacaacgaccagaucuuccuguacgcccaggccagcggcagaaucaccgugagcaccaagagaagccagcagaccgugauccccaacgugggcagcagacccagagugagaaacauccccagcagaaucagcaucuacuggaccaucgugaagcccggcgacauccugcugaucaacagcaccggcaaccugaucgcccccagaggcuacuucaagaucagaagcggcaagagcagcaucaugagaagcgacgcccccaucggcaagugcaacagcgagugcaucacccccaacggcagcauccccaacgacaagcccuuccagaacgugaacagaaucaccuacggcgccugccccagauacgugaagcagaacacccugaagcuggccaccggcaugagaaacgugcccgagaagcagaccagaggcaucuucggcgccaucgccggcuucaucgagaacggcugggagggcaugguggacggcugguacggcuucagacaccagaacagcgagggcaccggccaggccgccgaccugaagagcacccaggccgccaucaaccagaucaacggcaagcugaacagacugaucggcaagaccaacgagaaguuccaccagaucgagaaggaguucagcgagguggagggcagaauccaggaccuggagaaguacguggaggacaccaagaucgaccuguggagcuacaacgccgagcugcugguggcccuggagaaccagcacaccaucgaccugaccgacagcgagaugaacaagcuguucgagagaaccaagaagcagcugagagagaacgccgaggacaugggcaacggcugcuucaagaucuaccacaagugcgacaacgccugcaucggcagcaucagaaacggcaccuacgaccacgacguguacagagacgaggcccugaacaacagauuccagaucaagggcguggagcugaagagcggcuacaaggacuggauccuguggaucagcuucgccaucagcugcuuccugcugugcguggcccugcugggcuucaucaugugggccugccagaagggcaacaucagaugcaacaucugcaucuga

SEQ ID NO: 166808 - RNA, 1701 nt, Artificial Sequence
  derived and/or modified CDS sequence (opt4) from hemagglutinin__InfluenzaA__AEG65087
augaagaccaucaucgcccugagcuacauccugugccugguguucgcccagaagcugcccggcaacgacaacagcaccgccacccugugccugggccaccacgccgugcccaacggcaccaucgugaagaccaucaccaacgaccagaucgaggugaccaacgccaccgagcuggugcagagcagcagcaccggcggcaucugcgacagcccccaccagauccuggacggcgagaacugcacccugaucgacgcccugcugggcgacccccagugcgacggcuuccagaacaagaagugggaccuguucguggagagaagcaaggccuacagcaacugcuaccccuacgacgugcccgacuacgccagccugagaagccugguggccagcagcggcacccuggaguucaacaacgagagcuucaacuggaccggcgugacccagaacggcaccagcagcgccugcaagagaagaagcaacaacagcuucuucagcagacugaacuggcugacccaccugaaguucaaguaccccgcccugaacgugaccaugcccaacaacgagaaguucgacaagcuguacaucuggggcgugcaccaccccggcaccaacaacgaccagaucuuccuguacgcccaggccagcggcagaaucaccgugagcaccaagagaagccagcagaccgugauccccaacaucggcagcagacccagagugagaaacauccccagcagaaucagcaucuacuggaccaucgugaagcccggcgacauccugcugaucaacagcaccggcaaccugaucgcccccagaggcuacuucaagaucagaagcggcaagagcagcaucaugagaagcgacgcccccaucggcaagugcaacagcgagugcaucacccccaacggcagcauccccaacgacaagcccuuccagaacgugaacagaaucaccuacggcgccugccccagauacgugaagcagaacacccugaagcuggccaccggcaugagaaacgugcccgagaagcagaccagaggcaucuucggcgccaucgccggcuucaucgagaacggcugggagggcaugguggacggcugguacggcuucagacaccagaacagcgagggcaucggccaggccgccgaccugaagagcacccaggccgccaucaaccagaucaacggcaagcugaacagacugaucggcaagaccaacgagaaguuccaccagaucgagaaggaguucagcgagguggagggcagaauccaggaccuggagaaguacguggaggacaccaagaucgaccuguggagcuacaacgccgagcugcugguggcccuggagaaccagcacaccaucgaccugaccgacagcgagaugaacaagcuguucgagagaaccaagaagcagcugagagagaacgccgaggacaugggcaacggcugcuucaagaucuaccacaagugcgacaacgccugcaucggcagcaucagaaacggcaccuacgaccacgacguguacagagacgaggcccugaacaacagauuccagaucaagggcguggagcugaagagcggcuacaaggacuggauccuguggaucagcuucgccaucagcugcuuccugcugugcguggcccugcugggcuucaucaugugggccugccagaagggcaacaucagaugcaacaucugcaucuga

SEQ ID NO: 166809 - RNA, 1701 nt, Artificial Sequence
  derived and/or modified CDS sequence (opt4) from hemagglutinin__InfluenzaA__AEG65098
augaagaccaucaucgcccugagcuacauccugugccugguguucgcccagaagcugcccggcaacgacaacagcaccgccacccugugccugggccaccacgccgugcccaacggcaccaucgugaagaccaucaccaacgaccagaucgaggugaccaacgccaccgagcuggugcagagcagcagcaccggcgagaucugcgacagcccccaccagauccuggacggcgagaacugcacccugaucgacgcccugcugggcgacccccagugcgacgacuuccagaacaagaagugggaccuguucguggagagaagcaaggccuacagcaacugcuaccccuacgacgugcccgacuacgccagccugagaagccugguggccagcagcggcacccuggaguucaacaacgagagcuucaacuggaccggcgugacccagaacggcaccagcagcgccugcaagagaagaagcaacaacagcuucuucagcagacugaacuggcugacccacagcaaguucaaguaccccgcccugaacgugaccaugcccaacaacgagaaguucgacaagcuguacaucuggggcgugcaccaccccggcaccgacaacgaccagaucuuccuguacgcccaggccagcggcagaaucaccgugagcaccaagagaagccagcagaccgugauccccaacaucggcagcagacccagagugagaaacauccccagcagaaucagcaucuacuggaccaucgugaagcccggcgacauccugcugaucaacagcaccggcaaccugaucgcccccagaggcuacuucaagaucagaagcggcaagagcagcaucaugagaagcgacgcccccaucggcaagugcaacagcgagugcaucacccccaacggcagcauccccaacgacaagcccuuccagaacgugaacagaaucaccuacggcgccugccccagauacgugaagcagaacacccugaagcuggccaccggcaugagaaacgugcccgagaagcagaccagaggcaucuucggcgccaucgccggcuucaucgagaacggcugggagggcaugguggacggcugguacggcuucagacaccagaacagcgagggcaucggccaggccgccgaccugaagagcacccaggccgccaucaaccagaucaacggcaaccugaacagacugaucggcaagaccaacgagaaguuccaccagaucgagaaggaguucagcgagguggagggcagaauccaggaccuggagaaguacguggaggacaccaagaucgaccuguggagcuacaacgccgagcugcugguggcccuggagaaccagcacaccaucgaccugaccgacagcgagaugaacaagcuguucgagagaaccaagaagcagcugagagagaacgccgaggacaugggcaacggcugcuucaagaucuaccacaagugcgacaacgccugcaucggcagcaucagaaacggcaccuacgaccacgacguguacagagacgaggcccugaacaacagauuccagaucaagggcguggagcugaagagcggcuacaaggacuggauccuguggaucagcuucgccaucagcugcuuccugcugugcguggugcugcugggcuucaucaugugggccugccagaagggcaacaucagaugcaacaucugcaucuga

SEQ ID NO: 166810 - RNA, 1701 nt, Artificial Sequence
  derived and/or modified CDS sequence (opt4) from hemagglutinin__InfluenzaA__AEG65109
augaagaccaucaucgcccugagcuacauccugugccugguguucgcccagaagcugcccggcaacgacaacagcaccgccacccugugccugggccaccacgccgugcccaacggcaccaucgugaagaccaucaccaacgaccagaucgaggugaccaacgccaccgagcuggugcagagcagcagcaccggcgagaucugcgacagcccccaccagauccuggacggcgagaacugcaagcugaucgacgcccugcugggcgacccccagugcgacggcuuccagaacaagaagugggaccuguucguggagagaagcaaggccuacagcaacugcuaccccuacgacgugcccgacuacgccagccugagaagccugguggccagcagcggcacccuggaguucaacaacgagagcuucaacuggaccggcgugacccagaacggcaccagcagcgccugcaagagaagaagcaacaacagcuucuucagcagacugaacuggcugacccaccugaaguucaaguaccccgcccugaacgugaccaugcccaacaacgagaaguucgacaagcuguacaucuggggcgugcaccaccccggcaccgacaacgaccagaucuuccuguacgcccagagcagcggcagaaucaccgugagcaccaagagaagccagcagaccgugauccccaacaucggcagcagacccagagugagaaacauccccagcagaaucagcaucuacuggaccaucgugaagcccggcgacauccugcugaucaacagcaccggcaaccugaucgcccccagaggcuacuucaagaucagaagcggcaagagcagcaucaugagaagcgacgcccccaucggcaagugcaacagcgagugcaucacccccaacggcagcauccccaacgacaagcccuuccagaacgugaacagaaucaccuacggcgccugccccagauacgugaagcagaacacccugaagcuggccaccggcaugagaaacgugcccgagaagcagaccagaggcaucuucggcgccaucgccggcuucaucgagaacggcugggagggcaugguggacggcugguacggcuucagacaccagaacagcgagggcaucggccaggccgccgaccugaagagcacccaggccgccaucaaccagaucaacggcaagcugaacagacugaucggcaagaccaacgagaaguuccaccagaucgagaaggaguucagcgagguggagggcagaauccaggaccuggagaaguacguggaggacaccaagaucgaccuguggagcuacaacgccgagcugcugguggcccuggagaaccagcacaccaucgaccugaccgacagcgagaugaacaagcuguucgagagaaccaagaagcagcugagagagaacgccgaggacaugggcaacggcugcuucaagaucuaccacaagugcgacaacgccugcaucggcagcaucagaaacggcaccuacgaccacgacguguacagagacgaggcccugaacaacagauuccagaucaagggcguggagcugaagagcggcuacaaggacuggauccuguggaucagcuucgccaucagcugcuuccugcugugcguggcccugcugggcuucaucaugugggccugccagaagggcaacaucagaugcaacaucugcaucuga

SEQ ID NO: 166811 - RNA, 1701 nt, Artificial Sequence
  derived and/or modified CDS sequence (opt4) from hemagglutinin__InfluenzaA__AEG65120
augaagaccaucaucgcccugagcuacauccugugccugguguucgcccagaagcugcccggcaacgacaacagcaccgccacccugugccugggccaccacgccgugcccaacggcaccaucgugaagaccaucaccaacgaccagaucgaggugaccaacgccaccgagcuggugcagagcagcagcaccggcgagaucugcgacagcccccaccagauccuggacggcgagaacugcacccugaucgacgcccugcugggcgacccccagugcgacggcuuccagaacaagaagugggaccuguucguggagagaagcaaggccuacagcaacugcuaccccuacgacgugcccgacuacgccagccugagaagccugguggccagcagcggcacccuggaguucaacaacgagagcuucaacuggaccggcgugacccagaacggcaccagcagcgccugcaagagaagaagcaacaacagcuucuucagcagacugaacuggcugacccaccugaaguucaaguaccccgcccugaacgugaccaugcccaacaacgagaaguucgacaagcuguacaucuggggcgugcaccaccccggcaccgacaacgaccagaucuuccuguacgcccaggccagcggcagaaucaccgugagcaccaagagaagccagcagaccgugauccccaacaucggcagcagacccagagugagaaacauccccagcagaaucagcaucuacuggaccaucgugaagcccggcgacauccugcugaucaacagcaccggcaaccugaucgcccccagaggcuacuucaagaucagaagcggcaagagcagcaucaugagaagcgacgcccccaucggcaagugcaacagcgagugcaucacccccaacggcagcauccccaacgacaagcccuuccagaacgugaacagaaucgccuacggcgccugccccagauacgugaagcagaacacccugaagcuggccaccggcaugagaaacgugcccgagaagcagaccagaggcaucuucggcgccaucgccggcuucaucgagaacggcugggagggcaugguggacggcugguacggcuucagacaccagaacagcgagggcaucggccaggccgccgaccugaagagcacccaggccgccaucaaccagaucaacggcaagcugaacagacugaucggcaagaccaacgagaaguuccaccagaucgagaaggaguucagcgagguggagggcagaauccaggaccuggagaaguacguggaggacaccaagaucgaccuguggagcuacaacgccgagcugcugguggcccuggagaaccagcacaccaucgaccugaccgacagcgagaugaacaagcuguucgagagaaccaagaagcagcugagagagaacgccgaggacaugggcaacggcugcuucaagaucuaccacaagugcgacaacgccugcaucggcagcaucagaaacggcaccuacgaccacgacguguacagagacgaggcccugaacaacagauuccagaucaagggcguggagcugaagagcggcuacaaggacuggauccuguggaucagcuucgccaucagcugcuuccugcugugcguggugcugcugggcuucaucaugugggccugccagaagggcaacaucagaugcaacaucugcaucuga

SEQ ID NO: 166812 - RNA, 1701 nt, Artificial Sequence
  derived and/or modified CDS sequence (opt4) from hemagglutinin__InfluenzaA__AEG65131
augaagaccaucaucgcccugagcuacauccugugccugguguucgcccagaagcugcccggcaacgacaacagcaccgccacccugugccugggccaccacgccgugcccaacggcaccaucgugaagaccaucaccaacgaccagaucgaggugaccaacgccaccgagcuggugcagagcagcagcaccggcgagaucugcgacagcccccaccagauccuggacggcgagaacugcacccugaucgacgcccugcugggcgacccccagugcgacggcuuccagaacaagaagugggaccuguucguggagagaagcaaggccuacagcaacugcuaccccuacgacgugcccgacuacgccagccugagaagccugguggccagcagcggcacccuggaguucaacaacgagagcuucaacuggaccggcgugacccagaacggcaccagcagcgccugcaagagaagaagcaacaacagcuucuucagcagacugaacuggcugacccacagcaaguucaaguaccccgcccugaacgugaccaugcccaacaacgagaaguucgacaagcuguacaucuggggcgugcaccaccccggcaccgacaacgaccagaucuuccuguacgcccaggccagcggcagaaucaccgugagcaccaagagaagccagcagaccgugauccccaacaucggcagcagacccagagugagaaacauccccagcagaaucagcaucuacuggaccaucgugaagcccggcgacauccugcugaucaacagcaccggcaaccugaucgcccccagaggcuacuucaagaucagaagcggcaagagcagcaucaugagaagcgacgcccccaucggcaagugcaacagcgagugcaucacccccaacggcagcauccccaacgacaagcccuuccagaacgugaacagaaucaccuacggcgccugccccagauacgugaagcagaacacccugaagcuggccaccggcaugagaaacgugcccgagaagcagaccagaggcaucuucggcgccaucgccggcuucaucgagaacggcugggagggcaugguggacggcugguacggcuucagacaccagaacagcgagggcaucggccaggccgccgaccugaagagcacccaggccgccaucaaccagaucaacggcaagcugaacagacugaucggcaagaccaacgagaaguuccaccagaucgagaaggaguucagcgagguggagggcagaauccaggaccuggagaaguacguggaggacaccaagaucgaccuguggagcuacaacgccgagcugcugguggcccuggagaaccagcacaccaucgaccugaccgacagcgagaugaacaagcuguucgagagaaccaagaagcagcugagagagaacgccgaggacaugggcaacggcugcuucaagaucuaccacaagugcgacaacgccugcaucggcagcaucagaaacggcaccuacgaccacgacguguacagagacgaggcccugaacaacagauuccagaucaagggcguggagcugaagagcggcuacaaggacuggauccuguggaucagcuucgccaucagcugcuuccugcugugcguggugcugcugggcuucaucaugugggccugccagaagggcaacaucagaugcaacaucugcaucuga

SEQ ID NO: 166813 - RNA, 1701 nt, Artificial Sequence; identical to SEQ ID NO: 160111
  derived and/or modified CDS sequence (opt4) from hemagglutinin__InfluenzaA__AEG65142

SEQ ID NO: 166814 - RNA, 1701 nt, Artificial Sequence; identical to SEQ ID NO: 160111
  derived and/or modified CDS sequence (opt4) from hemagglutinin__InfluenzaA__AEG65153

SEQ ID NO: 166815 - RNA, 1701 nt, Artificial Sequence
  derived and/or modified CDS sequence (opt4) from hemagglutinin__InfluenzaA__AEG65164
augaagaccaucaucgcccugagcuacauccugugccugguguucgcccagaagcugcccggcaacgacaacagcaccgccacccugugccugggccaccacgccgugcccaacggcacccuggugaagaccaucaccaacgaccagaucgaggugaccaacgccaccgagcuggugcagagcagcagcaccggcagaaucugcgacagcccccaccagauccuggacggcgagaacugcacccugaucgacgcccugcugggcgacccccacugcgacggcuuccagaacaaggagugggaccuguucguggagagaagcaaggccuacagcaacugcuaccccuacgacgugcccgacuacgugagccugagaagccugguggccagcagcggcacccuggaguucaacaacgagagcuucaacuggaccggcguggcccagaacggcaccagcagcgccugcaagagaagaagcgacaagagcuucuucagcagacugaacuggcugcaccagcugaaguacaaguaccccgcccugaacgugaccaugcccaacaacgagaaguucgacaagcuguacaucuggggcgugcaccaccccggcaccgacagcgaccagaucagccuguacgcccaggccagcggcagagugaccgugagcaccaagagaagccagcagaccgugauccccaacaucggcagcagacccugggugagaggcgugagcagcagaaucagcaucuacuggaccaucgugaagcccggcgacauccugcugaucaacagcaccggcaaccugaucgcccccagaggcuacuucaagaucagaagcggcaagagcagcaucaugagaagcgacgcccccaucggcaagugcaacagcgagugcaucacccccaacggcagcauccccaacgacaagcccuuccagaacgugaacagaaucaccuacggccccugccccagauacgugaagcagaacacccugaagcuggccaccggcaugagaaacgugcccgagaagcagaccagaggcaucuucggcgccaucgccggcuucaucgagaacggcugggagggcaugauggacggcugguacggcuucagacaccagaacagcgagggcaccggccaggccgccgaccugaagagcacccaggccgccaucaaccagaucaacggcaagcugaacagacugaucgagaagaccaacgagaaguuccaccagaucgagaaggaguucagcgagguggagggcagaauccaggaccuggagaaguacguggaggacaccaagaucgaccuguggagcuacaacgccgaguuccugguggcccuggagaaccagcacaccaucgaccugaccgacagcgagaugaacaagcuguucgagagaaccaagaagcagcugagagagaacgccgaggacaugggcaacggcugcuucaagaucuaccacaagugcgacaacgccugcaucggcagcaucagaaacggcaccuacgaccacgacguguacagagacgaggcccugaacaacagauuccagaucaagggcguggagcugaagagcggcuacaaggacuggauccuguggaucagcuucgccaucagcugcuuccugcugugcaucgugcugcugggcuucaucaugugggccugccagaagggcaacaucagaugcaacaucugcaucuga

SEQ ID NO: 166816 - RNA, 1701 nt, Artificial Sequence
  derived and/or modified CDS sequence (opt4) from hemagglutinin__InfluenzaA__AEG65175
augaagaccaucaucgcccugagcuacauccugugccugguguucgcccagaagcugcccggcaacgacaacagcaccgccacccugugccugggccaccacgccgugcccaacggcaccaucgugaagaccaucaccaacgaccagaucgaggugaccaacgccaccgagcuggugcagagcagcagcaccggcggcaucugcgacagcccccaccagauccuggacggcgagaacugcacccugaucgacgcccugcugggcgacccccagugcgacggcuuccagaacaagaagugggaccuguucguggagagaagcaaggccuacagcaacugcuaccccuacgacgugcccgacuacgccagccugagaagccugguggccagcagcggcacccuggaguucaacaacgagagcuucaacuggaccggcgugacccagaacggcaccagcagcgccugcgagagaagaagcaacaagagcuucuucagcagacugaacuggcugacccaccugaaguacaaguaccccgcccugaacgugaccaugcccaacaacgagaaguucgacaagcuguacaucuggggcgugcaccaccccggcaccgacagcgaccagaucagccuguacgcccaggccagcggcagaaucaccgugagcaccaagagaagccagcagaccgugauccccaacaucggcagcagacccagagugagagacgugagcagcagaaucagcaucuacuggaccaucgugaagcccggcgacauccugcugaucaacagcaccggcaaccugaucgcccccagaggcuacuucaagaucagaaacggcaagagcagcaucaugagaagcgacgcccccaucggcaagugcaacagcgagugcaucacccccaacggcagcauccccaacgacaagcccuuccagaacgugaacagaaucaccuacggcgccugccccagauacgugaagcagaacacccugaagcuggccaccggcaugagaaacgugcccgagaagcagaccagaggcaucuucggcgccaucgccggcuucaucgagaacggcugggagggcaugguggacggcugguacggcuucagacaccagaacagcgagggcaccggccaggccgccgaccugaagagcacccaggccgccaucaaccagaucaacggcaagcugaacagacugaucggcaagaccaacgagaaguuccaccagaucgagaaggaguucagcgagguggagggcagaauccaggaccuggagaaguacguggaggacaccaagaucgaccuguggagcuacaacgccgagcugcugguggcccuggagaaccagcacaccaucgaccugaccgacagcgagaugaacaagcuguucgagagaaccaagaagcagcugagagagaacgccgaggacaugggcaacggcugcuucaagaucuaccacaagugcgacaacgccugcaucggcagcaucagaaacggcaccuacgaccacgacguguacagagacgaggcccugaacaacagauuccagaucaagggcguggagcugaagagcggcuacaaggacuggauccuguggaucagcuucgccaucagcugcuuccugcugugcguggcccugcugggcuucaucaugugggccugccagaagggcaacaucagaugcgacaucugcaucuga

SEQ ID NO: 166817 - RNA, 1701 nt, Artificial Sequence; identical to SEQ ID NO: 160479
  derived and/or modified CDS sequence (opt4) from hemagglutinin__InfluenzaA__AEG65186

SEQ ID NO: 166818 - RNA, 1701 nt, Artificial Sequence
  derived and/or modified CDS sequence (opt4) from hemagglutinin__InfluenzaA__AEG65197
augaagaccaucaucgcccugagcuacauccugugccugguguucgcccagaagcugcccggcaacgacaacagcaccgccacccugugccugggccaccacgccgugcccaacggcaccaucgugaagaccaucaccaacgaccagaucgaggugaccaacgccaccgagcuggugcagagcagccccaccggcggcaucugcgacagcccccaccagauccuggacggcgagaacugcacccugaucgacgcccugcugggcgacccccagugcgacggcuuccagaacaagaagugggaccuguucguggagagaagcaaggccuacagcaacugcuaccccuacgacgugcccgacuacgccagccugagaagccugguggccagcagcggcacccuggaguucaacaacgagagcuucaacuggaccggcgugacccagaacggcaccagcagcgccugcaagagaagaagcaacaacagcuucuucagcagacugaacuggcugacccaccugaaguucaaguaccccgcccugaacgugaccaugcccaacaacgagaaguucgacaagcuguacaucuggggcgugcaccaccccggcaccgacaacgaccagaucagccuguacgcccaggccagcggcagaaucaccgugagcaccaagagaagccagcagaccgugauccccaacaucggcagcagacccagagugagagacauccccagcagaaucagcaucuacuggaccaucgugaagcccggcgacaucauccugaucaacagcaccggcaaccugaucgcccccagaggcuacuucaagaucagaagcggcaagagcagcaucaugagaagcgacacccccaucggcaagugcaacagcgagugcaucacccccaacggcagcauccccaacgacaagcccuuccagaacgugaacagaaucaccuacggcgccugccccagauacgugaagcagaacacccugaagcuggccaccggcaugagaaacgugcccgagaagcagaccagaggcaucuucggcgccaucgccggcuucaucgagaacggcugggagggcaugguggacggcugguacggcuucagacaccagaacagcgagggcaucggccaggccgccgaccugaagagcacccaggccgccaucaaccagaucaacggcaagcugaacagacugaucggcaagaccaacgagaaguuccaccagaucgagaaggaguucagcgagguggagggcagaauccaggaccuggagaaguacguggaggacaccaagaucgaccuguggagcuacaacgccgagcugcugguggcccuggagaaccagcacaccaucgaccugaccgacagcgagaugaacaagcuguucgagagaaccaagaagcagcugagagagaacgccgaggacaugggcaacggcugcuucaagaucuaccacaagugcgacaacgccugcaucggcagcaucagaaacggcaccuacgaccacgacguguacagagacgaggcccugaacaacagauuccagaucaagggcguggagcugaagagcggcuacaaggacuggauccuguggaucagcuucgccaucagcugcuuccugcugugcguggcccugcugggcuucaucaugugggccugccagaagggcaacaucagaugcaacaucugcaucuga

SEQ ID NO: 166819 - RNA, 1701 nt, Artificial Sequence; identical to SEQ ID NO: 160690
  derived and/or modified CDS sequence (opt4) from hemagglutinin__InfluenzaA__AEG65208

SEQ ID NO: 166820 - RNA, 1701 nt, Artificial Sequence
  derived and/or modified CDS sequence (opt4) from hemagglutinin__InfluenzaA__AEG65219
augaagaccaucaucgcccugagcuacauccugugccugguguucgcccagaagcugcccggcaacgacaacagcaccgccacccugugccugggccaccacgccgugcccaacggcaccaucgugaagaccaucaccaacgaccagaucgaggugaccaacgccaccgagcuggugcagagcagcagcaccggcggcaucugcgacagcccccaccagauccuggacggcgagaacugcacccugaucgacgcccugcugggcgacccccagugcgacggcuuccagaacaagaagugggaccuguucguggagagaagcaaggccuacagcaacugcuaccccuacgacgugcccgacuacgccagccugagaagccugguggccagcagcggcacccuggaguucaacaacgagagcuucaacuggaccggcgugacccagaacggcaccagcagcgccugcaagagaagaagcaacaagagcuucuucagcagacugaacuggcugacccaccugaaguucaaguaccccgcccugaacgugaccaugcccaacaacgagaaguucgacaagcuguacaucuggggcgugcaccaccccggcaccgacaacgaccagaucagccuguacgcccaggccagcggcagaaucaccgugagcaccaagagaagccagcagaccgugauccccaacaucggcagcagacccagagugagagacgugcccagcagaaucagcaucuacuggaccaucgugaagcccggcgacauccugcugaucaacagcaccggcaaccugaucgcccccagaggcuacuucaagaucagaagcggcaagagcagcaucaugagaagcgacgcccccaucggcaagugcaacagcgagugcaucacccccaacggcagcauccccaacgacaagcccuuccagaacgugaacagaaucaccuacggcgccugccccagauacgugaagcagaacacccugaagcuggccaccggcaugagaaacgugcccgagaagcagaccagaggcaucuucggcgccaucgccggcuucaucgagaacggcugggagggcaugguggacggcugguacggcuucagacaccagaacagcgagggcaccggccaggccgccgaccugaagagcacccaggccgccaucaaccagaucaacggcaagcugaacagacugaucggcaagaccaacgagaaguuccaccagaucgagaaggaguucagcgagguggagggcagaauccaggaccuggagaaguacguggaggacaccaagaucgaccuguggagcuacaacgccgagcugcugguggcccuggagaaccagcacaccaucgaccugaccgacagcgagaugaacaagcuguucgagagaaccaagaagcagcugagagagaacgccgaggacaugggcaacggcugcuucaagaucuaccacaagugcgacaacgccugcaucggcagcaucagaaacggcaccuacgaccacgacguguacagagacgaggcccugaacaacagauuccagaucaagggcguggagcugaagagcggcuacaaggacuggauccuguggaucagcuucgccaucagcugcuuccugcugugcguggcccugcugggcuucaucaugugggccugccagaagggcaacaucaagugcaacaucugcaucuga

SEQ ID NO: 166821 - RNA, 1701 nt, Artificial Sequence; identical to SEQ ID NO: 161855
  derived and/or modified CDS sequence (opt4) from hemagglutinin__InfluenzaA__AEG65230

SEQ ID NO: 166822 - RNA, 1701 nt, Artificial Sequence; identical to SEQ ID NO: 161855
  derived and/or modified CDS sequence (opt4) from hemagglutinin__InfluenzaA__AEG65252

SEQ ID NO: 166823 - RNA, 1701 nt, Artificial Sequence; identical to SEQ ID NO: 160576
  derived and/or modified CDS sequence (opt4) from hemagglutinin__InfluenzaA__AEG65263

SEQ ID NO: 166824 - RNA, 1701 nt, Artificial Sequence; identical to SEQ ID NO: 160576
  derived and/or modified CDS sequence (opt4) from hemagglutinin__InfluenzaA__AEG65274

SEQ ID NO: 166825 - RNA, 1701 nt, Artificial Sequence; identical to SEQ ID NO: 160576
  derived and/or modified CDS sequence (opt4) from hemagglutinin__InfluenzaA__AEG65285

SEQ ID NO: 166826 - RNA, 1701 nt, Artificial Sequence
  derived and/or modified CDS sequence (opt4) from hemagglutinin__InfluenzaA__AEG65296
augaagaccgugaucgcccugagcuacauccugugccugguguucgcccagaagcugcccggcaacgacaacagcaccgccacccugugccugggccaccacgccgugcccaacggcaccaucgugaagaccaucaccaacgaccagaucgaggugaccaacgccaccgagcuggugcagagcagcagcaccggcggcaucugcgacagcccccaccagauccuggacggcgagaacugcacccugaucgacgcccugcugggcgacccccagugcgacggcuuccagaacaagaagugggaccuguucguggagagaagcaaggccuacagcaacugcuaccccuacgacgugcccgaccacgccagccugagaagccugguggccagcagcggcacccuggaguucaacaacgagagcuucgacuggaccggcgugacccagaacggcaccagcagcgccugcaagagaagaagcaacaagagcuucuucagcagacugaacuggcugacccaccugaaguacaaguaccccgcccugaacgugaccaugcccaacaacgagaaguucgacaagcuguacaucuggggcgugcaccaccccggcaccgacagcgaccagaucagccuguacgcccaggccagcggcagaaucaccgugagcaccaagagaagccagcagaccgugauccccaacaucggcagcagacccagagugagagacgugagcagcagaaucagcaucuacuggaccaucgugaagcccggcgacauccugcugaucaacagcaccggcaaccugaucgcccccagaggcuacuucaagaucagaagcggcaagagcagcaucaugagaagcgacgcccccaucggcaagugcaacagcgagugcaucacccccaacggcagcauccccaacgacaagcccuuccagaacgugaacagaaucaccuacggcgccugccccagauacgugaagcagaacacccugaagcuggccaccggcaugagaaacgugcccgagaagcagaccagaggcaucuucggcgccaucgccggcuucaucgagaacggcugggagggcaugguggacggcugguacggcuucagacaccagaacagcgagggcaccggccaggccgccgaccugaagagcacccaggccgccaucaaccagaucaacggcaagcugaacagacugaucggcaagaccaacgagaaguuccaccagaucgagaaggaguucagcgagguggagggcagaauccaggaccuggagaaguacguggaggacaccaagaucgaccuguggagcuacaacgccgagcugcugguggcccuggagaaccagcacaccaucgaccugaccgacagcgagaugaacaagcuguucgagagaaccaagaagcagcugagagagaacgccgaggacaugggcaacggcugcuucaagaucuaccacaagugcgacaacgccugcaucggcagcaucagaaacggcaccuacgaccacgacguguacagagacgaggcccugaacaacagauuccagaucaagggcguggagcugaagagcggcuacaaggacuggauccuguggaucagcuucgccaucagcugcuuccugcugugcguggcccugcugggcuucaucaugugggccugccagaagggcaacaucagaugcaacaucugcaucuga

SEQ ID NO: 166827 - RNA, 1701 nt, Artificial Sequence; identical to SEQ ID NO: 161855
  derived and/or modified CDS sequence (opt4) from hemagglutinin__InfluenzaA__AEG65307

SEQ ID NO: 166828 - RNA, 1701 nt, Artificial Sequence
  derived and/or modified CDS sequence (opt4) from hemagglutinin__InfluenzaA__AEG65318
augaagaccaucaucgcccugagcuacauccugugccugguguucgcccagaagcugcccggcaacgacaacagcaccgccacccugugccugggccaccacgccgugcccaacggcaccaucgugaagaccaucaccaacgaccagaucgaggugaccaacgccaccgagcuggugcagagcagcagcaccggcggcaucugcgacagcccccaccagauccuggacggcgagaacugcacccugaucgacgcccugcugggcgacccccagugcgacggcuuccagaacaagaagugggaccuguucguggagagaagcaaggccuacagcaacugcuaccccuacgacgugcccgacuacgccagccugagaagccugguggccagcagcggcacccuggaguucaacaacgagagcuucaacuggaccggcgugacccagaacggcaccagcagcgccugcaagagaagaagcaacaagagcuucuucagcagacugaacuggcugacccaccugaaguucaaguaccccgcccugaacgugaccaugcccaacaacgagaaguucgacaagcuguacaucuggggcgugcaccaccccggcaccgacaacgaccagaucagccuguacgcccaggccagcggcagaaucaccgugagcaccaagagaagccagcagaccgugauccccaacaucggcagcagacccagagugagagacgugcccagcagaaucagcaucuacuggaccaucgugaagcccggcgacauccugcugaucaacagcaccggcaaccugaucgcccccagaggcuacuucaagaucagaagcggcaagagcagcaucaugagaagcgacgcccccaucggcaagugcaacagcgagugcaucacccccaacggcagcauccccaacgacaagcccuuccagaacgugaacagaaucaccuacggcgccugccccagauacgugagacagaacacccugaagcuggccaccggcaugagaaacgugcccgagaagcagaccagaggcaucuucggcgccaucgccggcuucaucgagaacggcugggagggcaugguggacggcugguacggcuucagacaccagaacagcgagggcaccggccaggccgccgaccugaagagcacccaggccgccaucaaccagaucaacggcaagcugaacagacugaucggcaagaccaacgagaaguuccaccagaucgagaaggaguucagcgagguggagggcagaauccaggaccuggagaaguacguggaggacaccaagaucgaccuguggagcuacaacgccgagcugcugguggcccuggagaaccagcacaccaucgaccugaccgacagcgagaugaacaagcuguucgagagaaccaagaagcagcugagagagaacgccgaggacaugggcaacggcugcuucaagaucuaccacaagugcgacaacgccugcaucggcagcaucagaaacggcaccuacgaccacgacguguacagagacgaggcccugaacaacagauuccagaucaagggcguggagcugaagagcggcuacaaggacuggauccuguggaucagcuucgccaucagcugcuuccugcugugcguggcccugcugggcuucaucaugugggccugccagaagggcaacaucagaugcaacaucugcaucuga

SEQ ID NO: 166829 - RNA, 1701 nt, Artificial Sequence; identical to SEQ ID NO: 161855
  derived and/or modified CDS sequence (opt4) from hemagglutinin__InfluenzaA__AEG65329

SEQ ID NO: 166830 - RNA, 1701 nt, Artificial Sequence
  derived and/or modified CDS sequence (opt4) from hemagglutinin__InfluenzaA__AEG65340
augaagaccaucaucgcccugagcuacauccugugccugguguucgcccagaagcugcccggcaacgacaacagcaccgccacccugugccugggccaccacgccgugcccaacggcaccaucgugaagaccaucaccaacgaccagaucgaggugaccaacgccaccgagcuggugcagagcagcagcaccggcggcaucugcgacagcccccaccagauccuggacggcgagaacugcacccugaucgacgcccugcugggcgacccccagugcgacggcuuccagaacaagaagugggaccuguucguggagagaagcaaggccuacagcaacugcuaccccuacgacgugcccgacuacgccagccugagaagccugguggccagcagcggcacccuggaguucaacaacgagagcuucaacuggaccggcgugacccagaacggcaccagcagcgccugcgagagaagaagcaacaagagcuucuucagcagacugaacuggcugacccaccugaaguacaaguaccccgcccugaacgugaccaugcccaacaacgagaaguucgacaagcuguacaucuggggcgugcaccaccccggcaccgacagcgaccagaucagccuguacgcccaggccagcggcagaaucaccgugagcaccaagagaagccagcagaccgugauccccaacaucggcagcagacccagagugagagacgugagcagcagaaucagcaucuacuggaccaucgugaagcccggcgacauccugcugaucaacagcaccggcaaccugaucgcccccagaggcuacuucaagaucagaagcggcaagagcagcaucaugagaagcgacgcccccaucggcaagugcaacagcgagugcaucacccccaacggcagcauccccaacgacaagcccuuccagaacgugaacagaaucaccuacggcgccugccccagauacgugaagcagaacacccugaagcuggccaccggcaugagaaacgugcccgagaagcagaccagaggcaucuucggcgccaucgccggcuucaucgagaacggcugggagggcaugguggacggcugguacggcuucagacaccagaacagcgagggcaccggccaggccgccgaccugaagagcacccaggccgccaucaaccagaucaacggcaagcugaacagacugaucggcaagaccaacgagaaguuccaccagaucgagaaggaguucagcgagguggagggcagaauccaggaccuggagaaguacguggaggacaccaagaucgaccuguggagcuacaacgccgagcugcugguggcccuggagaaccagcacaccaucgaccugaccgacagcgagaugaacaagcuguucgagagaaccaagaagcagcugagagagaacgccgaggacaugggcaacggcugcuucaagaucuaccacaagugcgacaacgccugcaucgagagcaucagaaacggcaccuacgaccacgacguguacagagacgaggcccugaacaacagauuccagaucaagggcguggagcugaagagcggcuacaaggacuggauccuguggaucagcuucgccaucagcugcuuccugcugugcguggcccugcugggcuucaucaugugggccugccagaagggcaacaucagaugcaacaucugcaucuga

SEQ ID NO: 166831 - RNA, 1701 nt, Artificial Sequence; identical to SEQ ID NO: 161855
  derived and/or modified CDS sequence (opt4) from hemagglutinin__InfluenzaA__AEG65351

SEQ ID NO: 166832 - RNA, 1701 nt, Artificial Sequence; identical to SEQ ID NO: 161855
  derived and/or modified CDS sequence (opt4) from hemagglutinin__InfluenzaA__AEG65362

SEQ ID NO: 166833 - RNA, 1701 nt, Artificial Sequence; identical to SEQ ID NO: 166830
  derived and/or modified CDS sequence (opt4) from hemagglutinin__InfluenzaA__AEG65373

SEQ ID NO: 166834 - RNA, 1701 nt, Artificial Sequence; identical to SEQ ID NO: 160576
  derived and/or modified CDS sequence (opt4) from hemagglutinin__InfluenzaA__AEG65384

SEQ ID NO: 166835 - RNA, 1701 nt, Artificial Sequence; identical to SEQ ID NO: 160576
  derived and/or modified CDS sequence (opt4) from hemagglutinin__InfluenzaA__AEG65406

SEQ ID NO: 166836 - RNA, 1701 nt, Artificial Sequence; identical to SEQ ID NO: 160576
  derived and/or modified CDS sequence (opt4) from hemagglutinin__InfluenzaA__AEG65417

SEQ ID NO: 166837 - RNA, 1701 nt, Artificial Sequence; identical to SEQ ID NO: 160576
  derived and/or modified CDS sequence (opt4) from hemagglutinin__InfluenzaA__AEG65428

SEQ ID NO: 166838 - RNA, 1701 nt, Artificial Sequence
  derived and/or modified CDS sequence (opt4) from hemagglutinin__InfluenzaA__AEG65439
augaagaccaucaucgcccugagcuacauccugugccugguguucgcccagaagcugcccggcaacgacaacagcaccgccacccugugccugggccaccacgccgugcccaacggcaccaucgugaagaccaucaccaacgaccagaucgaggugaccaacgccaccgagcuggugcagagcagcagcaccggcggcaucugcgacagcccccaccagauccuggacggcgagaacugcacccugaucgacgcccugcugggcgacccccagugcgacggcuuccagaacaagaagugggaccuguucguggagagaagcaaggccuacagcaacugcuaccccuacgacgugcccgacuacgccagccugagaagccugguggccagcagcggcacccuggaguucaacaacgagagcuucaacuggaccggcgugacccagaacggcaccagcagcgccugcaagagaagaagcaacaacagcuucuucagcagacugaacuggcugacccaccugaaguucaaguaccccgcccugaacgugaccaugcccaacaacgagaaguucgacaagcuguacaucuggggcgugcaccaccccggcaccgacaacgaccagaucuuccuguacgcccaggccagcggcagaaucaccgugagcaccaagagaagccagcagaccgugauccccaacaucggcagcagacccagagugagaaacauccccagcagaaucagcaucuacuggaccaucgugaagcccggcgacauccugcugaucaacagcaccggcaaccugaucgcccccagaggcuacuucaagaucagaagcggcaagagcagcaucaugagaagcgacgcccccaucggcaagugcaacagcgagugcaucacccccaacggcagcauccccaacgacaagcccuuccagaacgugaacagaaucaccuacggcgccugccccagauacgugaagcagaacacccugaagcuggccaccggcaugagaaacgugcccgagaagcagaccagaggcaucuucggcgccaucgccggcuucaucgagaacggcugggagggcaugguggacggcugguacggcuucagacaccagaacagcgagggcgugggccaggccgccgaccugaagagcacccaggccgccaucaaccagaucaacggcaagcugaacagacugaucggcaagaccaacgagaaguuccaccagaucgagaaggaguucagcgagguggagggcagaauccaggaccuggagaaguacguggaggacaccaagaucgaccuguggagcuacaacgccgagcugcugguggcccuggagaaccagcacaccaucgaccugaccgacagcgagaugaacaagcuguucgagagaaccaagaagcagcugagagagaacgccgaggacaugggcaacggcugcuucaagaucuaccacaagugcgacaacgccugcaucggcagcaucagaaacggcaccuacgaccacgacguguacagagacgaggcccugaacaacagauuccagaucaagggcguggagcugaagagcggcuacaaggacuggauccuguggaucagcuucgccaucagcugcuuccugcugugcguggcccugcugggcuucaucaugugggccugccagaagggcaacaucagaugcaacaucugcaucuga

SEQ ID NO: 166839 - RNA, 1701 nt, Artificial Sequence
  derived and/or modified CDS sequence (opt4) from hemagglutinin__InfluenzaA__AEG65450
augaagaccaucaucgccuggagcuacauccugugccugguguucgcccagaagcugcccggcaacgacaacagcaccgccacccugugccugggccaccacgccgugcccaacggcaccaucgugaagaccaucaccaacgaccagaucgaggugaccaacgccaccgagcuggugcagagcagcagcaccggcggcaucugcgacagcccccaccagauccuggacggcgagaacugcacccugaucgacgcccugcugggcgacccccagugcgacggcuuccagaacaagaagugggaccuguucguggagagaagcaaggccuacagcaacugcuaccccuacgacgugcccgacuacgccagccugagaagccugaucgccagcagcggcacccuggaguucaacaacgagagcuucaacuggaccggcgugacccagaacggcaccagcagcgccugcaagagaagaagcaacagcagcuucuucagcagacugaacuggcugacccaccugaaguucaaguaccccgcccugaacgugaccaugcccaacaacgaggaguucgacaagcuguacaucuggggcgugcaccaccccggcaccuacaacgaccagaucagccuguacgcccaggccagcggcagaaucaccgugagcaccaagagaagccagcagaccgugauccccaacaucggcagcagacccagagugagagacauccccagcagaaucagcaucuacuggaccaucgugaagcccggcgacauccugcugaucaacagcaccggcaaccugaucgcccccagaggcuacuucaagaucagaagcggcaagagcagcaucaugagaagcgacgcccccaucggcaagugcaacagcgagugcaucacccccaacggcagcauccccaacgacaagcccuuccagaacgugaacagaaucaccuacggcgccugccccagauacgugaagcagaacacccugaagcuggccaccggcaugagaaacgugcccgagaagcagaccagaggcaucuucggcgccaucgccggcuucaucgagaacggcugggagggcaugguggacggcugguacggcuucagacaccagaacagcgagggcaucggccaggccgccgaccugaagagcacccaggccgccaucgaccagaucaacggcaagcugaacagacugaucggcaagaccaacgagaaguuccaccagaucgagaaggaguucagcgagguggagggcagaauccaggaccuggagaaguacguggaggacaccaagaucgaccuguggagcuacaacgccgagcugcugguggcccuggagaaccagcacaccaucgaccugaccgacagcgagaugaacaagcuguucgagagaaccaagaagcagcugagagagaacgccgaggacaugggcaacggcugcuucaagaucuaccacaagugcgacaacgccugcaucggcagcaucagaaacggcaccuacgaccacgacguguacagagacgaggcccugaacaacagauuccagaucaagggcguggagcugaagagcggcuacaaggacuggauccuguggaucagcuucgccaucagcugcuuccugcugugcguggcccugcugggcuucaucaugugggccugccagaagggcaacaucagaugcaacaucugcaucuga

SEQ ID NO: 166840 - RNA, 1701 nt, Artificial Sequence; identical to SEQ ID NO: 166839
  derived and/or modified CDS sequence (opt4) from hemagglutinin__InfluenzaA__AEG65461

SEQ ID NO: 166841 - RNA, 1701 nt, Artificial Sequence
  derived and/or modified CDS sequence (opt4) from hemagglutinin__InfluenzaA__AEG65472
augaagaccaucaucgccuggagcuacauccugugccugguguucgcccagaagcugcccggcaacgacaacagcaccgccacccugugccugggccaccacgccgugcccaacggcaccaucgugaagaccaucaccaacgaccagaucgaggugaccaacgccaccgagcuggugcagagcagcagcaccggcggcaucugcgacagcccccaccagauccuggacggcgagaacugcacccugaucgacgcccugcugggcgacccccagugcgacggcuuccagaacaagaagugggaccuguucguggagagaagcaaggccuacagcaacugcuaccccuacgacgugcccgacuacgccagccugagaagccugaucgccagcagcggcacccuggaguucaacaacgagagcuucaacuggaccggcgugacccagaacggcaccagcagcgccugcaagagaagaagcaacagcagcuucuucagcagacugaacuggcugacccaccugaaguucaaguaccccgcccugaacgugaccaugcccaacaacgaggaguucgacaagcuguacaucuggggcgugcaccaccccggcaccuacaacgaccagaucagccuguacgcccaggccagcggcagaaucaccgugagcaccaagagaagccagcagaccgugauccccaacaucggcagcagacccagagugagagacauccccagcagaaucagcaucuacuggaccaucgugaagcccggcgacauccugcugaucaacagcaccggcaaccugaucgcccccagaggcuacuucaagaucagaagcggcaagagcagcaucaugagaagcgacgcccccaucggcaagugcaacagcgagugcaucacccccaacggcagcauccccaacgacaagcccuuccagaacgugaacagaaucaccuacggcgccugccccagauacgugaagcagaacacccugaagcuggccaccggcaugagaaacgugcccgagaagcagaccagaggcaucuucggcgccaucgccggcuucaucgagaacggcugggagggcaugguggacggcugguacggcuucagacaccagaacagcgagggcaucggccaggccgccgaccugaagagcacccaggccgccaucgaccagaucaacggcaagcugaacagacugaucggcaagaccaacgagaaguuccaccagaucgagaaggaguucagcgagguggagggcagaauccaggaccuggagaaguacguggaggacaccaagaucgaccuguggagcuacaacgccgagcugcugguggcccuggagaaccagcacaccaucgaccugaccgacagcgagaugaacaagcuguucgagaucaccaagaagcagcugagagagaacgccgaggacaugggcaacggcugcuucaagaucuaccacaagugcgacaacgccugcaucggcagcaucagaaacggcaccuacgaccacgacguguacagagacgaggcccugaacaacagauuccagaucaagggcguggagcugaagagcggcuacaaggacuggauccuguggaucagcuucgccaucagcugcuuccugcugugcguggcccugcugggcuucaucaugugggccugccagaagggcaacaucagaugcaacaucugcaucuga

SEQ ID NO: 166842 - RNA, 1701 nt, Artificial Sequence; identical to SEQ ID NO: 166839
  derived and/or modified CDS sequence (opt4) from hemagglutinin__InfluenzaA__AEG65483

SEQ ID NO: 166843 - RNA, 1701 nt, Artificial Sequence; identical to SEQ ID NO: 166839
  derived and/or modified CDS sequence (opt4) from hemagglutinin__InfluenzaA__AEG65494

SEQ ID NO: 166844 - RNA, 1701 nt, Artificial Sequence; identical to SEQ ID NO: 166839
  derived and/or modified CDS sequence (opt4) from hemagglutinin__InfluenzaA__AEG65505

SEQ ID NO: 166845 - RNA, 1701 nt, Artificial Sequence; identical to SEQ ID NO: 166839
  derived and/or modified CDS sequence (opt4) from hemagglutinin__InfluenzaA__AEG65516

SEQ ID NO: 166846 - RNA, 1701 nt, Artificial Sequence; identical to SEQ ID NO: 166839
  derived and/or modified CDS sequence (opt4) from hemagglutinin__InfluenzaA__AEG65527

SEQ ID NO: 166847 - RNA, 1701 nt, Artificial Sequence; identical to SEQ ID NO: 166839
  derived and/or modified CDS sequence (opt4) from hemagglutinin__InfluenzaA__AEG65538

SEQ ID NO: 166848 - RNA, 1701 nt, Artificial Sequence
  derived and/or modified CDS sequence (opt4) from hemagglutinin__InfluenzaA__AEG65560
augaagaccaucaucgcccugagcuacauccugugccugguguucgcccagaagcugcccggcaacgacaacagcaccgccacccugugccugggccaccacgccgugcccaacggcaccaucgugaagaccaucaccaacgaccagaucgaggugaccaacgccaccgagcuggugcagagcagcagcaccggcggcaucugcgacagcccccaccagauccuggacggcgagaacugcacccugaucgacgcccugcugggcgacccccagugcgacggcuuccagaacaagaagugggaccuguucguggagagaagcaaggccuacagcaacugcuaccccuacgacgugcccgacuacgccagccugagaagccugaucgccagcagcggcacccuggaguucaacaacgagagcuucaacuggaccggcgugacccagaacggcaccagcagcgccugcaagagaagaagcaacagcagcuucuucagcagacugaacuggcugacccaccugaaguucaaguaccccgcccugaacgugaccaugcccaacaacgaggaguucgacaagcuguacaucuggggcgugcaccaccccggcaccuacaacgaccagaucagccuguacgcccaggccagcggcagaaucaccgugagcaccaagagaagccagcagaccgugauccccaacaucggcagcagacccagagugagagacauccccagcagaaucagcaucuacuggaccaucgugaagcccggcgacauccugcugaucaacagcaccggcaaccugaucgcccccagaggcuacuucaagaucagaagcggcaagagcagcaucaugaagagcgacgcccccaucggcaagugcaacagcgagugcaucacccccaacggcagcauccccaacgacaagcccuuccagaacgugaacagaaucaccuacggcgccugccccagauacgugaagcagaacacccugaagcuggccaccggcaugagaaacgugcccgagaagcagaccagaggcaucuucggcgccaucgccggcuucaucgagaacggcugggagggcaugguggacggcugguacggcuucagacaccagaacagcgagggcaucggccaggccgccgaccugaagagcacccaggccgccaucgaccagaucaacggcaagcugaacagacugaucggcaagaccaacgagaaguuccaccagaucgagaaggaguucagcgagguggagggcagaauccaggaccuggagaaguacguggaggacaccaagaucgaccuguggagcuacaacgccgagcugcugguggcccuggagaaccagcacaccaucgaccugaccgacagcgagaugaacaagcuguucgagagaaccaagaagcagcugagagagaacgccgaggacaugggcaacggcugcuucaagaucuaccacaagugcgacaacgccugcaucggcagcaucagaaacggcaccuacgaccacgacguguacagagacgaggcccugaacaacagauuccagaucaagggcguggagcugaagagcggcuacaaggacuggauccuguggaucagcuucgccaucagcugcuuccugcugugcguggcccugcugggcuucaucaugugggccugccagaagggcaacaucagaugcaacaucugcaucuga

SEQ ID NO: 166849 - RNA, 1701 nt, Artificial Sequence; identical to SEQ ID NO: 166848
  derived and/or modified CDS sequence (opt4) from hemagglutinin__InfluenzaA__AEG65571

SEQ ID NO: 166850 - RNA, 1701 nt, Artificial Sequence; identical to SEQ ID NO: 166848
  derived and/or modified CDS sequence (opt4) from hemagglutinin__InfluenzaA__AEG65582

SEQ ID NO: 166851 - RNA, 1701 nt, Artificial Sequence; identical to SEQ ID NO: 166848
  derived and/or modified CDS sequence (opt4) from hemagglutinin__InfluenzaA__AEG65593

SEQ ID NO: 166852 - RNA, 1701 nt, Artificial Sequence
  derived and/or modified CDS sequence (opt4) from hemagglutinin__InfluenzaA__AEG65604
augaagaccaucaucgcccugagcuacauccugugccugguguucgcccagaagcugcccggcaacgacaacagcaccgccacccugugccugggccaccacgccgugcccaacggcaccaucgugaagaccaucaccaacgaccagaucgaggugaccaacgccaccgagcuggugcagagcagcagcaccggcggcaucugcgacagcccccaccagauccuggacggcgagaacugcacccugaucgacgcccugcugggcgacccccagugcgacggcuuccagaacaagaagugggaccuguucguggagagaagcaaggccuacagcaacugcuaccccuacgacgugcccgacuacgccagccugagaagccugaucgccagcagcggcacccuggaguucaacaacgagagcuucaacuggaccggcgugacccagaacggcaccagcagcgccugcaagagaagaagcaacaacagcuucuucagcagacugaacuggcugacccaccugaaguucaaguaccccgcccugaacgugaccaugcccaacaacgaggaguucgacaagcuguacaucuggggcgugcaccaccccggcaccgacaacgaccagaucagccuguacgcccaggccagcggcaagaucaccgugagcaccaagagaagccagcagaccgugauccccaacaucggcagcagacccagagugagagacauccccagcagaaucagcaucuacuggaccaucgugaagcccggcgacauccugcugaucaacagcaccggcaaccugaucgcccccagaggcuacuucaagaucagaagcggcaagagcagcaucaugagaagcgacgcccccaucggcaagugcaacagcgagugcaucacccccaacggcagcauccccaacgacaagcccuuccagaacgugaacagaaucaccuacggcgccugccccagauacgugaagcagaacacccugaagcuggccaccggcaugagaaacgugcccgagaagcagaccagaggcaucuucggcgccaucgccggcuucaucgagaacggcugggagggcaugguggacggcugguacggcuucagacaccagaacagcgagggcaucggccaggccgccgaccugaagagcacccaggccgccaucgaccagaucaacggcaagcugaacagacugaucggcaagaccaacgagaaguuccaccagaucgagaaggaguucagcgagguggagggcagaauccaggaccuggagaaguacguggaggacaccaagaucgaccuguggagcuacaacgccgagcugcugguggcccuggagaaccagcacaccaucgaccugaccgacagcgagaugaacaagcuguucgagagaaccaagaagcagcugagagagaacgccgaggacaugggcaacggcugcuucaagaucuaccacaagugcgacaacgccugcaucggcagcaucagaaacggcaccuacgaccacgacguguacagagacgaggcccugaacaacagauuccagaucaagggcguggagcugaagagcggcuacaaggacuggauccuguggaucagcuucgccaucagcugcuuccugcugugcguggcccugcugggcuucaucaugugggccugccagaagggcaacaucagaugcaacaucugcaucuga

SEQ ID NO: 166853 - RNA, 1701 nt, Artificial Sequence
  derived and/or modified CDS sequence (opt4) from hemagglutinin__InfluenzaA__AEG65626
augaagaccaucaucgcccugagcuacauccugugccugguguucgcccagaagcugcccggcaacgacaacagcaccgccacccugugccugggccaccacgccgugcccaacggcaccaucgugaagaccaucaccaacgaccagaucgaggugaccaacgccaccgagcuggugcagagcagcagcaccggcggcaucugcgacagcccccaccagauccuggacggcgagaacugcacccugaucgacgcccugcugggcgacccccagugcgacggcuuccagaacaagaagugggaccuguucguggagagaagcaaggccuacagcaacugcuaccccuacgacgugcccgacuacgccagccugagaagccugguggccagcagcggcacccuggaguucaacaacgagagcuucaacuggaccggcgugacccagaacggcaccagcagcgccugcaagagaaagagcaacaacagcuucuucagcagacugaacuggcugacccaccugaaguucaaguaccccgcccugaacgugaccaugcccaacaacaagaaguucgacaagcuguacaucuggggcgugcaccaccccggcaccgacaacgaccagaucagccuguacgcccaggccagcggcagaaucaccgugagcaccaagagaagccagcagaccgugauccccaacaucggcagcagacccagagugagagacauccccagcagaaucagcaucuacuggaccaucgugaagcccggcgacaugcugcugaucaacagcaccggcaaccugaucgcccccagaggcuacuucaagaucagaagcggcaagagcagcaucaugagaagcgacgcccccaucggcaagugcaacagcgagugcaucacccccaacggcagcauccccaacgacaagcccuuccagaacgugaacagaaucaccuacggcgccugccccagauacgugaagcagaacacccugaagcuggccaccggcaugagaaacgugcccgagaagcagaccagaggcaucuucggcgccaucgccggcuucaucgagaacggcugggagggcaugguggacggcugguacggcuucagacaccagaacagcgagggcaccggccaggccgccgaccugaagagcacccaggccgccaucaaccagaucaacggcaagcugaacagacugaucggcaagaccaacgagaaguuccaccagaucgagaaggaguucagcgagguggagggcagaauccaggaccuggagaaguacguggaggacaccaagaucgaccuguggagcuacaacgccgagcugcugguggcccuggagaaccagcacaccaucgaccugaccgacagcgagaugaacaagcuguucgagagaaccaagaagcagcugagagagaacgccgaggacaugggcaacggcugcuucaagaucuaccacaagugcgacaacgccugcaucggcagcaucagaaacggcaccuacgaccacgacguguacagagacgaggcccugaacaacagauuccagaucaagggcguggagcugaagagcggcuacaaggacuggauccuguggaucagcuucgccaucagcugcuuccugcugugcguggcccugcugggcuucaucaugugggccugccagaagggcaacaucagaugcaacaucugcaucuga

SEQ ID NO: 166854 - RNA, 1701 nt, Artificial Sequence
  derived and/or modified CDS sequence (opt4) from hemagglutinin__InfluenzaA__AEG65637
augaagaccaucaucgcccugagcuacauccugugccugguguucgcccagaagcugcccggcaacgacaacagcaccgccacccugugccugggccaccacgccgugcccaacggcaccaucgugaagaccaucaccaacgaccagaucgaggugaccaacgccaccgagcuggugcagagcagcagcaccggcggcaucugcgacagcccccaccagauccuggacggcgagaacugcacccugaucgacgcccugcugggcgacccccagugcgacggcuuccagaacaagaagugggaccuguucguggagagaagcaaggccuacagcaacugcuaccccuacgacgugcccgacuacgccagccugagaagccugguggccagcagcggcacccuggaguucaacaacgagagcuucaacuggaccggcgugacccagaacggcaccagcagcgccugcaagagaaagagcaacaacagcuucuucagcagacugaacuggcugacccaccugaaguucaaguaccccgcccugaacgugaccaugcccaacaacaagaaguucgacaagcuguacaucuggggcgugcaccaccccggcaccgacaacgaccagaucagccuguacgcccaggccagcggcagaaucaccgugagcaccaagagaagccagcagaccgugauccccaacaucggcagcagacccagagugagagacauccccagcagaaucagcaucuacuggaccaucgugaagcccggcgacaugcugcugaucaacagcaccggcaaccugaucgcccccagaggcuacuucaagaucagaagcggcagaagcagcaucaugagaagcgacgcccccaucggcaagugcaacagcgagugcaucacccccaacggcagcauccccaacgacaagcccuuccagaacgugaacagaaucaccuacggcgccugccccagauacgugaagcagaacacccugaagcuggccaccggcaugagaaacgugcccgagaagcagaccagaggcaucuucggcgccaucgccggcuucaucgagaacggcugggagggcaugguggacggcugguacggcuucagacaccagaacagcgagggcaccggccaggccgccgaccugaagagcacccaggccgccaucaaccagaucaacggcaagcugaacagacugaucggcaagaccaacgagaaguuccaccagaucgagaaggaguucagcgagguggagggcagaauccaggaccuggagaaguacguggaggacaccaagaucgaccuguggagcuacaacgccgagcugcugguggcccuggagaaccagcacaccaucgaccugaccgacagcgagaugaacaagcuguucgagagaaccaagaagcagcugagagagaacgccgaggacaugggcaacggcugcuucaagaucuaccacaagugcgacaacgccugcaucggcagcaucagaaacggcaccuacgaccacgacguguacagagacgaggcccugaacaacagauuccagaucaagggcguggagcugaagagcggcuacaaggacuggauccuguggaucagcuucgccaucagcugcuuccugcugugcguggcccugcugggcuucaucaugugggccugccagaagggcaacaucagaugcaacaucugcaucuga

SEQ ID NO: 166855 - RNA, 1701 nt, Artificial Sequence; identical to SEQ ID NO: 160091
  derived and/or modified CDS sequence (opt4) from hemagglutinin__InfluenzaA__AEG65648

SEQ ID NO: 166856 - RNA, 1701 nt, Artificial Sequence; identical to SEQ ID NO: 161855
  derived and/or modified CDS sequence (opt4) from hemagglutinin__InfluenzaA__AEG65659

SEQ ID NO: 166857 - RNA, 1701 nt, Artificial Sequence; identical to SEQ ID NO: 161855
  derived and/or modified CDS sequence (opt4) from hemagglutinin__InfluenzaA__AEG65670

SEQ ID NO: 166858 - RNA, 1701 nt, Artificial Sequence; identical to SEQ ID NO: 161855
  derived and/or modified CDS sequence (opt4) from hemagglutinin__InfluenzaA__AEG65681

SEQ ID NO: 166859 - RNA, 1701 nt, Artificial Sequence; identical to SEQ ID NO: 166830
  derived and/or modified CDS sequence (opt4) from hemagglutinin__InfluenzaA__AEG65692

SEQ ID NO: 166860 - RNA, 1701 nt, Artificial Sequence; identical to SEQ ID NO: 160690
  derived and/or modified CDS sequence (opt4) from hemagglutinin__InfluenzaA__AEG65703

SEQ ID NO: 166861 - RNA, 1701 nt, Artificial Sequence
  derived and/or modified CDS sequence (opt4) from hemagglutinin__InfluenzaA__AEG65747
augaagaccaucaucgcccugagcuacauccugugccugguguucgcccagaagcugcccggcaacgacaacagcaccgccacccugugccugggccaccacaccgugcccaacggcaccaucgugaagaccaucaccaacgaccagaucgaggugaccaacgccaccgagcuggugcagagcagcagcaccggcgagaucugcgacagcccccaccagauccuggacggcgagaacugcacccugaucgacgcccugcugggcgacccccagugcgacggcuuccagaacaagaagugggaccuguucguggagagaagcaaggccuacagcaacugcuaccccuacgacgugcccgacuacgccagccugagaagccugguggccagcagcggcacccuggaguucaacaacgagagcuucaacuggaccggcgugacccagaacggcaccagcagcgccugcaagagaagaagcaacaacagcuucuucagcagacugaacuggcugacccaccugaaguucaaguaccccgcccugaacgugaccaugcccaacaacgagaaguucgacaagcuguacaucuggggcgugcaccaccccggcaccgacaacgaccagaucuuccuguacgcccaggccagcggcagaaucaccgugagcaccaagagaagccagcagaccgugauccccaacaucggcagcagacccagagugagaaacauccccagcagaaucagcaucuacuggaccaucgugaagcccggcgacauccugcugaucaacagcaccggcaaccugaucgcccccagaggcuacuucaagaucagaagcggcaagagcagcaucaugagaagcgacgcccccaucggcaagugcaacagcgagugcaucacccccaacggcagcauccccaacgacaagcccuuccagaacgugaacagaaucaccuacggcgccugccccagauacgugaagcagaacacccugaagcuggccaccggcaugagaaacgugcccgagaagcagaccagaggcaucuucggcgccaucgccggcuucaucgagaacggcugggagggcaugguggacggcugguacggcuucagacaccagaacagcgagggcaccggccaggccgccgaccugaagagcacccaggccgccaucaaccagaucaacggcaagcugaacagacugaucggcaagaccaacgagaaguuccaccagaucgagaaggaguucagcgagguggagggcagaauccaggaccuggagaaguacguggaggacaccaagaucgaccuguggagcuacaacgccgagcugcugguggcccuggagaaccagcacaccaucgaccugaccgacagcgagaugaacaagcuguucgagagaaccaagaagcagcugagagagaacgccgaggacaugggcaacggcugcuucaagaucuaccacaagugcgacaacgccugcaucggcagcaucagaaacggcaccuacgaccacgacguguacagagacgaggcccugaacaacagauuccagaucaagggcguggagcugaagagcggcuacaaggacuggauccuguggaucagcuucgccaucagcugcuuccugcugugcguggcccugcugggcuucaucaugugggccugccagaagggcaacaucagaugcaacaucugcaucuga

SEQ ID NO: 166862 - RNA, 1701 nt, Artificial Sequence
  derived and/or modified CDS sequence (opt4) from hemagglutinin__InfluenzaA__AEG65758
augaagaccaucaucgcccugagcuacauccugugccuggugagcgcccagaagcugcccggcaacgacaacagcaccgccacccugugccugggccaccacgccgugcccaacggcaccaucgugaagaccaucaccaacgaccagaucgaggugaccaacgccaccgagcuggugcagagcagcagcaccggcggcaucugcgacagcccccaccagauccuggacggcgagaacugcacccugaucgacgcccugcugggcgacccccagugcgacggcuuccagaacaagaagugggaccuguucguggagagaagcaaggccuacagcaacugcuaccccuacgacgugcccgacuacgccagccugagaagccugguggccagcagcggcacccuggaguucaacaacgagagcuucaacuggaccggcgugacccagaacggcaccagcagcgccugcaagagaagaagcaacaacagcuucuucagcagacugaacuggcugacccaccugaaguucaaguaccccgcccugaacgugaccaugcccaacaacgagaaguucgacaagcuguacaucuggggcgugcaccaccccggcaccgacaacgaccagaucuuccuguacgcccaggccagcggcagaaucaccgugagcaccaagagaagccagcagaccgugauccccaacaucggcagcagacccagagugagaaacauccccagcagaaucagcaucuacuggaccaucgugaagcccggcgacauccugcugaucaacagcaccggcaaccugaucgcccccagaggcuacuucaagaucagaagcggcaagagcagcaucaugagaagcgacgcccccaucggcaagugcaacagcgagugcaucacccccaacggcagcauccccaacgacaagcccuuccagaacgugaacagaaucaccuacggcgccugccccagauacgugaagcagaacacccugaagcuggccaccggcaugagaaacgugcccgagaagcagaccagaggcaucuucggcgccaucgccggcuucaucgagaacggcugggagggcaugguggacggcugguacggcuucagacaccagaacagcgagggcaucggccaggccgccgaccugaagagcacccaggccgccaucaaccagaucaacggcaagcugaacagacugaucggcaagaccaacgagaaguuccaccagaucgagaaggaguucagcgagguggagggcagaauccaggaccuggagaaguacguggaggacaccaagaucgaccuguggagcuacaacgccgagcugcugguggcccuggagaaccagcacaccaucgaccugaccgacagcgagaugaacaagcuguucgagagaaccaagaagcagcugagagagaacgccgaggacaugggcaacggcugcuucaagaucuaccacaagugcgacaacgccugcaucggcagcaucagaaacggcaccuacgaccacgacguguacagagacgaggcccugaacaacagauuccagaucaagggcguggagcugaagagcggcuacaaggacuggauccuguggaucagcuucgccaucagcugcuuccugcugugcguggcccugcugggcuucaucaugugggccugccagaagggcaacaucagaugcaacaucugcaucuga

SEQ ID NO: 166863 - RNA, 1701 nt, Artificial Sequence; identical to SEQ ID NO: 160341
  derived and/or modified CDS sequence (opt4) from hemagglutinin__InfluenzaA__AEG65769

SEQ ID NO: 166864 - RNA, 1701 nt, Artificial Sequence
  derived and/or modified CDS sequence (opt4) from hemagglutinin__InfluenzaA__AEG65780
augaagaccaucaucgcccugagcuacauccugugccugguguucgcccagaagcugcccggcaacgacaacagcaccgccacccugugccugggccaccacgccgugcccaacggcaccaucgugaagaccaucaccaacgacaagaucgaggugaccaacgccaccgagcuggugcagagcagcagcaccggcgagaucugcaacagcccccaccagauccuggacggcgagaacugcacccugaucgacgcccugcugggcgacccccagugcgacggcuuccagaacaagaagugggaccuguucguggagagaagcaaggcccacagcaacugcuaccccuacgacgugcccgacuacgccagccugagaagccugguggccgccagcggcacccuggaguucaacaacgagagcuucaacuggaccggcgugacccagaacggcaccagcagcgccugcaucagaagaagcaacaacagcuucuucagcagacugaacuggcugacccaccugaacuucaaguaccccgcccugaacgugaccaugcccaacaacgagcaguucgacaagcuguacaucuggggcgugcaccaccccggcaccgacaaggaccagaucuuccuguacgcccaggccgccggcagaaucaccgugagcaccaagagaagccagcaggccgugauccccaacaucggcagcagacccagagugagaaacauccccagcagagugagcaucuacuggaccaucgugaagcccggcgacauccugcugaucaacagcaccggcaaccugaucgcccccagaggcuacuucaagaucagaagcggcaagagcagcaucaugagaagcgacgcccccaucggcaagugcaacagcgccugcaucacccccaacggcagcauccccaacgacaagcccuuccagaacgugaacagaaucaccuacggcgccugccccagauacgugaagcagaacacccugaagcuggccaccggcaugagaaacgugcccgagaagcagaccagaggcaucuucggcgccaucgccggcuucaucgagaacggcugggagggcaugguggacggcugguacggcuucagacaccagaacagcgagggcagaggccaggccgccgaccugaagagcacccaggccgccaucgaccagaucaacggcaagcugaacagacugaucggcaagaccaacgagaaguuccaccagaucgagaaggaguucagcgagguggagggcagaauccaggaccuggagaaguacguggaggacaccaagaucgaccuguggagcuacaacgccgagcugcugguggcccuggagaaccagcacaccaucgaccugaccgacagcgagaugaacaagcuguucgagaagaccaagaagcagcugagagagaacgccgaggacaugggcaacggcugcuucaagaucuaccacaagugcgacaacgccugcaucggcagcaucagaaacggcaccuacgaccacgacguguacagagacgaggcccugaacaacagauuccagaucaagggcguggagcugaagagcggcuacaaggacuggauccuguggaucagcuucgccaucagcugcuuccugcugugcguggcccugcugggcuucaucaugugggccugccagaagggcaacaucagaugcaacaucugcaucuga

SEQ ID NO: 166865 - RNA, 1701 nt, Artificial Sequence
  derived and/or modified CDS sequence (opt4) from hemagglutinin__InfluenzaA__AEG65813
augaagaccaucaucgcccugagcuacauccugugccugguguucgcccagaagcugcccggcaacgacaacagcaccgccacccugugccugggccaccacgccgugcccaacggcaccaucgugaagaccaucaccaacgaccagaucgaggugaccaacgccaccgagcuggugcagagcagcagcaccggcgagaucugcaacagcccccaccagauccuggacggcgagaacugcacccugaucgacgcccugcugggcgacccccagugcgacggcuuccagaacaagaagugggaccuguucguggagagaagcaaggcccacagcaacugcuaccccuacgacgugcccgacuacgccagccugagaagccugguggccagcagcggcacccuggaguucaacaacgagagcuucaacuggaccggcgugacccagaacggcaccagcagcgccugcaucagaagaagcaacaacagcuucuucagcagacugaacuggcugacccaccugaacuucaaguaccccgcccugaacgugaccaugcccaacaacgagcaguucgacaagcuguacaucuggggcgugcaccaccccggcaccgacaaggaccagaucuuccuguacgcccaggccgccggcagaaucaccgugagcaccaagagaagccagcaggccgugauccccaacaucggcagcagacccagagugagaaacauccccagcagagugagcaucuacuggaccaucgugaagcccggcgacauccugcugaucaacagcaccggcaaccugaucgcccccagaggcuacuucaagaucagaagcggcaagagcagcaucaugagaagcgacgcccccaucggcaagugcaacagcgccugcaucacccccaacggcagcauccccaacgacaagcccuuccagaacgugaacagaaucaccuacggcgccugccccagauacgugaagcagaacacccugaagcuggccaccggcaugagaaacgugcccgagaagcagaccagaggcaucuucggcgccaucgccggcuucaucgagaacggcugggagggcaugguggacggcugguacggcuucagacaccagaacagcgagggcagaggccaggccgccgaccugaagagcacccaggccgccaucgaccagaucaacggcaagcugaacagacugaucggcaagaccaacgagaaguuccaccagaucgagaaggaguucagcgagguggagggcagaauccaggaccuggagaaguacguggaggacaccaagaccgaccuguggagcuacaacgccgagcugcugguggcccuggagaaccagcacaccaucgaccugaccgacagcgagaugaacaagcuguucgagaagaccaagaagcagcugagagagaacgccgaggacaugggcaacggcugcuucaagaucuaccacaagugcgacaacgccugcaucggcagcaucagaaacggcaccuacgaccacgacguguacagagacgaggcccugaacaacagauuccagaucaagggcguggagcugaagagcggcuacaaggacuggauccuguggaucagcuucgccaucagcugcuuccugcugugcguggcccugcugggcuucaucaugugggccugccagaagggcaacaucagaugcaacaucugcaucuga

SEQ ID NO: 166866 - RNA, 1701 nt, Artificial Sequence
  derived and/or modified CDS sequence (opt4) from hemagglutinin__InfluenzaA__AEG79801
augaaggccauccugguggugcugcuguacaccuucgccaccgccaacgccgacacccugugcaucggcuaccacgccaacaacagcaccgacaccguggacaccgugcuggagaagaacgugaccgugacccacagcgugaaccugcuggaggacaagcacaacggcaagcugugcaagcugagaggcguggccccccugcaccugggcaagugcaacaucgccggcuggauccugggcaaccccgagugcgagagccugagcaccgccagcagcuggagcuacaucguggagaccagcagcagcgacaacggcaccugcuaccccggcgacuucaucaacuacgaggagcugagagagcagcugagcagcgugagcagcuucgagagauucgagaucuuccccaagaccagcagcuggcccaaccacgacagcaacaagggcgugaccgccgccugcccccacgccggcgccaagagcuucuacaagaaccugaucuggcuggugaagaagggcaacagcuaccccaagcugagcaagagcuacaucaacgacaagggcaaggaggugcuggugcuguggggcauccaccaccccagcaccaccgccgaccagcagagccuguaccagaacgccgacgccuacguguucgugggcaccagcagauacagcaagaaguucaagcccgagaucgccaucagacccaaggugagagacagagagggcagaaugaacuacuacuggacccugguggagcccggcgacaagaucaccuucgaggccaccggcaaccugguggugcccagauacgccuucgccauggagagaaacgccggcagcggcaucaucaucagcgacacccccgugcacgacugcaacaccaccugccagacccccaagggcgccaucaacaccagccugcccuuccagaacauccaccccaucaccaucggcaagugccccaaguacgugaagagcaccaagcugagacuggccaccggccugagaaacgugcccagcauccagagcagaggccuguucggcgccaucgccggcuucaucgagggcggcuggaccggcaugguggacggcugguacggcuaccaccaccagaacgagcagggcagcggcuacgccgccgaccugaagagcacccagaacgccaucgacaagaucaccaacaaggugaacagcgugaucgagaagaugaacacccaguucaccgccgugggcaaggaguucaaccaccuggagaagagaaucgagaaccugaacaagaagguggacgacggcuuccuggacaucuggaccuacaacgccgagcugcuggugcugcuggagaacgagagaacccuggacuaccacgacagcaacgugaagaaccuguacgagaaggugagaaaccagcugaagaacaacgccaaggagaucggcaacggcugcuucgaguucuaccacaagugcgacaacaccugcauggagagcgugaagaacggcaccuacgacuaccccaaguacagcgaggaggccaagcugaacagagaggagaucgacggcgugaagcuggagagcaccagaaucuaccagauccuggccaucuacagcaccguggccagcagccuggugcugguggugagccugggcgccaucagcuucuggaugugcagcaacggcagccugcagugcagaaucugcaucuga

SEQ ID NO: 166867 - RNA, 1701 nt, Artificial Sequence
  derived and/or modified CDS sequence (opt4) from hemagglutinin__InfluenzaA__AEG79807
augaaggccauccugguggugcugcuguacaccuucgccaccgccaacgccgacacccugugcaucggcuaccacgccaacaacagcaccgacaccguggacaccgugcuggagaagaacgugaccgugacccacagcgugaaccugcuggaggacaagcacaacggcaagcugugcaagcugagaggcguggccccccugcaccugggcaagugcaacaucgccggcuggauccugggcaaccccgagugcgagagccugagcaccgccagcagcuggagcuacaucguggagaccagcagcagcgacaacggcaccugcuaccccggcgacuucaucaacuacgaggagcugagagagcagcugagcagcgugagcagcuucgagagauucgagaucuuccccaagaccagcagcuggcccaaccacgacagcaacaagggcgugaccgccgccugcccccacgccggcgccaagagcuucuacaagaaccugaucuggcuggugaagaaggagaacagcuaccccaagcugagcaagagcuacaucaacgacaagggcaaggaggugcuggugcuguggggcauccaccaccccagcaccaccgccgaccagcagagcaucuaccagaacgccgacgccuacguguucgugggcaccagcagauacagcaagaaguucaagcccgagaucgccaucagacccaaggugagagaccaggagggcagaaugaacuacuacuggacccugguggagcccggcgacaagaucaccuucgaggccaccggcaaccugguggugcccagauacgccuucgccauggagagaaacgccggcagcggcaucaucaucagcgacacccccgugcacgacugcaacaccaccugccagacccccaagggcgccaucaacaccagccugcccuuccagaacauccaccccaucaccaucggcaagugccccaaguacgugaagagcaccaagcugagacuggccaccggccugagaaacgugcccagcauccagagcagaggccuguucggcgccaucgccggcuucaucgagggcggcuggaccggcaugguggacggcugguacggcuaccaccaccagaacgagcagggcagcggcuacgccgccgaccugaagagcacccagaacgccaucgacaagaucaccaacaaggugaacagcgugaucgagaagaugaacacccaguucaccgccgugggcaaggaguucaaccaccuggagaagagaaucgagaaccugaacaagaagguggacgacggcuuccuggacaucuggaccuacaacgccgagcugcuggugcugcuggagaacgagagaacccuggacuaccacgacagcaacgugaagaaccuguacgagaaggugagaaaccagcugaagaacaacgccaaggagaucggcaacggcugcuucgaguucuaccacaagugcgacaacaccugcauggagagcgugaagaacggcaccuacgacuaccccaaguacagcgaggaggccaagcugaacagagaggagaucgacggcgugaagcuggagagcaccagaaucuaccagauccuggccaucuacagcaccguggccagcagccuggugcugguggugagccugggcgccaucagcuucuggaugugcagcaacggcagccugcagugcagaaucugcaucuga

SEQ ID NO: 166868 - RNA, 1701 nt, Artificial Sequence
  derived and/or modified CDS sequence (opt4) from hemagglutinin__InfluenzaA__AEG79835
augaaggccauccugguggugcugcuguacaccuucgccaccgccaacgccgacacccugugcaucggcuaccacgccaacaacagcaccgacaccguggacaccgugcuggagaagaacgugaccgugacccacagcgugaaccugcuggaggacaagcacaacggcaagcugugcaagcugagaggcguggccccccugcaccugggcaagugcaacaucgccggcuggauccugggcaaccccgagugcgagagccugagcaccgccagcagcuggagcuacaucguggagaccagcagcagcgacaacggcaccugcuaccccggcgacuucaucgacuacgaggagcugagagagcagcugagcagcgugagcagcuucgagagauucgagaucuuccccaagaccagcagcuggcccaaccacgacagcaacaagggcgugaccgccgccugcccccacgccggcgccaagggcuucuacaagaaccugaucuggcuggugaagaagggcaacagcuaccccaagcugagcaagagcuacaucaacgacaagggcaaggaggugcuggugcuguggggcauccaccaccccagcaccaccgccgaccagcagagcaucuaccagaacgccgacaccuacguguucgugggcaccagcagauacagcaagaaguucaagcccgagaucgccaucagacccaaggugagagaccaggagggcagaaugaacuacuacuggacccugguggagcccggcgacaagaucaccuucgaggccaccggcaaccugguggugcccagauacgccuucgccauggagagaaacgccggcagcggcaucaucaucagcgacacccccgugcacgacugcaacaccaccugccagacccccaagggcgccaucaacaccagccugcccuuccagaacauccaccccaucaccaucggcaagugccccaaguacgugaagagcaccaagcugagacuggccaccggccugagaaacgugcccagcauccagagcagaggccuguucggcgccaucgccggcuucaucgagggcggcuggaccggcaugguggacggcugguacggcuaccaccaccagaacgagcagggcagcggcuacgccgccgaccugaagagcacccagaacgccaucgacaagaucaccaacaaggugaacagcgugaucgagaagaugaacacccaguucaccgccgugggcaaggaguucaaccaccuggagaagagaaucgagaaccugaacaagaagguggacgacggcuuccuggacaucuggaccuacaacgccgagcugcuggugcugcuggagaacgagagaacccuggacuaccacgacagcaacgugaagaaccuguacgagaaggugagaaaccagcugaagaacaacgccaaggagaucggcaacggcugcuucgaguucuaccacaagugcgacaacaccugcauggagagcgugaagaacggcaccuacgacuaccccaaguacagcgaggaggccaagcugaacagagaggagaucgacggcgugaagcuggagagcaccagaaucuaccagauccuggccaucuacagcaccguggccagcagccuggugcugguggugagccugggcgccaucagcuucuggaugugcagcaacggcagccugcagugcagaaucugcaucuga

SEQ ID NO: 166869 - RNA, 1701 nt, Artificial Sequence
  derived and/or modified CDS sequence (opt4) from hemagglutinin__InfluenzaA__AEH59363
augaaggccauccugguggugcugcuguacaccuucgccaccgccaacgccgacacccugugcaucggcuaccacgccaacaacagcaccgacaccguggacaccgugcuggagaagaacgugaccgugacccacagcgugaaccugcuggaggacaagcacaacggcaagcugugcaagcugagaggcguggccccccugcaccugggcaagugcaacaucgccggcuggauccugggcaaccccgagugcgagagccugagcaccgccagcagcuggagcuacaucguggagaccagcagcagcgacaacggcaccugcuaccccggcgacuucaucaacuacgaggagcugagagagcagcugagcagcgugagcagcuucgagagauucgagaucuuccccaagaccagcagcuggcccaaccacgacagcaacaagggcgugaccgccgccugcccccaggccggcgccaagagcuucuacaagaaccugaucuggcuggugaagaagggcaacagcuaccccaagcugagcaagagcuacaucaacgacaagggcaaggaggugcuggugcuguggggcauccaccaccccagcaccagcgccgaccagcagagccuguaccagaacgccgacgccuacguguucgugggcaccagcaaguacagcaagaaguucaagcccgagaucgccgugagacccaaggugagagaccaggagggcagaaugaacuacuacuggacccugguggagcccggcgacaagaucaccuucgaggccaccggcaaccugcuggugcccagauacgccuucgccauggagagaaacgccggcagcggcaucaucaucagcgacacccccgugcacgacugcaacaccaccugccagacccccaagggcgccaucaacaccagccugcccuuccagaacauccaccccaucaccaucggcaagugccccaaguacgugaagagcaccaagcugagacuggccaccggccugagaaacgugcccagcauccagagcagaggccuguucggcgccaucgccggcuucaucgagggcggcuggaccggcaugguggacggcugguacggcuaccaccaccagaacgcccagggcagcggcuacgccgccgaccugaagagcacccagaacgccaucgacaagaucaccaacaaggugaacagcgugaucgagaagaugaacacccaguucaccgccgugggcaaggaguucaaccaccuggagaagagaaucgagaaccugaacaagaagguggacgacggcuuccuggacaucuggaccuacaacgccgagcugcuggugcugcuggagaacgagagaacccuggacuaccacgacagcaacgugaagaaccuguacgagaaggugagaagccagcugaagaacaacgccaaggagaucggcaacggcugcuucgaguucuaccacaagugcgacaacaccugcauggagagcgugaagaacggcaccuacgacuaccccaaguacagcgaggaggccaagcugaacagagaggagaucgacggcgugaagcuggagagcaccagaaucuaccagauccuggccaucuacagcaccguggccagcagccuggugcugguggugagccugggcgccaucagcuucuggaugugcagcaacggcagccugcagugcagaaucugcaucuga

SEQ ID NO: 166870 - RNA, 1701 nt, Artificial Sequence
  derived and/or modified CDS sequence (opt4) from hemagglutinin__InfluenzaA__AEH59367
augaaggccauccugguggugcugcuguacaccuucgccaccgccaacgccgacacccugugcaucggcuaccacgccaacaacagcaccgacaccguggacaccgugcuggagaagaacgugaccgugacccacagcgugaaccugcuggaggacaagcacaacggcaagcugugcaagcugagaggcguggccccccugcaccugggcaagugcaacaucgccggcuggauccugggcaaccccgagugcgagagccugagcaccgccagcagcuggagcuacaucguggagaccagcagcagcgacaacggcaccugcuaccccggcgacuucaucaacuacgaggagcugagagagcagcugagcagcgugagcagcuucgagagauucgagaucuuccccaagaccagcagcuggcccaaccacgacagcaacaagggcgugaccgccgccugcccccacgccggcgccaagagcuucuacaagaaccugaucuggcuggugaagaagggcaacagcuaccccaagcugagcaagagcuacaucaacgacaagggcaaggaggugcuggugcuguggggcauccaccaccccagcaccaccgccgaccagcagagccuguaccagaacgccgacgccuacguguucgugggcaccagcagauacagcaagaaguucaagcccgagaucgccaucagacccaaggugagagaccaggagggcagaaugaacuacuacugggcccugguggagcccggcgacaagaucaccuucgaggccaccggcaaccugguggugcccagauacgccuucgccauggagagaaacgccggcagcggcaucaucaucagcgacacccccgugcacgacugcaacaccaccugccagacccccaagggcgccaucaacaccagccugcccuuccagaacauccaccccaucaccaucggcaagugccccaaguacgugaagagcaccaagcugagacuggccaccggccugagaaacgugcccagcauccagagcagaggccuguucggcgccaucgccggcuucaucgagggcggcuggaccggcaugguggacggcugguacggcuaccaccaccagaacgagcagggcagcggcuacgccgccgaccugaagagcacccagaacgccaucgacaagaucaccaacaaggugaacagcgugaucgagaagaugaacacccaguucaccgccgugggcaaggaguucaaccaccuggagaagagaaucgagaaccugaacaagaagguggacgacggcuuccuggacaucuggaccuacaacgccgagcugcuggugcugcuggagaacgagagaacccuggacuaccacgacagcaacgugaagaaccuguacgagaaggugagaaaccagcugaagaacaacgccaaggagaucggcaacggcugcuucgaguucuaccacaagugcgacaacaccugcauggagagcgugaagaacggcaccuacgacuaccccaaguacagcgaggaggccaagcugaacagagaggagaucgacggcgugaagcuggagagcaccagaaucuaccagauccuggccaucuacagcaccguggccagcagccuggugcugguggugagccugggcgccaucagcuucuggaugugcagcaacggcagccugcagugcagaaucugcaucuga

SEQ ID NO: 166871 - RNA, 1701 nt, Artificial Sequence
  derived and/or modified CDS sequence (opt4) from hemagglutinin__InfluenzaA__AEH59369
augaaggccauccugguggugcugcuguacaccuucgccaccgccaacgccgacacccugugcaucggcuaccacgccaacaacagcaccgacaccguggacaccgugcuggagaagaacgugaccgugacccacagcgugaaccugcuggaggacaagcacaacggcaagcugugcaagcugagaggcguggccccccugcaccugggcaagugcaacaucgccggcuggauccugggcaaccccgagugcgagagccugagcaccgccagcagcuggagcuacaucguggagaccagcagcagcgacaacggcaccugcuaccccggcgacuucaucgacuacgaggagcugagagagcagcugagcagcgugagcagcuucgagagauucgagaucuuccccaaggccagcagcuggcccaaccacgacagcaacaagggcgugaccgccgccugcccccacgccggcgccaagggcuucuacaagaaccugaucuggcuggugaagaagggcaacagcuaccccaagcugagcaagagcuacaucaacgacaagggcaaggaggugcuggugcuguggggcauccaccaccccagcaccaccgccgaccagcagagccuguaccagaacgccgacaccuacguguucgugggcaccagcagauacagcaagaaguucaagcccgagaucgccaucagacccaaggugagagaccaggagggcagaaugaacuacuacuggacccugguggagcccggcgacaagaucaccuucgaggccaccggcaaccugguggugcccagauacgccuucgccauggagagaaacgccggcagcggcaucaucaucagcgacacccccgugcacgacugcaacaccaccugccagacccccaagggcgccaucaacaccagccugcccuuccagaacauccaccccaucaccaucggcaagugccccaaguacgugaagagcaccaagcugagacuggccaccggccugagaaacgugcccagcauccagagcagaggccuguucggcgccaucgccggcuucaucgagggcggcuggaccggcaugguggacggcugguacggcuaccaccaccagaacgagcagggcagcggcuacgccgccgaccugaagagcacccagaacgccaucgacaagaucaccaacaaggugaacagcgugaucgagaagaugaacacccaguucaccgccgugggcaaggaguucaaccaccuggagaagagaaucgagaaccugaacaagaagguggacgacggcuuccuggacaucuggaccuacaacgccgagcugcuggugcugcuggagaacgagagaacccuggacuaccacgacagcaacgugaagaaccuguacgagaaggugagaaaccagcugaagaacaacgccaaggagaucggcaacggcugcuucgaguucuaccacaagugcgacaacaccugcauggagagcgugaagaacggcaccuacgacuaccccaaguacagcgaggaggccaagcugaacagagaggagaucgacggcgugaagcuggagagcaccagaaucuaccagauccuggccaucuacagcaccguggccagcagccuggugcugguggugagccugggcgccaucagcuucuggaugugcagcaacggcagccugcagugcagaaucugcaucuga

SEQ ID NO: 166872 - RNA, 1701 nt, Artificial Sequence; identical to SEQ ID NO: 166869
  derived and/or modified CDS sequence (opt4) from hemagglutinin__InfluenzaA__AEH59371

SEQ ID NO: 166873 - RNA, 1701 nt, Artificial Sequence
  derived and/or modified CDS sequence (opt4) from hemagglutinin__InfluenzaA__AEH59373
augaaggccauccugguggugcugcuguacaccuucgccaccgccaacgccgacacccugugcaucggcuaccacgccaacaacagcaccgacaccguggacaccgugcuggagaagaacgugaccgugacccacagcgugaaccugcuggaggacaagcacaacggcaagcugugcaagcugagagagguggccccccugcaccugggcaagugcaacaucgccggcuggauccugggcaaccccgagugcgagagccugagcaccgccagcagcuggagcuacaucguggagaccagcagcagcgacaacggcaccugcuaccccggcgacuucaucgacuacgaggagcugagagagcagcugagcagcgugagcagcuucgagagauucgagaucuuccccaagaccagcagcuggcccaaccacgacagcaacaagggcgugaccgccgccugcccccacgccggcgccaagggcuucuacaagaaccugaucuggcuggugaagaagggcaacagcuaccccaagcugagcaagagcuacaucaacgacaagggcaaggaggugcuggugcuguggggcauccaccaccccagcaccaccgccgaccagcagagccuguaccagaacgccgacaccuacguguucgugggcaccagcagauacagcaagaaguucaagcccgagaucgccaucagacccaaggugagagaccaggagggcagaaugaacuacuacuggacccugguggagcccggcgacaagaucaccuucgaggccaccggcaaccugguggugcccagauacgccuucgccauggagagaaacgccggcagcggcaucaucaucagcgacacccccgugcacgacugcaacaccaccugccagacccccaagggcgccaucaacaccagccugcccuuccagaacauccaccccaucaccaucggcaagugccccaaguacgugaagagcaccaagcugagacuggccaccggccugagaaacgugcccagcauccagagcagaggccuguucggcgccaucgccggcuucaucgagggcggcuggaccggcaugguggacggcugguacggcuacagacaccagaacgagcagggcagcggcuacgccgccgaccugaagagcacccagaacgccaucgacaagaucaccaacaaggugaacagcgugaucgagaagaugaacacccaguucaccgccgugggcaaggaguucaaccaccuggagagaagaaucgagaaccugaacaagaagguggacgacggcuuccuggacaucuggaccuacaacgccgagcugcuggugcugcuggagaacgagagaacccuggacuaccacgacagcaacgugaagaaccuguacgagaaggugagaaaccagcugaagaacaacgccaaggagaucggcaacggcugcuucgaguucuaccacaagugcgacaacaccugcauggagagcgugaagaacggcaccuacgacuaccccaaguacagcgaggaggccaagcugaacagagaggagaucgacggcgugaagcuggagagcaccagaaucuaccagauccuggccaucuacagcaccguggccagcagccuggugcugguggugagccugggcgccaucagcuucuggaugugcagcaacggcagccugcagugcagaaucugcaucuga

SEQ ID NO: 166874 - RNA, 1701 nt, Artificial Sequence; identical to SEQ ID NO: 166869
  derived and/or modified CDS sequence (opt4) from hemagglutinin__InfluenzaA__AEH59375

SEQ ID NO: 166875 - RNA, 1701 nt, Artificial Sequence
  derived and/or modified CDS sequence (opt4) from hemagglutinin__InfluenzaA__AEH59379
augaaggccauccugguggugcugcuguacaccuucgccaccgccaacgccgacacccugugcaucggcuaccacgccaacaacagcaccgacaccguggacaccgugcuggagaagaacgugaccgugacccacagcgugaaccugcuggaggacaagcacaacggcaagcugugcaagcugagaggcguggccccccugcaccugggcaagugcaacaucgccggcuggauccugggcaaccccgagugcgagagccugagcaccgccagcagcuggagcuacaucguggagaccagcagcagcgacaacggcaccugcuaccccggcgacuucaucgacuacgaggagcugagagagcagcugagcagcgugagcagcuucgagagauucgagaucuuccccaagaccagcagcuggcccaaccacgacagcaacaagggcgugaccgccgccugcccccacgccggcgccaagagcuucuacaagaaccugaucuggcuggugaagaagggcaacagcuaccccaagcugagcaagagcuacaucaacgacaagggcaaggaggugcuggugcuguggggcauccaccaccccagcaccaccgccgaccagcagagccuguaccagaacgccgacaccuacguguucgugggcaccagcagauacagcaagaaguucaagcccgagaucgccaucagacccaaggugagagaccaggagggcagaaugaacuacuacuggacccugguggagcccggcgacaagaucaccuucgaggccaccggcaaccugguggugcccagauacgccuucgccauggagagaaacgccggcagcggcaucaucaucagcgacacccccgugcacgacugcaacaccaccugccagacccccaagggcgccaucaacaccagccugcccuuccagaacauccaccccaucaccaucggcaagugccccaaguacgugaagagcaccaagcugagacuggccaccggccugagaaacgugcccagcauccagagcagaggccuguucggcgccaucgccggcuucaucgagggcggcuggaccggcaugguggacggcugguacggcuaccaccaccagaacgagcagggcagcggcuacgccgccgaccugaagagcacccagaacgccaucgacaagaucaccaacaaggugaacagcgugaucgagaagaugaacacccaguucaccgccgugggcaaggaguucaaccaccuggagaagagaaucgagaaccugaacaagaagguggacgacggcuuccuggacaucuggaccuacaacgccgagcugcuggugcugcuggagaacgagagaacccuggacuaccacgacagcaacgugaagaaccuguacgagaaggugagaaaccagcugaagaacaacgccaaggagaccggcaacggcugcuucgaguucuaccacaagugcgacaacaccugcauggagagcgugaagaacggcaccuacgacuaccccaaguacagcgaggaggccaagcugaacagagaggagaucgacggcgugaagcuggagagcaccagaaucuaccagauccuggccaucuacagcaccguggccagcagccuggugcugguggugagccugggcgccaucagcuucuggaugugcagcaacggcagccugcagugcagaaucugcaucuga

SEQ ID NO: 166876 - RNA, 1701 nt, Artificial Sequence; identical to SEQ ID NO: 166869
  derived and/or modified CDS sequence (opt4) from hemagglutinin__InfluenzaA__AEH59381

SEQ ID NO: 166877 - RNA, 1701 nt, Artificial Sequence
  derived and/or modified CDS sequence (opt4) from hemagglutinin__InfluenzaA__AEH59383
augaaggccauccugguggugcugcuguacaccuucgccaccgccaacgccgacacccugugcaucggcuaccacgccaacaacagcaccgacaccguggacaccgugcuggagaagaacgugaccgugacccacagcgugaaccugcuggaggacaagcacaacggcaagcugugcaagcugagaggcguggccccccugcaccugggcaagugcaacaucgccggcuggauccugggcaaccccgagugcgagagccugagcaccgccagcagcuggagcuacaucguggagaccagcagcagcgacaacggcaccugcuaccccggcgacuucaucgacuacgaggagcugagagagcagcugagcagcgugagcagcuucgagagauucgagaucuuccccaagaccagcagcuggcccaaccacgacagcaacaagggcgugaccgccgccugcccccacgccggcgccaagggcuucuacaagaaccugaucuggcuggugaagaagggcaacagcuaccccaagcugagcaucagcuacaucaacgacaagggcaaggaggugcuggugcuguggggcauccaccaccccagcaccaccgccgaccagcagagccuguaccagaacgccgacaccuacguguucgugggcaccagcagauacagcaagaaguucaagcccgagaucgccaucagacccaaggugagagaccaggagggcagaaugaacuacuacuggacccugguggagcccggcgacaagaucaccuucgaggccaccggcaaccugguggugcccagauacgccuucgccauggagagaaacgccggcagcggcaucaucaucagcgacacccccgugcacgacugcaacaccaccugccagacccccaagggcgccaucaacaccagccugcccuuccagaacauccaccccaucaccaucggcaagugccccaaguacgugaagagcaccaagcugagacuggccaccggccugagaaacgugcccagcauccagagcagaggccuguucggcgccaucgccggcuucaucgagggcggcuggaccggcaugguggacggcugguacggcuaccaccaccagaacgagcagggcagcggcuacgccgccgaccugaagagcacccagaacgccaucgacaagaucaccaacaaggugaacagcgugaucgagaagaugaacacccaguucaccgccgugggcaaggaguucaaccaccuggagaagagaaucgagaaccugaacaagaagguggacgacggcuuccuggacaucuggaccuacaacgccgagcugcuggugcugcuggagaacgagagaacccuggacuaccacgacagcaacgugaagaaccuguacgagaaggugagaaaccagcugaagaacaacgccaaggagaucggcaacggcugcuucgaguucuaccacaagugcgacaacaccugcauggagagcgugaagaacggcaccuacgacuaccccaaguacagcgaggaggccaagcugaacagagaggagaucgacggcgugaagcuggagagcaccagaaucuaccagauccuggccaucuacagcaccguggccagcagccuggugcugguggugagccugggcgccaucagcuucuggaugugcagcaacggcagccugcagugcagaaucugcaucuga

SEQ ID NO: 166878 - RNA, 1701 nt, Artificial Sequence
  derived and/or modified CDS sequence (opt4) from hemagglutinin__InfluenzaA__AEH59385
augaaggccauccugguggugcugcuguacaccuucgccaccgccaacgccgacacccugugcaucggcuaccacgccaacaacagcaccgacaccguggacaccgugcuggagaagaacgugaccgugacccacagcgugaaccugcuggaggacaagcacaacggcaagcugugcaagcugagaggcguggccccccugcaccugggcaagugcaacaucgccggcuggauccugggcaaccccgagugcgagagccugagcaccgccagcagcuggagcuacaucguggagaccagcagcagcgacaacggcaccugcuaccccggcgacuucaucgacuacgaggagcugagagagcagcugagcagcgugagcagcuucgagagauucgagaucuuccccaagaccagcagcuggcccaaccacgacagcaacaagggcgugaccgccgccugcccccacgccggcgccaagagcuucuacaagaaccugaucuggcuggugaagaagggcaacagcuaccccaagcugagcaagagcuacaucaacgacaagggcaaggaggugcuggugcuguggggcauccaccaccccagcaccaccgccgaccagcagagccuguaccagaacgccgacgccuacaucuucgugggcaccagcagauacagcaagaaguucaagcccgagaucgccaucagacccaaggugagagaccaggagggcagaaugaacuacuacuggacccugguggagcccggcgacaagaucaccuucgaggccaccggcaaccugguggugcccagauacgccuucgccauggagagaaacgccggcagcggcaucaucaucagcgacacccccgugcacgacugcaacaccaccugccagacccccaagggcgccaucaacaccagccugcccuuccagaacauccaccccaucaccaucggcaagugccccaaguacgugaagagcaccaagcugagacuggccaccggccugagaaacgugcccagcauccagagcagaggccuguucggcgccaucgccggcuucaucgagggcggcuggaccggcaugguggacggcugguacggcuaccaccaccagaacgagcagggcagcggcuacgccgccgaccugaagagcacccagaacgccaucgacaagaucaccaacaaggugaacagcgugaucgagaagaugaacacccaguucaccgccgugggcaaggaguucaaccaccuggagaagagaaucgagaaccugaacaagaagguggacgacggcuuccuggacaucuggaccuacaacgccgagcugcuggugcugcuggagaacgagagaacccuggacuaccacgacagcaacgugaagaaccuguacgagaaggugagaaaccagcugaagaacaacgccaaggagaucggcaacggcugcuucgaguucuaccacaagugcgacaacaccugcauggagagcgugaagaacggcaccuacgacuaccccaaguacagcgaggaggccaagcugaacagagaggagaucgacggcgugaagcuggagagcaccagaaucuaccagauccuggccaucuacagcaccguggccagcagccuggugcugguggugagccugggcgccaucagcuucuggaugugcagcaacggcagccugcagugcagaaucugcaucuga

SEQ ID NO: 166879 - RNA, 1701 nt, Artificial Sequence; identical to SEQ ID NO: 166869
  derived and/or modified CDS sequence (opt4) from hemagglutinin__InfluenzaA__AEH59387

SEQ ID NO: 166880 - RNA, 1701 nt, Artificial Sequence
  derived and/or modified CDS sequence (opt4) from hemagglutinin__InfluenzaA__AEH59393
augaaggccauccugguggugauccuguacaccuucgccaccgccaacgccgacacccugugcaucggcuaccacgccaacaacagcaccgacaccguggacaccgugcuggagaagaacgugaccgugacccacagcgugaaccugcuggaggacaagcacaacggcaagcugugcaagcugagaggcguggccccccugcaccugggcaagugcaacaucgccggcuggauccugggcaaccccgagugcgagagccugagcaccgccagcagcuggagcuacaucguggagaccagcagcagcgacaacggcaccugcuaccccggcgacuucaucgacuacgaggagcugagagagcagcugagcagcgugagcagcuucgagagauucgagaucuuccccaagaccagcagcuggcccaaccacgacagcaacaagggcgugaccgccgccugcccccacgccggcgccaagggcuucuacaagaaccugaucuggcuggugaagaagggcaacagcuaccccaagcugagcaagagcuacaucaacgacaagggcaaggaggugcuggugcuguggggcauccaccaccccagcaccaccgccgaccagcagagccuguaccagaacgccgacaccuacguguucgugggcaccagcagauacagcaagaaguucaagcccgagaucgccaucagacccaaggugagagaccaggagggcagaaugaacuacuacuggacccugguggagcccggcgacaagaucaccuucgaggccaccggcaaccugguggugcccagauacgccuucgccauggagagaaacgccggcagcggcaucaucaucagcgacacccccgugcacgacugcaacaccaccugccagacccccaagggcgccaucaacaccagccugcccuuccagaacauccaccccaucaccaucggcaagugccccaaguacgugaagagcaccaagcugagacuggccaccggccugagaaacgugcccagcauccagagcagaggccuguucggcgccaucgccggcuucaucgagggcggcuggaccggcaugguggacggcugguacggcuaccaccaccagaacgagcagggcagcggcuacgccgccgaccugaagagcacccagaacgccaucgacaagaucaccaacaaggugaacagcgugaucgagaagaugaacacccaguucaccgccgugggcaaggaguucaaccaccuggagaagagaaucgagaaccugaacaagaagguggacgacggcuuccuggacaucuggaccuacaacgccgagcugcuggugcugcuggagaacgagagaacccuggacuaccacgacagcaacgugaagaaccuguacgagaaggugagaaaccagcugaagaacaacgccaaggagaucggcaacggcugcuucgaguucuaccacaagugcgacaacaccugcauggagagcgugaagaacggcaccuacgacuaccccaaguacagcgaggaggccaagcugaacagagaggagaucgacggcgugaagcuggagagcaccagaaucuaccagauccuggccaucuacagcaccguggccagcagccuggugcugguggugagccugggcgccaucagcuucuggaugugcagcaacggcagccugcagugcagaaucugcaucuga

SEQ ID NO: 166881 - RNA, 1701 nt, Artificial Sequence
  derived and/or modified CDS sequence (opt4) from hemagglutinin__InfluenzaA__AEH59397
augaaggccauccugguggugcugcuguacaccuucgccaccgccaacgccgacacccugugcaucggcuaccacgccaacaacagcaccgacaccguggacaccgugcuggagaagaacgugaccgugacccacagcgugaaccugcuggaggacaagcacaacggcaagcugugcaagcugagaggcguggccccccugcaccugggcaagugcaacaucgccggcuggauccugggcaaccccgagugcgagagccugagcaccgccagcagcuggagcuacaucguggagaccagcagcagcgacaacggcaccugcuaccccggcgacuucaucaacuacgaggagcugagagagcagcugagcagcgugagcagcuucgagagauucgagaucuuccccaagaccagcagcuggcccagccacgacagcaacaagggcgugaccgccgccugcccccacgccggcgccaagagcuucuacaagaaccugaucuggcuggugaagaagggcaacagcuaccccaagcugagcaagagcuacaucaacgacaagggcaaggaggugcuggugcuguggggcauccaccaccccagcaccagcgccgaccagcagagccuguaccagaacgccgacgccuacguguucgugggcaccagcaaguacagcaagaaguucaagcccgagaucgccgugagacccaaggugagagaccaggagggcagaaugaacuacuacuggacccugguggagcccggcgacaagaucaccuucgaggccaccggcaaccugcuggugcccagauacgccuucgccauggagagaaacgccggcagcggcaucaucaucagcgacacccccgugcacgacugcaacaccaccugccagacccccaagggcgccaucaacaccagccugcccuuccagaacauccaccccaucaccaucggcaagugccccaaguacgugaagagcaccaagcugagacuggccaccggccugagaaacgugcccagcauccagagcagaggccuguucggcgccaucgccggcuucaucgagggcggcuggaccggcaugguggacggcugguacggcuaccaccaccagaacgagcagggcagcggcuacgccgccgaccugaagagcacccagaacgccaucgacaagaucaccaacaaggugaacagcgugaucgagaagaugaacacccaguucaccgccgugggcaaggaguucaaccaccuggagaagagaaucgagaaccugaacaagaagguggacgacggcuuccuggacaucuggaccuacaacgccgagcugcuggugcugcuggagaacgagagaacccuggacuaccacgacagcaacgugaagaaccuguacgagaaggugagaagccagcugaagaacaacgccaaggagaucgagaacggcugcuucgaguucuaccacaagugcgacaacaccugcauggagagcgugaagaacggcaccuacgacuaccccaaguacagcgaggaggccaagcugaacagagaggagaucgacggcgugaagcuggagagcaccagaaucuaccagauccuggccaucuacagcaccguggccagcagccuggugcugguggugagccugggcgccaucagcuucuggaugugcagcaacggcagccugcagugcagaaucugcaucuga

SEQ ID NO: 166882 - RNA, 1701 nt, Artificial Sequence
  derived and/or modified CDS sequence (opt4) from hemagglutinin__InfluenzaA__AEH59399
augaaggccauccugguggugcugcuguacaccuucgccaccgccaacgccgacacccugugcaucggcuaccacgccaacaacagcaccgacaccguggacaccgugcuggagaagaacgugaccgugacccacagcgugaaccugcuggaggacaagcacaacggcaagcugugcaagcugagaggcguggccccccugcaccugggcaagugcaacaucgccggcuggauccugggcaaccccgagugcgagagccugagcaccgccagcagcuggagcuacaucguggagaccagcagcagcgacaacggcaccugcuaccccggcgacuucaucgacuacgaggagcugagagagcagcugagcagcgugagcagcuucgagagauucgagaucuuccccaagaccagcagcuggcccaaccacgacagcaacaagggcgugaccgccgccugcccccacgccggcgccaagggcuucuacaagaaccugaucuggcuggugaagaagggcaacagcuaccccaagcugagcaagagcuacaucaacgacaagggcaaggaggugcuggugcuguggggcauccaccaccccagcaccaccgccgaccagcagagccuguaccagaacgccgacaccuacguguucgugggcaccagcagauacagcaagaaguucaagcccgagaucgccaucagacccaaggugagagaccaggagggcagaaugaacuacuacuggaccaucguggagcccggcgacaagaucaccuucgaggccaccggcaaccugguggugcccagauacgccuucgccauggagagaaacgccggcagcggcaucaucaucagcgacacccccgugcacgacugcaacaccaccugccagacccccaagggcgccaucaacaccagccugcccuuccagaacauccaccccaucaccaucggcaagugccccaaguacgugaagagcaccaagcugagacuggccaccggccugagaaacgugcccagcauccagagcagaggccuguucggcgccaucgccggcuucaucgagggcggcuggaccggcaugguggacggcugguacggcuaccaccaccagaacgagcagggcagcggcuacgccgccgaccugaagagcacccagaacgccaucgacaagaucaccaacaaggugaacagcgugaucgagaagaugaacacccaguucaccgccgugggcaaggaguucaaccaccuggagaagagaaucgagaaccugaacaagaagguggacgacggcuuccuggacaucuggaccuacaacgccgagcugcuggugcugcuggagaacgagagaacccuggacuaccacgacagcaacgugaagaaccuguacgagaaggugagaaaccagcugaagaacaacgccaaggagaucggcaacggcugcuucgaguucuaccacaagugcgacaacaccugcauggagagcgugaagaacggcaccuacgacuaccccaaguacagcgaggaggccaagcugaacagagaggagaucgacggcgugaagcuggagagcaccagaaucuaccagauccuggccaucuacagcaccguggccagcagccuggugcugguggugagccugggcgccaucagcuucuggaugugcagcaacggcagccugcagugcagaaucugcaucuga

SEQ ID NO: 166883 - RNA, 1701 nt, Artificial Sequence
  derived and/or modified CDS sequence (opt4) from hemagglutinin__InfluenzaA__AEH59403
augaaggccauccugguggugcugcuguacaccuucgccaccgccaacgccgacacccugugcaucggcuaccacgccaacaacagcaccgacaccguggacaccgugcuggagaagaacgugaccgugacccacagcgugaaccugcuggaggacaagcacaacggcaagcugugcaagcugagaggcguggccccccugcaccugggcaagugcaacaucgccggcuggauccugggcaaccccgagugcgagagccugagcaccgccagcagcuggagcuacaucguggagaccagcagcagcgacaacggcaccugcuaccccggcgacuucaucgacuacgaggagcugagagagcagcugagcagcgugagcagcuucgagagauucgagaucuuccccaagaccagcagcuggcccaaccacgacagcaacaagggcgugaccgccgccugcccccacgccggcgccaagggcuucuacaagaaccugaucuggcuggugaagaagggcaacagcuaccccaagcugagcaagagcuacaucaacgacaagggcaaggaggugcuggugcuguggggcauccaccaccccagcaccaccgccgaccagcagagccuguaccagaacgccgacaccuacguguucgugggcaccagcagauacagcaagaaguucaagcccgagaucgccaucagacccaaggugagagaccaggagggcagaaugaacuacuacuggacccugguggcccccggcgacaagaucaccuucgaggccaccggcaaccugguggugcccagauacgccuucgccauggagagaaacgccggcagcggcaucaucaucagcgacacccccgugcacgacugcaacaccaccugccagacccccaagggcgccaucaacaccagccugcccuuccagaacauccaccccaucaccaucggcaagugccccaaguacgugaagagcaccaagcugagacuggccaccggccugagaaacgugcccagcauccagagcagaggccuguucggcgccaucgccggcuucaucgagggcggcuggaccggcaugguggacggcugguacggcuaccaccaccagaacgagcagggcagcggcuacgccgccgaccugaagagcacccagaacgccaucgacaagaucaccaacaaggugaacagcgugaucgagaagaugaacacccaguucaccgccgugggcaaggaguucaaccaccuggagaagagaaucgagaaccugaacaagaagguggacgacggcuuccuggacaucuggaccuacaacgccgagcugcuggugcugcuggagaacgagagaacccuggacuaccacgacagcaacgugaagaaccuguacgagaaggugagaaaccagcugaagaacaacgccaaggagaucggcaacggcugcuucgaguucuaccacaagugcgacaacaccugcauggagagcgugaagaacggcaccuacgacuaccccaaguacagcgaggaggccaagcugaacagagaggagaucgacggcgugaagcuggagagcaccagaaucuaccagauccuggccaucuacagcaccguggccagcagccuggugcugguggugagccugggcgccaucagcuucuggaugugcagcaacggcagccugcagugcagaaucugcaucuga

SEQ ID NO: 166884 - RNA, 1701 nt, Artificial Sequence
  derived and/or modified CDS sequence (opt4) from hemagglutinin__InfluenzaA__AEH59407
augaaggccauccugguggugaugcuguacaccuucgccaccgccaacgccgacacccugugcaucggcuaccacgccaacaacagcaccgacaccguggacaccgugcuggagaagaacgugaccgugacccacagcgugaaccugcuggaggacaagcacaacggcaagcugugcaagcugagaggcguggccccccugcaccugggcaagugcaacaucgccggcuggauccugggcaaccccgagugcgagagccugagcaccgccagcagcuggagcuacaucguggagaccagcagcagcgacaacggcaccugcuaccccggcgacuucaucgacuacgaggagcugagagagcagcugagcagcgugagcagcuucgagagauucgagaucuuccccaagaccagcagcuggcccaaccacgacagcaacaagggcgugaccgccgccugcccccacgccggcgccaagggcuucuacaagaaccugaucuggcuggugaagaagggcaacagcuaccccaagcugagcaagagcuacaucaacgacaagggcaaggaggugcuggugcuguggggcauccaccaccccagcaccaccgccgaccagcagagccuguaccagaacgccgacaccuacguguucgugggcaccagcagauacagcaagaaguucaagcccgagaucgccaucagacccaaggugagagaccaggagggcagaaugaacuacuacuggacccugguggagcccggcgacaagaucaccuucgaggccaccggcaaccugguggugcccagauacgccuucgccauggagagaaacgccggcagcggcaucaucaucagcgacacccccgugcacgacugcaacaccaccugccagacccccaagggcgccaucaacaccagccugcccuuccagaacauccaccccaucaccaucggcaagugccccaaguacgugaagagcaccaagcugagacuggccaccggccugagaaacgugcccagcauccagagcagaggccuguucggcgccaucgccggcuucaucgagggcggcuggaccggcaugguggacggcugguacggcuaccaccaccagaacgagcagggcagcggcuacgccgccgaccugaagagcacccagaacgccaucgacaagaucaccaacaaggugaacagcgugaucgagaagaugaacacccaguucaccgccgugggcaaggaguucaaccaccuggagaagagaaucgagaaccugaacaagaagguggacgacggcuuccuggacaucuggaccuacaacgccgagcugcuggugcugcuggagaacgagagaacccuggacuaccacgacagcaacgugaagaaccuguacgagaaggugagaaaccagcugaagaacaacgccaaggagaucggcaacggcugcuucgaguucuaccacaagugcgacaacaccugcauggagagcgugaagaacggcaccuacgacuaccccaaguacagcgaggaggccaagcugaacagagaggagaucgacggcgugaagcuggagagcaccagaaucuaccagauccuggccaucuacagcaccguggccagcagccuggugcugguggugagccugggcgccaucagcuucuggaugugcagcaacggcagccugcagugcagaaucugcaucuga

SEQ ID NO: 166885 - RNA, 1701 nt, Artificial Sequence; identical to SEQ ID NO: 166884
  derived and/or modified CDS sequence (opt4) from hemagglutinin__InfluenzaA__AEH59409

SEQ ID NO: 166886 - RNA, 1701 nt, Artificial Sequence
  derived and/or modified CDS sequence (opt4) from hemagglutinin__InfluenzaA__AEH59411
augaaggccauccugguggugcugcuguacaccuucgccaccgccaacgccgacacccugugcaucggcuaccacgccaacaacagcaccgacaccguggacaccgugcuggagaagaacgugaccgugacccacagcgugaaccugcuggaggacaagcacaacggcaagcugugcaagcugagaggcguggccccccugcaccugggcaagugcaacaucgccggcuggauccugggcaaccccgagugcgagagccugagcaccgccagcagcuggagcuacaucguggagaccagcagcagcgacaacggcaccugcuaccccggcgacuucaucgacuacgaggagcugagagagcagcugagcagcgugagcagcuucgagagauucgagaucuuccccaagaccagcagcuggcccaaccacgacagcaacaagggcgugaccgccgccugcccccacgccggcgccaagggcuucuacaagaaccugaucuggcuggugaagaagggcaacagcuaccccaagcugagcaagagcuacaucaacgacaagggcaaggaggugcuggugcuguggggcauccaccaccccagcaccaccgccgaccagcagagccuguaccagaacgccgacaccuacguguucgugggcaccagcagauacagcaagaaguucaagcccgagaucgccaucagacccaaggugagagaccaggagggcagaaugaacuacuacuggacccugguggagcccggcgacaagaucaccuucgaggccaccggcaaccugguggugcccagauacgccuucgccauggacagaaacgccggcagcggcaucaucaucagcgacacccccgugcacgacugcaacaccaccugccagacccccaagggcgccaucaacaccagccugcccuuccagaacauccaccccaucaccaucggcaagugccccaaguacgugaagagcaccaagcugagacuggccaccggccugagaaacgugcccagcauccagagcagaggccuguucggcgccaucgccggcuucaucgagggcggcuggaccggcaugguggacggcugguacggcuaccaccaccagaacgagcagggcagcggcuacgccgccgaccugaagagcacccagaacgccaucgacaagaucaccaacaaggugaacagcgugaucgagaagaugaacacccaguucaccgccgugggcaaggaguucaaccaccuggagaagagaaucgagaaccugaacaagaagguggacgacggcuuccuggacaucuggaccuacaacgccgagcugcuggugcugcuggagaacgagagaacccuggacuaccacgacagcaacgugaagaaccuguacgagaaggugagaaaccagcugaagaacaacgccaaggagaucggcaacggcugcuucgaguucuaccacaagugcgacaacaccugcauggagagcgugaagaacggcaccuacgacuaccccaaguacagcgaggaggccaagcugaacagagaggagaucgacggcgugaagcuggagagcaccagaaucuaccagauccuggccaucuacagcaccguggccagcagccuggugcugguggugagccugggcgccaucagcuucuggaugugcagcaacggcagccugcagugcagaaucugcaucuga

SEQ ID NO: 166887 - RNA, 1701 nt, Artificial Sequence
  derived and/or modified CDS sequence (opt4) from hemagglutinin__InfluenzaA__AEH59413
augaaggccauccugguggugcugcuguacaccuucgccaucgccaacgccgacacccugugcaucggcuaccacgccaacaacagcaccgacaccguggacaccgugcuggagaagaacgugaccgugacccacagcgugaaccugcuggaggacaagcacaacggcaagcugugcaagcugagaggcguggccccccugcaccugggcaagugcaacaucgccggcuggauccugggcaaccccgagugcgagagccugagcaccgccagcagcuggagcuacaucguggagaccagcagcagcgacaacggcaccugcuaccccggcgacuucaucaacuacgaggagcugagagagcagcugagcagcgugagcagcuucgagagauucgagaucuuccccaagaccagcagcuggcccaaccacgacagcaacaagggcgugaccgccgccugcccccacgccggcgccaagagcuucuacaagaaccugaucuggcuggugaagaagggcaacagcuaccccaagcugagcaagagcuacaucaacgacaagggcaaggaggugcuggugcuguggggcauccaccaccccagcaccagcgccgaccagcagagccuguaccagaacgccgacgccuacguguucgugggcaccagcaaguacagcaagaaguucaagcccgagaucgccgugagacccaaggugagagaccaggagggcagaaugaacuacuacuggacccugguggagcccggcgacaagaucaccuucgaggccaccggcaaccugcuggugcccagauacgccuucgccauggagagaaacgccggcagcggcaucaucaucagcgacacccccgugcacgacugcaacaccaccugccagacccccgagggcgccaucaacaccagccugcccuuccagaacauccaccccaucaccaucggcaagugccccaaguacgugaagagcaccaagcugagacuggccaccggccugagaaacgugcccagcauccagagcagaggccuguucggcgccaucgccggcuucaucgagggcggcuggaccggcaugguggacggcugguacggcuaccaccaccagaacgagcagggcagcggcuacgccgccgaccugaagagcacccagaacgccaucgacaagaucaccaacaaggugaacagcgugaucgagaagaugaacacccaguucaccgccgugggcaaggaguucaaccaccuggagaagagaaucgagaaccugaacaagaagguggacgacggcuuccuggacaucuggaccuacaacgccgagcugcuggugcugcuggagaacgagagaacccuggacuaccacgacagcaacgugaagaaccuguacgagaaggugagaagccagcugaagaacaacgccaaggagaucggcaacggcugcuucgaguucuaccacaagugcgacaacaccugcauggagagcgugaagaacggcaccuacgacuaccccaaguacagcgaggaggccaagcugaacagagaggagaucgacggcgugaagcuggagagcaccagaaucuaccagauccuggccaucuacagcaccguggccagcagccuggugcugguggugagccugggcgccaucagcuucuggaugugcagcaacggcagccugcagugcagaaucugcaucuga

SEQ ID NO: 166888 - RNA, 1701 nt, Artificial Sequence
  derived and/or modified CDS sequence (opt4) from hemagglutinin__InfluenzaA__AEH59585
augaaggccauccugguggugcugcuguacaccuucgccaccgccaacgccgacacccugugcaucggcuaccacgccaacaacagcaccgacaccguggacaccgugcuggagaagaacgugaccgugacccacagcgugaaccugcuggaggacaagcacaacggcaagcugugcaagcugagaggcguggccccccugcaccugggcaagugcaacaucgccggcuggauccugggcaaccccgagugcgagagccugagcaccgccagcagcuggagcuacaucguggagaccagcagcagcgacaacggcaccugcuaccccggcgacuucaucgacuacgaggagcugagagagcagcugagcagcgugagcagcuucgagagauucgagaucuuccccaagaccagcagcuggcccaaccacgaccccaacaagggcgugaccgccgccugcccccacgccggcgccaagagcuucuacaagaaccugaucuggcuggugaagaagggcaacagcuaccccaagcugagcaagagcuacaucaacgacaagggcaaggaggugcuggugcuguggggcauccaccaccccagcaccagcgccgaccagcagagccuguaccagaacgccgacgccuacguguucgugggcaccagcagauacagcaagaaguucaagcccgagaucgccaucagacccaaggugagagaccaggagggcagaaugaacuacuacuggacccugguggagcccggcgacaagaucaccuucgaggccaccggcaaccugguggugcccagauacgccuucgccauggagagaaacgccggcagcggcaucaucaucagcgacacccccgugcacgacugcaacaccaccugccagacccccaagggcgccaucaacaccagccugcccuuccagaacauccaccccaucaccaucggcaagugccccaaguacgugaagagcaccaagcugagacuggccaccggccugagaaacgugcccagcauccagagcagaggccuguucggcgccaucgccggcuucaucgagggcggcuggaccggcaugguggacggcugguacggcuaccaccaccagaacgagcagggcagcggcuacgccgccgaccugaagagcacccagaacgccaucgacgagaucaccaacaaggugaacagcgugaucgagaagaugaacacccaguucaccguggugggcaaggaguucaaccaccuggagaagagaaucgagaaccugaacaagaagguggacgacggcuuccuggacaucuggaccuacaacgccgagcugcuggugcugcuggagaacgagagaacccuggacuaccacgacagcaacgugaagaaccuguacgagaaggugagaagccagcugaagaacaacgccaaggagaucggcaacggcugcuucgaguucuaccacaagugcgacaacaccugcauggagagcgugaagaacggcaccuacgacuaccccaaguacagcgaggaggccaagcugaacagagaggagaucgacggcgugaagcuggagagcaccagaaucuaccagauccuggccaucuacagcaccguggccagcagccuggugcugguggugagccugggcgccaucagcuucuggaugugcagcaacggcagccugcagugcagaaucugcaucuga

SEQ ID NO: 166889 - RNA, 1701 nt, Artificial Sequence
  derived and/or modified CDS sequence (opt4) from hemagglutinin__InfluenzaA__AEH59587
augaaggccauccugguggugcugcuguacaccuucgccaccgccaacgccgacacccugugcaucggcuaccacgccaacaacagcaccgacaccguggacaccgugcuggagaagaacgugaccgugacccacagcgugaaccugcuggaggacaagcacaacggcaagcugugcaagcugagaggcguggccccccugcaccugggcaagugcaacaucgccggcuggauccugggcaaccccgagugcgagagccugagcaccgccagcagcuggagcuacaucguggagaccagcagcagcgacaacggcaccugcuaccccggcgacuucaucgacuacgaggagcugagagagcagcugagcagcgugagcagcuucgagagauucgagaucuuccccaagaccagcagcuggcccaaccacgagagcaacaagggcgugaccgccgccugcccccacgccggcgccaagagcuucuacaagaaccugaucuggcuggugaagaagggcaacagcuaccccaagcugagcaagagcuacaucaacgacaagggcaaggaggugcuggugcuguggggcauccaccaccccagcaccagcgccgaccagcagagccuguaccagaacgccgacgccuacguguucgugggcaccagcagauacagcaagaaguucaagcccgagaucgccaucagacccaaggugagagaccaggagggcagaaugaacuacuacuggacccugguggagcccggcgacaagaucaccuucgaggccaccggcaaccugguggugcccagauacgccuucgccauggagagaaacgccggcagcggcaucaucaucagcgacacccccgugcacgacugcaacaccaccugccagacccccaagggcgccaucaacaccagccugcccuuccagaacauccaccccaucaccaucggcaagugccccaaguacgugaagagcaccaagcugagacuggccaccggccugagaaacgugcccuucauccagagcagaggccuguucggcgccaucgccggcuucaucgagggcggcuggaccggcaugguggacggcugguacggcuaccaccaccagaacgagcagggcagcggcuacgccgccgaccugaagagcacccagaacgccaucgacaagaucaccaacaaggugaacagcgugaucgagaagaugaacacccaguucaccguggugggcaaggaguucaacccccuggagaagagaaucgagaaccugaacaagaagguggacgacggcuuccuggacaucuggaccuacaacgccgagcugcuggugcugcuggagaacgagagaacccuggacuaccacgacagcaacgugaagaaccuguacgagaaggugagaagccagcugaagaacaacgccaaggagaucggcaacggcugcuucgaguucuaccacaagugcgacaacaccugcauggagagcgugaagaacggcaccuacgacuaccccaaguacagcgaggaggccaagcugaacagagaggagaucgacggcgugaagcuggagagcaccagaaucuaccagauccuggccaucuacagcaccguggccagcagccuggugcugguggugagccugggcgccaucagcuucuggaugugcagcaacggcagccugcagugcagaaucugcaucuga

SEQ ID NO: 166890 - RNA, 1701 nt, Artificial Sequence; identical to SEQ ID NO: 163893
  derived and/or modified CDS sequence (opt4) from hemagglutinin__InfluenzaA__AEH59589

SEQ ID NO: 166891 - RNA, 1701 nt, Artificial Sequence
  derived and/or modified CDS sequence (opt4) from hemagglutinin__InfluenzaA__AEH59591
augaaggccauccugguggugcugcuguacaccuucgccaccgccaacgccgacacccugugcaucggcuaccacgccaacaacagcaccgacaccguggacaccgugcuggagaagaacgugaccgugacccacagcgugaaccugcuggaggacaagcacaacggcaagcugugcaagcugagaggcguggccccccugcaccugggcaagugcaacaucgccggcuggauccugggcaaccccgagugcgagagccugagcaccgccagcagcuggagcuacaucguggagaccagcagcagcgacaacggcaccugcuaccccggcgacuucaucgacuacgaggagcugagagagcagcugagcagcgugagcagcuucgagagauucgagaucuuccccaagaccagcagcuggcccaaccacgacagcaacaagggcgugaccgccgccugcccccacgccggcgccaagagcuucuacaagaaccugaucuggcuggugaagaagggcaacagcuaccccaagcugagcaagagcuacaucaacgacaagggcaaggaggugcuggugcuguggggcauccaccaccccagcaccagcgccgaccagcagagccuguaccagaacgccgacgccuacguguucgugggcaccagcagauacagcaagaaguucaagcccgagaucgccaucagacccaaggugagagaccaggagggcagaaugaacuacuacuggacccugguggagcccggcgacaagaucaccuucgaggccaccggcaaccugguggugcccagauacgccuucgccauggagagaaacgccggcagcggcaucaucaucagcgacacccccgugcacgacugcaacaccaccugccagacccccaagggcgccaucaacaccagccugcccuuccagaacauccaccccaucaccaucggcaagugccccaaguacgugaagagcaccaagcugagacuggccaccggccugagaaacgugcccagcauccagagcagaggccuguucggcgccaucgccggcuucaucgagggcggcuggaccggcaugguggacggcugguacggcuaccaccaccagaacgagcagggcagcggcuacgccgccgaccugaagagcacccagaacgccaucgacaagaucaccaacaaggugaacagcgugaucgagaagaugaacacccaguucaccguggugggcaaggaguucaaccaccuggagaagagaaucgagaaccugaacaagaagguggacgacggcuuccuggacaucuggaccuacaacgccgagcugcuggugcugcuggagaacgagagaacccuggacuaccacgacagcaacgugaagaaccuguacgagaaggugagaagccagcugaagaacaacgccaaggagaucggcaacggcugcuucgaguucuaccacaagugcgacaacaccugcauggagagcgugaagaacggcaccuacgacuaccccaaguacagcgaggaggccaagcugaacagagaggagaucgacggcgugaagcuggagagcaccagaaucuaccagauccuggccaucuacagcaccguggccagcagccuggugcugguggugagccugggcgccaucagcuucuggaugugcagcaacggcagccugcagugcagaaucugcaucuga

SEQ ID NO: 166892 - RNA, 1701 nt, Artificial Sequence
  derived and/or modified CDS sequence (opt4) from hemagglutinin__InfluenzaA__AEH59593
augaaggccauccugguggugcugcuguacaccuucgccaccgccaacgccgacacccugugcaucggcuaccacgccaacaacagcaccgacaccguggacaccgugcuggagaagaacgugaccgugacccacagcgugaaccugcuggaggacaagcacaacggcaagcugugcaagcugagaggcguggccccccugcaccugggcaagugcaacaucgccggcuggauccugggcaaccccgagugcgagagccugagcaccgccagcagcuggagcuacaucguggagaccagcagcagcgacaacggcaccugcuaccccggcgacuucaucgacuacgaggagcugagagagcagcugagcagcgugagcagcuucgagagauucgagaucuuccccaagaccagcagcuggcccaaccacgagagcaacaagggcgugaccgccgccugcccccacgccggcgccaagagcuucuacaagaaccugaucuggcuggugaagaagggcaacagcuaccccaagcugagcaagagcuacaucaacgacaagggcaaggaggugcuggugcuguggggcauccaccaccccagcaccagcgccgaccagcagagcaucuaccagaacgccgacgccuacguguucgugggcaccagcagauacagcaagaaguucaagcccgagaucgccaucagacccaaggugagagaccaggagggcagaaugaacuacuacuggacccugguggagcccggcgacaagaucaccuucgaggccaccggcaaccugguggugcccagauacgccuucgccauggagagaaacgccggcagcggcaucaucaucagcgacacccccgugcacgacugcaacaccaccugccagacccccaagggcgccaucaacaccagccugcccuuccagaacauccaccccaucaccaucggcaagugccccaaguacgugaagagcaccaagcugagacuggccaccggccugagaaacgugcccagcauccagagcagaggccuguucggcgccaucgccggcuucaucgagggcggcuggaccggcaugguggacggcugguacggcuaccaccaccagaacgagcagggcagcggcuacgccgccgaccugaagagcacccagaacgccaucgacaagaucaccaacaaggugaacagcgugaucgagaagaugaacacccaguucaccgccgugggcaaggaguucaaccaccuggagaagagaaucgagaaccugaacaagaagguggacgacggcuuccuggacaucuggaccuacaacgccgagcugcuggugcugcuggagaacgagagaacccuggacuaccacgacagcaacgugaagaaccuguacgagaaggugagaagccagcugaagaacaacgccaaggagaucggcaacggcugcuucgaguucuaccacaagugcgacaacaccugcauggagagcgugaagaacggcaccuacgacuaccccaaguacagcgaggaggccaagcugaacagagaggagaucgacggcgugaagcuggagagcaccagaaucuaccagauccuggccaucuacagcaccguggccagcagccuggugcugguggugagccugggcgccaucagcuucuggaugugcagcaacggcagccugcagugcagaaucugcaucuga

SEQ ID NO: 166893 - RNA, 1701 nt, Artificial Sequence; identical to SEQ ID NO: 163527
  derived and/or modified CDS sequence (opt4) from hemagglutinin__InfluenzaA__AEH59595

SEQ ID NO: 166894 - RNA, 1701 nt, Artificial Sequence; identical to SEQ ID NO: 163893
  derived and/or modified CDS sequence (opt4) from hemagglutinin__InfluenzaA__AEH59597

SEQ ID NO: 166895 - RNA, 1701 nt, Artificial Sequence; identical to SEQ ID NO: 166888
  derived and/or modified CDS sequence (opt4) from hemagglutinin__InfluenzaA__AEH59599

SEQ ID NO: 166896 - RNA, 1701 nt, Artificial Sequence
  derived and/or modified CDS sequence (opt4) from hemagglutinin__InfluenzaA__AEH59601
augaaggccauccugguggugcugcuguacaccuucgccaccgccaacgccgacacccugugcaucggcuaccacgccaacaacagcaccgacaccguggacaccgugcuggagaagaacgugaccgugacccacagcgugaaccugcuggaggacaagcacaacggcaagcugugcaagcugagaggcguggccccccugcaccugggcaacugcaacaucgccggcuggauccugggcaaccccgagugcgagagccugagcaccgccagcagcuggagcuacaucguggagaccagcagcagcgacaacggcaccugcuaccccggcgacuucaucgacuacgaggagcugagagagcagcugagcagcgugagcagcuucgagagauucgagaucuuccccaagaccagcagcuggcccaaccacgacagcaacaagggcgugaccgccgccugcccccacgccggcgccaagagcuucuacaagaaccugaucuggcuggugaagaagggcaacagcuaccccaagcugagcaagagcuacaucaacgacaagggcaaggaggugcuggugcuguggggcauccaccaccccagcaccagcgccgaccagcagagccuguaccagaacgccgacgccuacguguucgugggcaccagcagauacagcaagaaguucaagcccgagaucgccaucagacccaaggugagagaccaggagggcagaaugaacuacuacuggacccugguggagcccggcgacaagaucaccuucgaggccaccggcaaccugguggugcccagauacgccuucgccauggagagaaacgccggcagcggcaucaucaucagcgacacccccgugcacgacugcaacaccaccugccagacccccaagggcgccaucaacaccagccugcccuuccagaacauccaccccaucaccaucggcaagugccccaaguacgugaagagcaccaagcugagacuggccaccggccugagaaacgugcccagcauccagagcagaggccuguucggcgccaucgccggcuucaucgagggcggcuggaccggcaugguggacggcugguacggcuaccaccaccagaacgagcagggcagcggcuacgccgccgaccugaagagcacccagaacgccaucgacaagaucaccaacaaggugaacagcgugaucgagaagaugaacacccaguucaccguggugggcaaggaguucaaccaccuggagaagagaaucgagaaccugaacaagaagguggacgacggcuuccuggacaucuggaccuacaacgccgagcugcuggugcugcuggagaacgagagaacccuggacuaccacgacagcaacgugaagaaccuguacgagaaggugagaagccagcugaagaacaacgccaaggagaucggcaacggcugcuucgaguucuaccacaagugcgacaacaccugcauggagagcgugaagaacggcaccuacgacuaccccaaguacagcgaggaggccaagcugaacagagaggagaucgacggcgugaagcuggagagcaccagaaucuaccagauccuggccaucuacagcaccguggccagcagccuggugcugguggugagccugggcgccaucagcuucuggaugugcagcaacggcagccugcagugcagaaucugcaucuga

SEQ ID NO: 166897 - RNA, 1701 nt, Artificial Sequence; identical to SEQ ID NO: 163527
  derived and/or modified CDS sequence (opt4) from hemagglutinin__InfluenzaA__AEH59604

SEQ ID NO: 166898 - RNA, 1701 nt, Artificial Sequence; identical to SEQ ID NO: 163527
  derived and/or modified CDS sequence (opt4) from hemagglutinin__InfluenzaA__AEH59614

SEQ ID NO: 166899 - RNA, 1701 nt, Artificial Sequence
  derived and/or modified CDS sequence (opt4) from hemagglutinin__InfluenzaA__AEH59624
augaaggccauccugguggugcugcuguacaccuucgccaccgccaacgccgacacccugugcaucggcuaccacgccaacaacagcaccgacaccguggacaccgugcuggagaagaacgugaccgugacccacagcgugaaccugcuggaggacaagcacaacggcaagcugugcaagcugagaggcguggccccccugcaccugggcaagugcaacaucgccggcuggauccugggcaaccccgagugcgagagccugagcaccgccagcagcuggagcuacaucguggagaccagcagcagcgacaacggcaccugcuaccccggcgacuucaucgacuacgaggagcugagagagcagcugagcagcgugagcagcuucgagagauucgagaucuuccccaagaccagcagcuggcccaaccacgaccccaacaagggcgugaccgccgccugcccccacgccggcgccaagagcuucuacaagaaccugaucuggcuggugaagaagggcaacagcuaccccaagcugagcaagagcuacaucaacgacaagggcaaggaggugcuggugcuguggggcauccaccaccccagcaccagcgccgaccagcagagcuucuaccagaacgccgacgccuacguguucgugggcaccagcagauacagcaagaaguucaagcccgagaucgccaucagacccaaggugagagaccaggagggcagaaugaacuacuacuggacccugguggagcccggcgacaagaucaccuucgaggccaccggcaaccugguggugcccagauacgccuucgccauggagagaaacgccggcagcggcaucaucaucagcgacacccccgugcacgacugcaacaccaccugccagacccccaagggcgccaucaacaccagccugcccuuccagaacauccaccccaucaccaucggcaagugccccaaguacgugaagagcaccaagcugagacuggccaccggccugagaaacgugcccagcauccagagcagaggccuguucggcgccaucgccggcuucaucgagggcggcuggaccggcaugguggacggcugguacggcuaccaccaccagaacgagcagggcagcggcuacgccgccgaccugaagagcacccagaacgccaucgacgagaucaccaacaaggugaacagcgugaucgagaagaugaacacccaguucaccgccgugggcaaggaguucaaccaccuggagaagagaaucgagaaccugaacaagaagguggacgacggcuuccuggacaucuggaccuacaacgccgagcugcuggugcugcuggagaacgagagaacccuggacuaccacgacagcaacgugaagaaccuguacgagaaggugagaagccagcugaagaacaacgccaaggagaucggcaacggcugcuucgaguucuaccacaagugcgacaacaccugcauggagagcgugaagaacggcaccuacgacuaccccaaguacagcgaggaggccaagcugaacagagaggagaucgacggcgugaagcuggagagcaccagaaucuaccagauccuggccaucuacagcaccguggccagcagccuggugcugguggugagccugggcgccaucagcuucuggaugugcagcaacggcagccugcagugcagaaucugcaucuga

SEQ ID NO: 166900 - RNA, 1698 nt, Artificial Sequence
  derived and/or modified CDS sequence (opt4) from hemagglutinin__InfluenzaA__AEH77259
augaaggugaagcugcuggugcugcugugcaccuucaccgccaccuacgccgacaccaucugcaucggcuaccacgccaacaacagcaccgacaccguggacaccgugcuggagaagaacgugaccgugacccacagcgugaaccugcuggagaacagccacaacggcaagcugugccugcugaagggcaucgccccccugcagcugggcaacugcagcguggccggcuggauccugggcaaccccgagugcgagcugcugaucagcaaggagagcuggagcuacaucguggagaagcccaaccccgagaacggcaccugcuaccccggccacuucgccgacuacgaggagcugagagagcagcugagcagcgugagcagcuucgagagauucgagauguuccccaaggagagcagcuggcccaaccacaccgugaccggcgugagcgccagcugcagccacaacggcgagagcagcuucuacagaaaccugcuguggcugaccgagaagaacggccuguaccccaaccugagcaagagcuacgccaacaacaaggagaaggaggugcuggugcuguggggcgugcaccacccccccagcaucagcgaccagaagacccuguaccacaccgagaacgccuacgugagcguggugagcagccacuacagcagaaaguucacccccgagaucgccaagagacccaaggugagagaccaggagggcagaaucaacuacuacuggacccugcuggagcccggcgacaccaucaucuucgaggccaacggcaaccugaucgcccccagauacgccuucgcccugagcagaggcuucggcagcggcaucaucaacagcaacgcccccauggacaagugcgacgccaagugccagaccccccagggcgccaucaacagcagccugcccuuccagaacgugcaccccgugaccaucggcgagugccccaaguacgugagaagcgccaagcugagaauggugaccggccugagaaacauccccagcauccagagcagaggccuguucggcgccaucgccggcuucaucgagggcggcuggaccggcaugguggacggcugguacggcuaccaccaccagaacgagcagggcagcggcuacgccgccgaccagaagagcacccagaacgccaucaacggcaucaccaacaaggugaacagcgugaucgagaagaugaacacccaguucaccgccgugggcaaggaguucaacaagcuggagagaagaauggagaaccugaacaagaagguggacgacggcuucaucgacaucuggaccuacaacgccgagcugcuggugcugcuggagaacgagagaacccuggacuuccacgacagcaacgugaagaaccuguacgagaaggugaagaaccagcugaagaacaacgccaaggagaucggcaacggcugcuucgaguucuaccacaagugcaacgacgagugcauggagagcgugaagaacggcaccuacgacuaccccaaguacagcgaggagagcaagcugaacagagagaagaucgacggcgugaagcuggagagcaugggcguguaccagauccuggccaucuacagcaccguggccagcagccugguguuccuggugagccugggcgccaucagcuucuggaugugcagcaacggcagccugcagugcagaaucugcaucuga

SEQ ID NO: 166901 - RNA, 1701 nt, Artificial Sequence; identical to SEQ ID NO: 162716
  derived and/or modified CDS sequence (opt4) from hemagglutinin__InfluenzaA__AEH77270

SEQ ID NO: 166902 - RNA, 1701 nt, Artificial Sequence; identical to SEQ ID NO: 160092
  derived and/or modified CDS sequence (opt4) from hemagglutinin__InfluenzaA__AEH77279

SEQ ID NO: 166903 - RNA, 1701 nt, Artificial Sequence; identical to SEQ ID NO: 163831
  derived and/or modified CDS sequence (opt4) from hemagglutinin__InfluenzaA__AEI29215

SEQ ID NO: 166904 - RNA, 1701 nt, Artificial Sequence; identical to SEQ ID NO: 162729
  derived and/or modified CDS sequence (opt4) from hemagglutinin__InfluenzaA__AEI29225

SEQ ID NO: 166905 - RNA, 1701 nt, Artificial Sequence
  derived and/or modified CDS sequence (opt4) from hemagglutinin__InfluenzaA__AEI29591
augaagaccaucaucgcccugagcuacaucuucugccugguguucgcccaggaccugcccggcaacgacaacagcaccgccacccugugccugggccaccacgccgugcccaacggcacccuggugaagaccaucaccaacgaccagaucgaggugaccaacgccaccgagcuggugcagagcagcagcaccggcaagaucugcgacaacccccacagaauccuggacggcaucaacugcacccugaucgacgcccugcugggcgacccccacugcgacggcuuccagaacgagaagugggaccuguucguggagagaagcaaggccuucagcaacugcuaccccuacgacgugcccgacuacgccagccugagaagccugguggccagcagcggcacccuggaguucaucaacgagggcuucaacuggaccggcgugacccagaacggcggcagcagcgccugcaagagaggccccgacaacggcuucuucagcagacugaacuggcuguacaagagcggcagcaccuaccccgugcagaacgugaccaugcccaacaacgacaacagcgacaagcuguacaucuggggcgugcaccaccccagcaccgacaaggagcagaccaaccuguacgugcaggccagcggcaaggugaccgugagcaccaagagaagccagcagaccgugauccccaacgugggcagcagacccugggugagaggccugagcagcagagugagcaucuacuggaccaucgugaagcccggcgacauccuggugaucaacagcaacggcaaccugaucgcccccagaggcuacuacaagaugagaaccggcaagagcagcaucaugagaagcgacgcccccaucggcaccugcagcagcgagugcaucacccccaacggcagcauccccaacgacaagcccuuccagaacgugaacaagaucaccuacggcgccugccccaaguacgugaagcagaacacccugaagcuggccaccggcaugagaaacgugcccgagaagcagaccagaggcaucuucggcgccaucgccggcuucaucgagaacggcugggagggcaugaucgacggcugguacggcuucagacaccagaacagcgagggcaccggccaggccgccgaccugaagagcacccaggccgccaucgaccagaucaacggcaagcugaacagagugaucgagaagaccaacgagaaguuccaccagaucgagaaggaguucagcgagguggagggcagaauccaggaccuggagaaguacguggaggacaccaagaucgaccuguggagcuacaacgccgagcugcugguggcccuggagaaccagcacaccaucgaccugaccgacagcgagaugaacaagcuguucgagaagaccagaagacagcugagagagaacgccgaggacaugggcaacggcugcuucaagaucuaccacaagugcgacaacgccugcaucggcagcaucagaaacggcaccuacgaccacgacguguacagagacgaggcccugaacaacagauuccagaucaagggcguggagcugaagagcggcuacaaggacuggauccuguggaucagcuucgccaucagcugcuuccugcugugcguggugcugcugggcuucaucaugugggccugccagaagggcaacaucagaugcaacaucugcaucuga

SEQ ID NO: 166906 - RNA, 1701 nt, Artificial Sequence; identical to SEQ ID NO: 160092
  derived and/or modified CDS sequence (opt4) from hemagglutinin__InfluenzaA__AEI54347

SEQ ID NO: 166907 - RNA, 1701 nt, Artificial Sequence; identical to SEQ ID NO: 160178
  derived and/or modified CDS sequence (opt4) from hemagglutinin__InfluenzaA__AEI54358

SEQ ID NO: 166908 - RNA, 1701 nt, Artificial Sequence; identical to SEQ ID NO: 160693
  derived and/or modified CDS sequence (opt4) from hemagglutinin__InfluenzaA__AEI54369

SEQ ID NO: 166909 - RNA, 1701 nt, Artificial Sequence; identical to SEQ ID NO: 160576
  derived and/or modified CDS sequence (opt4) from hemagglutinin__InfluenzaA__AEI54380

SEQ ID NO: 166910 - RNA, 1701 nt, Artificial Sequence; identical to SEQ ID NO: 166839
  derived and/or modified CDS sequence (opt4) from hemagglutinin__InfluenzaA__AEI54391

SEQ ID NO: 166911 - RNA, 1701 nt, Artificial Sequence
  derived and/or modified CDS sequence (opt4) from hemagglutinin__InfluenzaA__AEI54402
augaagaccaucaucgcccugagcuacauccugugccugguguucgcccagaagcugcccggcaacgacaacagcaccgccacccugugccugggccaccacgccgugcccaacggcaccaucgugaagaccaucaccaacgaccagaucgaggugaccaacgccaccgagcuggugcagagcagcagcaccggcgagaucugcuacagcccccaccagauccuggacggcgagaacugcacccugaucgacgcccugcugggcgacccccagugcgacggcuuccagaacaagaagugggaccuguucguggagagaagcaaggccuacagcaacugcuaccccuacgacgugcccgacuacgccagccugagaagccugguggccagcagcggcacccuggaguucaacaacgagagcuucaacuggaccggcgugacccagaacggcaccagcagcgccugcaucagaagaagcaacaacagcuucuucagcagacugaacuggcugacccaccugaaguucaaguaccccgcccugaacgugaccaugcccaacaacgagaaguucgacaagcuguacaucuggggcgugcaccaccccggcaccgacaacgaccagaucuuccuguacgcccaggccagcggcagaaucaccgugagcaccaagagaagccagcagaccgugauccccaacaucggcagcagacccagagugagaaacauccccagcagaaucagcaucuacuggaccaucgugaagcccggcgacauccugcugaucaacagcaccggcaaccugaucgcccccagaggcuacuucaagaucagaagcggcaagagcagcaucaugagaagcgacgcccccaucggcaagugcaacagcgagugcaucacccccaacggcagcauccccaacgacaagcccuuccagaacgugaacagaaucaccuacggcgccugccccagauacgugaagcagaacacccugaagcuggccaccggcaugagaaacgugcccgagaagcagaccagaggcaucuucggcgccaucgccggcuucaucgagaacggcugggagggcaugguggacggcugguacggcuucagacaccagaacagcgagggcaucggccaggccgccgaccugaagagcacccaggccgccaucgaccagaucaacggcaagcugaacagacugaucggcaagaccaacgagaaguuccaccagaucgagaaggaguucagcgagguggagggcagaauccaggaccuggagaaguacguggaggacaccaagaucgaccuguggagcuacaacgccgagcugcugguggcccuggagaaccagcacaccaucgaccugaccgacagcgagaugaacaagcuguucgagaagaccaagaagcagcugagagagaacgccgaggacaugggcaacggcugcuucaagaucuaccacaagugcgacaacgccugcaucggcagcaucagaaacggcaccuacgaccacgacguguacagagacgaggcccugaacaacagauuccagaucaagggcguggagcugaagagcggcuacaaggacuggauccuguggaucagcuucgccaucagcugcuuccugcugugcguggcccugcugggcuucaucaugugggccugccagaagggcaacaucagaugcaacaucugcaucuga

SEQ ID NO: 166912 - RNA, 1701 nt, Artificial Sequence; identical to SEQ ID NO: 161988
  derived and/or modified CDS sequence (opt4) from hemagglutinin__InfluenzaA__AEI54413

SEQ ID NO: 166913 - RNA, 1701 nt, Artificial Sequence; identical to SEQ ID NO: 160341
  derived and/or modified CDS sequence (opt4) from hemagglutinin__InfluenzaA__AEI54424

SEQ ID NO: 166914 - RNA, 1701 nt, Artificial Sequence
  derived and/or modified CDS sequence (opt4) from hemagglutinin__InfluenzaA__AEI54446
augaagaccaucaucgcccugagcuacauccugugccugguguucgcccagaagcugcccgagaacgacaacagcaccgccacccugugccugggccaccacgccgugcccaacggcaccaucgugaagaccaucaccaacgaccagaucgaggugaccaacgccaccgagcuggugcagagcagcagcaccggcgagaucugcaacagcccccaccagauccuggacggcgagaacugcacccugaucgacgcccugcugggcgacccccagugcgacggcuuccagaacaagaagugggaccuguucguggagagaagcaaggcccacagcaacugcuaccccuacgacgugcccgacuacgccagccugagaagccugguggccagcagcggcacccuggaguucaacaacgagagcuucaacuggaccggcgugacccagaacggcaccagcagcgccugcaucagaagaagcaacaacagcuucuucagcagacugaacuggcugacccaccugaacuucaaguaccccgcccugaacgugaccaugcccaacaacgagcaguucgacaagcuguacaucuggggcgugcaccaccccggcaccgacaaggaccagaucuuccuguacgcccaggccgccggcagaaucaccgugagcaccaagagaagccagcaggccgugauccccaacaucggcagcagacccagagugagaaacauccccagcagagugagcaucuacuggaccaucgugaagcccggcgacauccugcugaucaacagcaccggcaaccugaucgcccccagaggcuacuucaagaucagaagcggcaagagcagcaucaugagaagcgacgcccccaucggcaagugcaacagcgccugcaucacccccaacggcagcauccccaacgacaagcccuuccagaacgugaacagaaucaccuacggcgccugccccagauacgugaagcagaacacccugaagcuggccaccggcaugagaaacgugcccgagaagcagaccagaggcaucuucggcgccaucgccggcuucaucgagaacggcugggagggcaugguggacggcugguacggcuucagacaccagaacagcgagggcagaggccaggccgccgaccugaagagcacccaggccgccaucgaccagaucaacggcaagcugaacagacugaucggcaagaccaacgagaaguuccaccagaucgagaaggaguucagcgagguggagggcagaauccaggaccuggagaaguacguggaggacaccaagaucgaccuguggagcuacaacgccgagcugcugguggcccuggagaaccagcacaccaucgaccugaccgacagcgagaugaacaagcuguucgagaagaccaagaagcagcugagagagaacgccgaggacaugggcaacggcugcuucaagaucuaccacaagugcgacaacgccugcaucggcagcaucagaaacggcaccuacgaccacgacguguacagagacgaggcccugaacaacagauuccagaucaagggcguggagcugaagagcggcuacaaggacuggauccuguggaucagcuucgccaucagcugcuuccugcugugcguggcccugcugggcuucaucaugugggccugccagaagggcaacaucagaugcaacaucugcaucuga

SEQ ID NO: 166915 - RNA, 1701 nt, Artificial Sequence
  derived and/or modified CDS sequence (opt4) from hemagglutinin__InfluenzaA__AEI54457
augaagaccaucaucgcccugagcuacauccugugccugguguucgcccagaagcugcccggcaacgacaacagcaccgccacccugugccugggccaccacgccgugcccaacggcaccaucgugaagaccaucaccaacgaccagaucgaggugaccaacgccaccgagcuggugcagagcagcagcaccggcgagaucugcaacagcccccaccagauccuggacggcgagaacugcacccugaucgacgcccugcugggcgacccccagugcgacggcuuccagaacaagaagugggaccuguucguggagagaagcaaggcccacagcaacugcuaccccuacgacgugcccgacuacgccagccugagaagccugguggccagcagcggcacccuggaguucaacaacgagagcuucaacuggaccggcgugacccagaacggcaccagcagcgccugcaucagaagaagcaacaacagcuucuucagcagacugaacuggcugacccaccugaacuucaaguaccccgcccugaacgugaccaugcccaacaacgagcaguucgacaagcuguacaucuggggcgugcaccaccccggcaccgacaaggaccagaucuuccuguacgcccaggccgccggcagaaucaccgugagcaccaagagaagccagcaggccgugauccccaacaucggcagcagacccagagugagaaacauccccagcagagugagcaucuacuggaccaucgugaagcccggcgacauccugcugaucaacagcaccggcaaccugaucgcccccagaggcuacuucaagaucagaagcggcaagagcagcaucaugagaagcgacgcccccaucggcaagugcaacagcgccugcaucacccccaacggcagcauccccaacgacaagcccuuccagaacgugaacagaaucaccuacggcgccugccccagauacgugaagcagaacacccugaagcuggccaccggcaugagaaacgugcccgagaagcagaccagaggcaucuucggcgccaucgccggcuucaucgagaacggcugggagggcaugguggacggcugguacggcuucagacaccagaacagcgagggcagaggccaggccgccgaccugaagagcacccaggccgccaucgaccagaucaacggcaagcugaacagacugaucggcaagaccaacgagaaguuccaccagaucgagaaggaguucagcgagguggagggcagaauccaggaccuggagaaguacguggaggacaccaagaucgaccuguggagcuacaacgccgagcugcugguggcccuggagaaccagcacaccaucgaccugaccgacagcgagaugaacaagcuguucgagaagaccaagaagcagcugagagagaacgccgaggacaugggcaacggcugcuucaagaucuaccacaagugcgacaacgccugcaucggcagcaucagaaacggcaccuacgaccacgacguguacagagacgaggcccugaacaacagauuccagaucaagggcguggagcugaagagcggcuacaaggacuggauccuguggaucagcuucgccaucagcugcuuccugcugugcguggcccugcugggcuucaucaugugggccugccagaagggcaacaucagaugcaacaucugcaucuga

SEQ ID NO: 166916 - RNA, 1701 nt, Artificial Sequence; identical to SEQ ID NO: 165593
  derived and/or modified CDS sequence (opt4) from hemagglutinin__InfluenzaA__AEI54468

SEQ ID NO: 166917 - RNA, 1701 nt, Artificial Sequence; identical to SEQ ID NO: 165593
  derived and/or modified CDS sequence (opt4) from hemagglutinin__InfluenzaA__AEI54479

SEQ ID NO: 166918 - RNA, 1701 nt, Artificial Sequence; identical to SEQ ID NO: 166915
  derived and/or modified CDS sequence (opt4) from hemagglutinin__InfluenzaA__AEI54490

SEQ ID NO: 166919 - RNA, 1701 nt, Artificial Sequence; identical to SEQ ID NO: 166914
  derived and/or modified CDS sequence (opt4) from hemagglutinin__InfluenzaA__AEI54501

SEQ ID NO: 166920 - RNA, 1701 nt, Artificial Sequence
  derived and/or modified CDS sequence (opt4) from hemagglutinin__InfluenzaA__AEI59979
augaagaccaucaucgcccugagcuacauccugugccugguguucgcccagaagcugcccggcaacgacaacagcaccgccacccugugccugggccaccacgccgugcccaacggcaccaucgugaagaccaucaccaacgaccagaucgaggugaccaacgccaccgagcuggugcagaucagcagcaccggcgagaucugcgacagcccccaccagauccuggacggcgagaacugcacccugaucgacgcccugcugggcgacccccagugcgacggcuuccagaacaagaagugggaccuguucguggagagaagcaaggccuacagcaacugcuaccccuacgacgugcccgacuacgccagccugagaagccugguggccagcagcggcacccuggaguucaacaacgagagcuucaacuggaccggcgugacccagaacggcaccagcagcgccugcaucagaagaagcaacaacagcuucuucagcagacugaacuggcugacccaccugaaguucaaguaccccgcccugaacgugaccaugcccaacaacgagcaguucgacaagcuguacaucuggggcgugcaccaccccggcaccgacaacgaccagaucuuccuguacgcccaggccagcggcagaaucaccgugagcaccaagagaagccagcagaccgugauccccaacaucggcagcagacccagagugagaaacauccccagcagaaucagcaucuacuggaccaucgugaagcccggcgacauccugcugaucaacagcaccggcaaccugaucgcccccagaggcuacuucaagaucagaagcggcaagagcagcaucaugagaagcgacgcccccaucggcaagugcaacagcgagugcaucacccccaacggcagcauccccaacgacaagcccuuccagaacgugaacagaaucaccuacggcgccugccccagauacgugaagcagaacacccugaagcuggccaccggcaugagaaacgugcccgagaagcagaccagaggcaucuucggcgccaucgccggcuucaucgagaacggcugggagggcaugguggacggcugguacggcuucagacaccagaacagcgagggcagaggccaggccgccgaccugaagagcacccaggccgccaucgaccagaucaacggcaagcugaacagacugaucgagaagaccaacgagaaguuccaccagaucgagaaggaguucagcgagguggagggcagaauccaggaccuggagaaguacguggaggacaccaagaucgaccuguggagcuacaacgccgagcugcugguggcccuggagaaccagcacaccaucgaccugaccgacagcgagaugaacaagcuguucgagaagaccaagaagcagcugagagagaacgccgaggacaugggcaacggcugcuucaagaucuaccacaagugcgacaacgccugcaucggcagcaucagaaacggcaccuacgaccacgacguguacagagacgaggcccugaacaacagauuccagaucaagggcguggagcugaagagcggcuacaaggacuggauccuguggaucagcuucgccaucagcugcuuccugcugugcguggcccugcugggcuucaucaugugggccugccagaagggcaacaucagaugcaacaucugcaucuga

SEQ ID NO: 166921 - RNA, 1698 nt, Artificial Sequence; identical to SEQ ID NO: 166017
  derived and/or modified CDS sequence (opt4) from hemagglutinin__InfluenzaA__AEI59990

SEQ ID NO: 166922 - RNA, 1698 nt, Artificial Sequence; identical to SEQ ID NO: 166019
  derived and/or modified CDS sequence (opt4) from hemagglutinin__InfluenzaA__AEI60001

SEQ ID NO: 166923 - RNA, 1701 nt, Artificial Sequence
  derived and/or modified CDS sequence (opt4) from hemagglutinin__InfluenzaA__AEI60012
augaagaccaucaucgcccugagcuacauccugugccugguguucgcccagaagcugcccggcaacgacaacagcaccgccacccugugccugggccaccacgccgugcccaacggcaccaucgugaagaccaucaccaacgaccagaucgaggugaccaacgccaccgagcuggugcagagcagcagcaccggcgagaucugcgacagcccccaccagauccuggacggcgagaacugcacccugaucgacgcccugcugggcgacccccagugcgacggcuuccagaacaagaagugggaccuguucguggagagaagcaaggccuacagcaacugcuaccccuacgacgugcccgacuacgccagccugagaagccugguggccagcagcggcacccuggaguucaacaacgagagcuucaacuggaccggcgugacccagaacggcaccagcagcgccugcaucagaagcagcaacaacagcuucuucagcagacugaacuggcugacccaccugaaguucaaguaccccgcccugaacgugaccaugcccaacaacgagcaguucgacaagcuguacaucuggggcgugcaccaccccggcaccgacaacgaccagaucuuccuguacgcccaggccagcggcagaaucaccgugagcaccaagagaagccagcagaccgugauccccaacaucggcagcagacccagagugagaaacauccccagcagaaucagcaucuacuggaccaucgugaagcccggcgacauccugcugaucaacagcaccggcaaccugaucgcccccagaggcuacuucaagaucagaagcggcaagagcagcaucaugagaagcgacgcccccaucggcaagugcaacagcgagugcaucacccccaacggcagcauccccaacgacaagcccuuccagaacgugaacagaaucaccuacggcgccugccccagauacgugaagcagaacacccugaagcuggccaccggcaugagaaacgugcccgagaagcagaccagaggcaucuucggcgccaucgccggcuucaucgagaacggcugggagggcaugguggacggcugguacggcuucagacaccagaacagcgagggcagaggccaggccgccgaccugaagagcacccaggccgccaucgaccagaucaacggcaagcugaacagacugaucggcaagaccaacgagaaguuccaccagaucgagaaggaguucagcgagguggagggcaagauccaggaccuggagaaguacguggaggacaccaagaucgaccuguggagcuacaacgccgagcugcugguggcccuggagaaccagcacaccaucgaccugaccgacagcgagaugaacaagcuguucgagaagaccaagaagcagcugagagagaacgccgaggacaugggcaacggcugcuucaagaucuaccacaagugcgacaacgccugcaucggcagcaucagaaacggcaccuacaaccacgacguguacagagacgaggcccugaacaacagauuccagaucaagggcguggagcugaagagcggcuacaaggacuggauccuguggaucagcuucgccaucagcugcuuccugcugugcguggcccugcugggcuucaucaugugggccugccagaagggcaacaucagaugcaacaucugcaucuga

SEQ ID NO: 166924 - RNA, 1701 nt, Artificial Sequence; identical to SEQ ID NO: 162494
  derived and/or modified CDS sequence (opt4) from hemagglutinin__InfluenzaA__AEI60023

SEQ ID NO: 166925 - RNA, 1701 nt, Artificial Sequence
  derived and/or modified CDS sequence (opt4) from hemagglutinin__InfluenzaA__AEI60034
augaagaccaucaucgcccugagcuacauccugugccugguguucgcccagaagcugcccggcaacgacaacagcaccgccacccugugccugggccaccacgccgugcccaacggcaccaucgugaagaccaucaccaacgaccagaucgaggugaccaacgccaccgagcuggugcagagcagcagcaccggcgagaucugcgacagcccccaccagauccuggacggcaagaacugcacccugaucgacgcccugcugggcgacccccagugcgacggcuuccagaacaagaagugggaccuguucguggagagaagcaaggccuacagcaacugcuaccccuacgacgugcccgacuacgccagccugagaagccugguggccagcagcggcacccuggaguucaacaacgagagcuucaacuggaccggcgugacccagaacggcaccagcagcgccugcaucagaagaagcaacaacagcuucuucagcagacugaacuggcugacccaccugaaguucaaguaccccgcccugaacgugaccaugcccaacaacgagcaguucgacaagcuguacaucuggggcgugcaccaccccggcaccgacaaggaccagaucuuccuguacgcccaggccagcggcagaaucaccgugagcaccaagagaagccagcagaccgugauccccaacaucggcagcagacccagagugagaaacauccccagcagaaucagcaucuacuggaccaucgugaagcccggcgacauccugcugaucaacagcaccggcaaccugaucgcccccagaggcuacuucaagaucagaagcggcaagagcagcaucaugagaagcgacgcccccaucggcaagugcaacagcgagugcaucacccccaacggcagcauccccaacgacaagcccuuccagaacgugaacagaaucaccuacggcgccugccccagauacgugaagcagaacacccugaagcuggccaccggcaugagaaacgugcccgagaagcagaccagaggcaucuucggcgccaucgccggcuucaucgagaacggcugggagggcaugguggacggcugguacggcuucagacaccagaacagcgagggcagaggccaggccgccgaccugaagagcacccaggccgccaucgaccagaucaacggcaagcugaacagacugaucggcaagaccaacgagaaguuccaccagaucgagaaggaguucagcgagguggagggcagaauccaggaccuggagaaguacguggaggacaccaagaucgaccuguggagcuacaacgccgagcugcugguggcccuggagaaccagcacaccaucgaccugaccgacagcgagaugaacaagcuguucgagaagaccaagaagcagcugagagagaacgccgaggacaugggcaacggcugcuucaagaucuaccacaagugcgacaacgccugcaucggcagcaucagaaacggcaccuacgaccacgacguguacagagacgaggcccugaacaacagauuccagaucaagggcguggagcugaagagcggcuacaaggacuggauccuguggaucagcuucgccaucagcugcuuccugcugugcguggcccugcugggcuucaucaugugggccugccagaagggcaacaucagaugcaacaucugcaucuga

SEQ ID NO: 166926 - RNA, 1701 nt, Artificial Sequence
  derived and/or modified CDS sequence (opt4) from hemagglutinin__InfluenzaA__AEI60045
augaagaccaucaucgcccugagcuacauccugugccugguguucgcccagaagcugcccggcaacgacaacagcaccgccacccugugccugggccaccacgccgugcccaacggcaccaucgugaagaccaucaugaacgaccagaucgaggugaccaacgccaccgagcuggugcagagcagcagcaccggcgagaucugcgacagcccccaccagauccuggacggcaagaacugcacccugaucgacgcccugcugggcgacccccagugcgacggcuuccagaacaagaagugggaccuguucguggagagaagcaaggccuacagcaacugcuaccccuacgacgugcccgacuacgccagccugagaagccugguggccagcagcggcacccuggaguucaacaacgagagcuucaacuggaccggcgugacccagaacggcaccagcagcgccugcaucagaagaagcaagaacagcuucuucagcagacugaacuggcugacccaccugaacuucaaguaccccgcccugaacgugaccaugcccaacaacgagcaguucgacaagcuguacaucuggggcgugcaccaccccggcaccgacaaggaccagaucuuccuguacgcccaggccagcggcagaaucaccgugagcaccaagagaagccagcagaccgccauccccaacaucggcuacagacccagagugagaaacauccccagcagaaucagcaucuacuggaccaucgugaagcccggcgacauccugcugaucaacagcaccggcaaccugaucgcccccagaggcuacuucaagaucagaagcggcaagagcagcaucaugagaagcgacgcccccaucggcaagugcaacagcgagugcaucacccccaacggcagcauccccaacgacaagcccuuccagaacgugaacagaaucaccuacggcgccugccccagauacgugaagcagaacacccugaagcuggccaccggcaugagaaacgugcccgagaagcagaccagaggcaucuucggcgccaucgccggcuucaucgagaacggcugggagggcaugguggacggcugguacggcuucagacaccagaacagcgagggcagaggccaggccgccgaccugaagagcacccaggccgccaucgaccagaucaacggcaagcugaacagacugaucggcaagaccaacgagaaguuccaccagaucgagaaggaguucagcgagguggagggcagaauccaggaccuggagaaguacguggaggacaccaagaucgaccuguggagcuacaacgccgagcugcugguggcccuggagaaccagcacaccaucgaccugaccgacagcgagaugaacaagcuguucgagaagaccaagaagcagcugagagagaacgccgaggacaugggcaacggcugcuucaagaucuaccacaagugcgacaacgccugcaucggcagcaucagaaacggcaccuacgaccacgacguguacagagacgaggcccugaacaacagauuccagaucaagggcguggagcugaagagcggcuacaaggacuggauccuguggaucagcuucgccaucagcugcuuccugcugugcguggcccugcugggcuucaucaugugggccugccagaagggcaacaucagaugcaacaucugcaucuga

SEQ ID NO: 166927 - RNA, 1701 nt, Artificial Sequence
  derived and/or modified CDS sequence (opt4) from hemagglutinin__InfluenzaA__AEI60086
augaaggccauccugguggugcugcuguacaccuucgccaccgccaacgccgacacccugugcaucggcuaccacgccaacaacagcaccgacaccguggacaccgugcuggagaagaacgugaccgugacccacagcgugaaccugcuggaggacaagcacaacggcaagcugugcaagcugagaggcguggccccccugcaccugggcaagugcaacaucgccggcuggauccugggcaaccccgagugcgagagccugagcaccgccagcagcuggagcuacaucguggagaccagcagcagcgacaacggcaccugcuaccccggcgacuucaucaacuacgaggagcugagagagcagcugagcagcgugagcagcuucgagagauucgagaucuuccccaagaccagcagcuggcccaaccacgacagcaacaagggcgugaccgccgccugcccccacgccggcgccaagagcuucuacaagaaccugaucuggcuggugaagaagggcaacagcuaccccaagcugagcaagagcuacaucaacgacaagggcaaggaggugcuggugcuguggggcauccaccaccccagcaccaccgccgaccagcagagccuguaccagaacgccgacgccuacguguucgugggcaccagcagauacagcaagaaguucaagcccgagaucgccaucagacccaaggugagagaccaggagggcagaaugaacuacuacuggacccugguggagcccggcgacaagaucaccuucgaggccaccggcaaccugguggugcccagauacgccuucgccauggagagaaacgccggcagcggcaucaucaucagcgacacccccgugcacgacugcaacaccaccugccagacccccaagggcgccaucaacaccagccugcccuuccagaacauccaccccaucaccaucggcaagugccccaaguacgugaagagcaccaagcugagacuggccaccggccugagaaacgugcccagcauccagagcagaggccuguucggcgccaucgccggcuucaucgagggcggcuggaccggcaugguggacggcugguacggcuaccaccaccagaacgagcagggcagcggcuacgccgccgaccugaagagcacccagaacgccaucgacaagaucaccaacaaggugaacagcgugaucgagaagaugaacacccaguucaccgccgugggcaaggaguucaaccaccuggagaagagaaucgagaaccugaacaagaagguggacgacggcuuccuggacaucuggaccuacaacgccgagcugcuggugcugcuggagaacgagagaacccuggacuaccacgacagcaacgugaagaaccuguacgagaaggugagaaaccagcugaagaacaacgccaaggagaucggcaacggcugcuucgaguucuaccacaagugcgacaacaccugcauggagagcgugaagaacggcaccuacgacuaccccaaguacagcgaggaggccaagcugaacagagaggagaucgacggcgugaagcuggagagcaccagaaucuaccagauccuggccaucuacagcaccguggccagcagccuggugcugguggugagccugggcgccaucagcuucuggaugugcagcaacggcagccugcagugcagaaucugcaucuga

SEQ ID NO: 166928 - RNA, 1701 nt, Artificial Sequence
  derived and/or modified CDS sequence (opt4) from hemagglutinin__InfluenzaA__AEI60109
augaagaccaccaucgcccugagcuacauccugugccugguguucgcccagaagcugcccggcaacgacaacagcaccgccacccugugccugggccaccacgccgugcccaacggcacccuggugaagaccaucaccaacgaccagaucgaggugaccaacgccaccgagcuggugcagaacagcagcaccggcagaaucugcgacagcccccaccagauccuggacggcgagaacugcacccugaucgacgcccugcugggcgacccccacugcgacggcuuccagaacaaggagugggaccuguucguggagagaagcaaggccuacagcaacugcuaccccuacaacgugcccgacuacgugagccugagaagccugguggccagcagcggcacccuggaguucaacaacgagagcuucaacuggaccggcguggcccaggacggcagcagcuacgccugcaagagaagaagcaacaagagcuucuucagcagacugaacuggcugcaccagcugaacuacaaguaccccgcccugaacgugaccaugcccaacaacgagaacuucgacaagcuguacaucuggggcgugcaccaccccggcaccgacagcgaccagaucagccuguacgcccaggccagcggcagagugaccgugagcaccaagagaagccagcagaccgugauccccaacaucggcuacagacccugggugagaggcgugagcagcaucaucagcaucuacuggaccaucgugaagcccggcgacauccugcugaucaacagcaccggcaaccugaucgcccccagaggcuacuucaagaucagaagcggcaagagcagcaucaugagaagcgacgcccccaucggcaagugcaacagcgagugcaucacccccaacggcagcauccccaacgacaagcccuuccagaacgugaacagaaucaccuacggccccugccccagauacgugaagcagaacacccugaagcuggccaccggcaugagaaacgugcccgagaagcagaccagaggcaucuucggcgccaucgccggcuucaucgagaacggcugggagggcaugaaggacggcugguacggcuucagacaccagaacagcgagggcaccggccaggccgccgacaucaagagcacccaggccgccaucaaccagaucaacggcaagcugaacagacugaucgagaagaccaacgagaaguuccaccagaucgagaaggaguucagcgagguggagggcagaauccaggaccuggagaaguacguggaggacaccaagaucgaccuguggagcuacaacgccgagcugcugguggcccuggagaaccagcacaccaucgaccugaccgacagcgagaugaacaagcuguucgagagaaccaagaagcagcugagagagaacgccgaggacaugggcaacggcugcuucaagaucuaccacaagugcgacaacaccugcaucggcagcaucagaaacggcaccuacgaccacgacguguacagagacgaggcccugaacaacagauuccacaucaagggcguggagcugaagagcggcuacaaggacuggauccuguggaucagcuucgccaccagcugcuuccugcugugcaucgugcugcugggcuucaucaugugggccugccagaagggcaacaucagaugcaacaucugcaucuga

SEQ ID NO: 166929 - RNA, 1701 nt, Artificial Sequence
  derived and/or modified CDS sequence (opt4) from hemagglutinin__InfluenzaA__AEI86734
augaaggccauccugguggugcugcuguacaccuucgccaccgccaacgccgacacccugugcgugggcuaccacgccaacaacagcaccgacaccguggacaccgugcuggagaagaacgugaccgugacccacagcgugaaccugcuggaggacaagcacaacggcaagcugugcaagcugagaggcguggccccccugcaccugggcaagugcaacaucgccggcuggauccugggcaaccccgagugcgagagccugagcaccgccagcagcuggagcuacaucguggagaccagcaacagcgacaacggcaccugcuaccccggcgacuucaucgacuacgaggagcugagagagcagcugagcagcgugagcagcuucgagagauucgagaucuuccccaagaccagcagcuggcccaaccacgacagcaacaagggcgugaccgccgccugcccccacgccggcgccaagagcuucuacagaaaccugaucuggcuggugaagaagggcaacagcuaccccaagcugagcaagagcuacaucaacgacaagggcaaggaggugcuggugcuguggggcauccaccaccccagcaccagcgccgaccagcagagccuguaccagaacgccgacaccuacguguucgugggcaccagcagauacagcaagaaguucaagcccgagaucgccaucagacccaaggugagagaccaggagggcagaaugaacuacuacuggacccugguggagcccggcgacaagaucaccuucgaggccaccggcaaccugguggugcccagauacgccuucgccauggagagaaacgccggcagcggcaucaucaucagcgacacccccgugcacgacugcaacaccaccugccagacccccaagggcgccaucaacaccagccugcccuuccagaacauccaccccaucaccaucggcaagugccccaaguacgugaagagcaccaagcugagacuggccaccggccugagaaacgugcccagcauccagagcagaggccuguucggcgccaucgccggcuucaucgagggcggcuggaccggcaugguggacggcugguacggcuaccaccaccagaacgagcagggcagcggcuacgccgccgaccugaagagcacccagaacgccaucgacgagaucaccaacaaggugaacagcgugaucgagaagaugaacacccaguucaccgccgugggcaaggaguucaaccaccuggagaagagaaucgagaaccugaacaagaagguggacgacggcuuccuggacaucuggaccuacaacgccgagcugcuggugcugcuggagaacgagagaacccuggacuaccacgacagcaacgugaagaaccuguacgagaaggugagaagccagcugaagaacaacgccaaggagaucggcaacggcugcuucgaguucuaccacaagugcgacaacaccugcauggagagcgugaagaacggcaccuacgacuaccccaaguacagcgaggaggccaagcugaacagagaggagaucgacggcgugaagcuggagagcaccagaaucuaccagauccuggccaucuacagcaccguggccagcagccuggugcugguggugagccugggcgccaucagcuucuggaugugcagcaacggcagccugcagugcagaaucugcaucuga

SEQ ID NO: 166930 - RNA, 1701 nt, Artificial Sequence
  derived and/or modified CDS sequence (opt4) from hemagglutinin__InfluenzaA__AEI86764
augaaggccauccugguggugcugcuguacaccuucgccaccgccaacgccgacacccugugcaucggcuaccacgccaacaacagcaccgacaccguggacaccgugcuggagaagaacgugaccgugacccacagcgugaaccugcuggaggacaagcacaacggcaagcugugcaagcugagaggcguggccccccugcaccugggcaagugcaacaucgccggcuggauccugggcaaccccgagugcgagagccugagcaccgccagcagcuggagcuacaucguggagaccagcagcagcgacaacggcaccugcuaccccggcgacuucaucgacuacgaggagcugagagagcagcugagcagcgugagcagcuucgagagauucgagaucuuccccaagaccagcagcuggcccgaccacgacagcaacaagggcgugaccgccgccugcccccacgccggcgccaagagcuucuacaagaaccugaucuggcuggugaagaagggcaacagcuaccccaagcugagcaagagcuacaucaacgacaagggcaaggaggugcuggugcuguggggcauccaccaccccagcaccagcgccgaccagcagagccuguaccagaacgccgacgccuacguguucgugggcaccagcagauacagcaagaaguucaagcccgagaucgccaucagacccaaggugagagaccaggagggcagaaugaacuacuacuggacccugguggagcccggcgacaagaucaccuucgaggccaccggcaaccugguggugcccagauacgccuucgccauggagagaaacgccggcagcggcaucaucaucagcgacacccccgugcacgacugcaacaccaccugccagacccccaagggcgccaucaacaccagccugcccuuccagaacauccaccccaucaccaucggcaagugccccaaguacgugaagagcaccaagcugagacuggccaccggccugagaaacgugcccagcauccagagcagaggccuguucggcgccaucgccggcuucaucgagggcggcuggaccggcaugguggacggcugguacggcuaccaccaccagaacgagcagggcagcggcuacgccgccgaccugaagagcacccagaacgccaucgacaagaucaccaacaaggugaacagcgugaucgagaagaugaacacccaguucaccgccgugggcaaggaguucaaccaccuggagaagagaaucgagaaccugaacaagaagguggacgacggcuuccuggacaucuggaccuacaacgccgagcugcuggugcugcuggagaacgagagaacccuggacuaccacgacagcaacgugaagaaccuguacgagaaggugagaagccagcugaagaacaacgccaaggagaucggcaacggcugcuucgaguucuaccacaagugcgacaacaccugcauggagagcgugaagaacggcaccuacgacuaccccaaguacagcgaggaggccaagcugaacagagagaagaucgacggcgugaagcuggagagcaccagaaucuaccagauccuggccaucuacagcaccguggccagcagccuggugcugguggugagccugggcgccaucagcuucuggaugugcagcaacggcagccugcagugcagaaucugcaucuga

SEQ ID NO: 166931 - RNA, 1701 nt, Artificial Sequence; identical to SEQ ID NO: 166930
  derived and/or modified CDS sequence (opt4) from hemagglutinin__InfluenzaA__AEI86774

SEQ ID NO: 166932 - RNA, 1701 nt, Artificial Sequence
  derived and/or modified CDS sequence (opt4) from hemagglutinin__InfluenzaA__AEI86784
augaaggugauccugguggugcugcuguacaccuucgccaccgccaacgccgacacccugugcaucggcuaccacgccaacaacagcaccgacaccguggacaccgugcuggagaagaacgugaccgugacccacagcgugaaccugcuggaggacaagcacaacggcaagcugugcaagcugagaggcguggccccccugcaccugggcaagugcaacaucgccggcuggauccugggcaaccccgagugcgagagccugagcaccgccagcagcuggagcuacaucguggagaccagcagcagcgacaacggcaccugcuaccccggcgacuucaucgacuacgaggagcugagagagcagcugagcagcgugagcagcuucaagagauucgagaucuuccccaagaccagcagcuggcccaaccacgacagcaacaagggcgugaccgccgccugcccccacgccggcgccaagagcuucuacaagaaccugaucuggcuggugaagaagggcaacagcuaccccaagcugagcaagagcuacaucaacgacaagggcaaggaggugcuggugcuguggggcauccaccaccccagcaccagcgccgaccagcagagccuguaccagaacgccgacgccuacguguucgugggcaccagcagauacagcaagaaguucaagcccgagaucgccaucagacccaaggugagagaccaggagggcagaaugaacuacuacuggacccugguggagcccggcgacaagaucaccuucgaggccaccggcaaccugguggugcccagauacgccuucgccauggagagaaacgccggcagcggcaucaucaucagcgacacccccgugcacgacugcaacaccaccugccagacccccaagggcgccaucaacaccagccugcccuuccagaacauccaccccaucaccaucggcaagugccccaaguacgugaagagcaccaagcugagacuggccaccggccugagaaacgugcccagcauccagagcagaggccuguucggcgccaucgccggcuucaucgagggcggcuggaccggcaugguggacggcugguacggcuaccaccaccagaacgagcagggcagcggcuacgccgccgaccugaagagcacccagaacgccaucgacaagaucaccaacaaggugaacagcgugaucgagaagaugaacacccaguucaccgccgugggcaaggaguucaaccaccuggagaagagaaucgagaaccugaacaagaagguggacgacggcuuccuggacaucuggaccuacaacgccgagcugcuggugcugcuggagaacgagagaacccuggacuaccacgacagcaacgugaagaaccuguacgagaaggugagaagccagcugaagaacaacgccaaggagaucggcaacggcugcuucgaguucuaccacaagugcgacaacaccugcauggagagcgugaagaacggcaccuacgacuaccccaaguacagcgaggaggccaagcugaacagagaggagaucgacggcgugaagcuggagagcaccagaaucuaccagauccuggccaucuacagcaccguggccagcagccuggugcugguggugagccugggcgccaucagcuucuggaugugcagcaacggcagccugcagugcagaaucugcaucuga

SEQ ID NO: 166933 - RNA, 1701 nt, Artificial Sequence
  derived and/or modified CDS sequence (opt4) from hemagglutinin__InfluenzaA__AEI86794
augaagaccauccugguggugcugcuguacaccuucgccaccgccaacgccgacacccugugcaucggcuaccacgccaacaacagcaccgacaccguggacaccgugcuggagaagaacgugaccgugacccacagcgugaaccugcuggaggacaagcacaacggcaagcugugcaagcugagaggcguggccccccugcaccugggcaagugcaacaucgccggcuggauccugggcaaccccgagugcgagagccugagcaccgccagcagcuggagcuacaucguggagaccagcagcagcgacaacggcaccugcuaccccggcaacuucaucgacuacgaggagcugagagagcagcugagcagcgugagcagcuucgagagauucgagaucuuccccaagaccagcagcuggcccgaccacgacagcaacaagggcgugaccgccgccugcccccacgccggcgccaagagcuucuacaagaaccugaucuggcuggugaagaagggcaacagcuaccccaagcugagcaagagcuacaucaacgacaagggcaaggaggugcuggugcuguggggcauccaccaccccagcaccagcgccgaccagcagagccuguaccagaacgccgacgccuacguguucgugggcaccagcaaguacagcaagaaguucaagcccgagaucgccaucagacccaaggugagagaccaggagggcagaaugaacuacuacuggacccugguggagcccggcgacaagaucaccuucgaggccaccggcaaccugguggcccccagauacgccuucgccauggagagaaacgccggcagcggcaucaucaucagcgacacccccgugcacgacugcaacaccaccugccagacccccaagggcgccaucaacaccagccugcccuuccagaacauccaccccaucaccaucggcaagugccccaaguacgugaagagcaccaagcugagacuggccaccggccugagaaacgugcccagcauccagagcagaggccuguucggcgccaucgccggcuucaucgagggcggcuggaccggcaugguggacggcugguacggcuaccaccaccagaacgagcagggcagcggcuacgccgccgaccugaagagcacccagaacgccaucgacaagaucaccaacaaggugaacagcgugaucgagaagaugaacacccaguucaccgccgugggcaaggaguucaaccaccuggagaagagaaucgagaaccugaacaagaagguggacgacggcuuccuggacaucuggaccuacaacgccgagcugcuggugcugcuggagaacgagagaacccuggacuaccacgacagcaacgugaagaaccuguacgagaaggugagaagccagcugaagaacaacgccaaggagaucggcaacggcugcuucgaguucuaccacaagugcgacaacaccugcauggagagcgugaagaacggcaccuacgacuaccccaaguacagcgaggaggccaagcugaacagagaggagaucgacggcgugaagcuggagagcaccagaaucuaccagauccuggccaucuacagcaccguggccagcagccuggugcugguggugagccugggcgccaucagcuucuggaugugcagcaacggcagccugcagugcagaaucugcaucuga

SEQ ID NO: 166934 - RNA, 1701 nt, Artificial Sequence
  derived and/or modified CDS sequence (opt4) from hemagglutinin__InfluenzaA__AEI86804
augaaggccauccugguggugcugcuguacaccuucgccaccgccaacgccgacacccugugcaucggcuaccacgccaacaacagcaccgacaccguggacaccgugcuggagaagaacgugaccgugacccacagcgugaaccugcuggaggacaagcacaacggcaagcugugcaagcugagaggcguggccccccugcaccugggcaagugcaacaucgccggcuggauccugggcaaccccgagugcgagagccugagcaccgccagcagcuggagcuacaucguggagaccagcagcagcgacaacggcaccugcuaccccggcgacuucaucaacuacgaggagcugagagagcagcugagcagcgugagcagcuucgagagauucgagaucuuccccaagaccagcagcuggcccgaccacgacagcaacaagggcgugaccgccgccugcccccacgccggcgccaagagcuucuacaagaaccugauguggcuggugaagaagggcaacagcuaccccaagcugagcaagagcuacaucaacgacaagggcaaggaggugcuggugcuguggggcauccaccaccccagcaccagcgccgaccagcagagccuguaccagaacgccgacgccuacguguucgugggcaccagcagauacagcaagaaguucaagcccgagaucgccaucagacccaaggugagagaccaggagggcagaaugaacuacuacuggacccugguggagcccggcgacaagaucaccuucgaggccaccggcaaccugguggugcccagauacgccuucgccauggagagaaacgccggcagcggcaucaucaucagcgacacccccgugcacgacugcaacaccaccugccagacccccaagggcgccaucaacaccagccugcccuuccagaacauccaccccaucaccaucggcaagugccccaaguacgugaagagcaccaagcugagacuggccaccggccugagaaacgugcccagcauccagagcagaggccuguucggcgccaucgccggcuucaucgagggcggcuggaccggcaugguggacggcugguacggcuaccaccaccagaacgagcagggcagcggcuacgccgccgaccugaagagcacccagaacgccaucgacaagaucaccaacaaggugaacagcgugaucgagaagaugaacacccaguucaccgccgugggcaaggaguucaaccaccuggagaagagaaucgagaaccugaacaagaagguggacgacggcuuccuggacaucuggaccuacaacgccgagcugcuggugcugcuggagaacgagagaacccuggacuaccacgacagcaacgugaagaaccuguacgagaaggugagaagccagcugaagaacaacgccaaggagaucggcaacggcugcuucgaguucuaccacaagugcgacaacaccugcauggagagcgugaagaacggcaccuacgacuaccccaaguacagcgaggaggccaagcugaacagagaggagaucgacggcgugaagcuggagagcaccagaaucuaccagauccuggccaucuacagcgccguggccagcagccuggugcugguggugagccugggcgccaucagcuucuggaugugcagcaacggcagccugcagugcagaaucugcaucuga

SEQ ID NO: 166935 - RNA, 1701 nt, Artificial Sequence; identical to SEQ ID NO: 166930
  derived and/or modified CDS sequence (opt4) from hemagglutinin__InfluenzaA__AEI86814

SEQ ID NO: 166936 - RNA, 1701 nt, Artificial Sequence
  derived and/or modified CDS sequence (opt4) from hemagglutinin__InfluenzaA__AEI86824
augaaggccauccugguggugcugcuguacaccuucgccaccgccaacgccgacacccugugcaucggcuaccacgccaacaacagcaccgacaccguggacaccgugcuggagaagaacgugaccgugacccacagcgugaaccugcuggaggacaagcacaacggcaagcugugcaagcugagaggcguggccccccugcaccugggcaagugcaacaucgccggcuggauccugggcaaccccgagugcgagagccugagcaccgccagcagcuggagcuacaucguggagaccagcagcagcgacaacggcaccugcuaccccggcgacuucaucgacuacgaggagcugagagagcagcugagcagcgugagcagcuucgagagauucgagaucuuccccaagaccagcagcuggcccgaccacgacagcaacaagggcgugaccgccgccugcccccacgccggcgccaagagcuucuacaagaaccugaucuggcuggugaagaagggcaacagcuaccccaagcugagcaagagcuacaucaacgacaagggcaaggaggugcuggugcuguggggcauccaccaccccagcaccagcgccgaccagcagagccuguaccagaacgccgacgccuacguguucgugggcaccagcagauacagcaagaaguucaagcccgagaucgccaucagacccaaggugagagaccaggagggcagaaugaacuacuacuggacccugguggagcccggcgacaagaucaccuucgaggccaccggcaaccugguggugcccagauacgccuucgccauggagagaaacgccggcagcggcaucaucaucagcgacacccccgugcacgacugcaacaccaccugccagacccccaagggcgccaucaacaccagccugcccuuccagaacauccaccccaucaccaucggcaagugccccaaguacgugaagagcaccaagcugagacuggccaccggccugagaaacgugcccagcauccagagcagaggccuguucggcgccaucgccggcuucaucgagggcggcuggaccggcaugguggacggcugguacggcuaccaccaccagaacgagcagggcagcggcuacgccgccgaccugaagagcacccaggacgccaucgacaagaucaccaacaaggugaacagcgugaucgagaagaugaacacccaguucaccgccgugggcaaggaguucaaccaccuggagaagagaaucgagaaccugaacaagaagguggacgacggcuuccuggacaucuggaccuacaacgccgagcugcuggugcugcuggagaacgagagaacccuggacuaccacgacagcaacgugaagaaccuguacgagaaggugagaagccagcugaagaacaacgccaaggagaucggcaacggcugcuucgaguucuaccacaagugcgacaacaccugcauggagagcgugaagaacggcaccuacgacuaccccaaguacagcgaggaggccaagcugaacagagagaagaucgacggcgugaagcuggagagcaccagaaucuaccagauccuggccaucuacagcaccguggccagcagccuggugcugguggugagccugggcgccaucagcuucuggaugugcagcaacggcagccugcagugcagaaucugcaucuga

SEQ ID NO: 166937 - RNA, 1701 nt, Artificial Sequence
  derived and/or modified CDS sequence (opt4) from hemagglutinin__InfluenzaA__AEI86834
augaaggccauccugguggugcugcuguacaccuucgccaccgccaacgccgacacccugugcaucggcuaccacgccaacaacagcaccgacaccguggacaccgugcuggagaagaacgugaccgugacccacagcgugaaccugcuggaggacaagcacaacggcaagcugugcaagcugagaggcguggccccccugcaccugggcaagugcaacaucgccggcuggauccugggcaaccccgagugcgagagccugagcaccgccagcagcuggagcuacaucguggagaccagcagcagcgacaacggcaccugcuaccccggcaacuucaucgacuacgaggagcugagagagcagcugagcagcgugagcagcuucgagagauucgagaucuuccccaagaccagcagcuggcccgaccacgacagcaacaagggcgugaccgccgccugcccccacgccggcgccaagagcuucuacaagaaccugaucuggcuggugaagaagggcaacagcuaccccaagcugagcaagagcuacaucaacgacaagggcaaggaggugcuggugcuguggggcauccaccaccccagcaccagcgccgaccagcagagccuguaccagaacgccgacgccuacguguucgugggcaccagcagauacagcagaaaguucaagcccgagaucgccaucagacccaaggugagagaccaggagggcagaaugaacuacuacuggacccugguggagcccggcgacaagaucaccuucgaggccaccggcaaccugguggcccccagauacgccuucgccauggagagaaacgccggcagcggcaucaucaucagcgacacccccgugcacgacugcaacaccaccugccagacccccaagggcgccaucaacaccagccugcccuuccagaacauccaccccaucaccaucggcaagugccccaaguacgugaagagcaccaagcugagacuggccaccggccugagaaacgugcccagcauccagagcagaggccuguucggcgccaucgccggcuucaucgagggcggcuggaccggcaugguggacggcugguacggcuaccaccaccagaacgagcagggcagcggcuacgccgccgaccugaagagcacccagaacgccaucgacaagaucaccaacaaggugaacagcgugaucgagaagaugaacacccaguucaccgccgugggcaaggaguucaaccaccuggagaagagaaucgagaaccugaacaagaagguggacgacggcuuccuggacaucuggaccuacaacgccgagcugcuggugcugcuggagaacgagagaacccuggacuaccacgacagcaacgugaagaaccuguacgagaaggugagaagccagcugaagaacaacgccaaggagaucggcaacggcugcuucgaguucuaccacaagugcgacaacaccugcauggagagcgugaagaacggcaccuacgacuaccccaaguacagcgaggaggccaagcugaacagagaggagaucgacggcgugaagcuggagagcaccagaaucuaccagauccuggccaucuacagcaccguggccagcagccuggugcugguggugagccugggcgccaucagcuucuggaugugcagcaacggcagccugcagugcagaaucugcaucuga

SEQ ID NO: 166938 - RNA, 1701 nt, Artificial Sequence; identical to SEQ ID NO: 165644
  derived and/or modified CDS sequence (opt4) from hemagglutinin__InfluenzaA__AEI86854

SEQ ID NO: 166939 - RNA, 1701 nt, Artificial Sequence
  derived and/or modified CDS sequence (opt4) from hemagglutinin__InfluenzaA__AEI86864
augaaggccauccugguggcccugcuguacaccuucgccaccgccaacgccgacacccugugcaucggcuaccacgccaacaacagcaccgacaccguggacaccgugcuggagaagaacgugaccgugacccacagcgugaaccugcuggaggacaagcacaacggcaagcugugcaagcugagaggcguggccccccugcaccugggcaagugcaacaucgccggcuggauccugggcaaccccgagugcgagagccugagcaccgccagcagcuggagcuacaucguggagaccagcagcagcgacaacggcaccugcuaccccggcgacuucaucaacuacgaggagcugagagagcagcugagcagcgugagcagcuucgagagauucgagaucuuccccaagaccagcagcuggcccaaccacgacagcaacaagggcgugaccgccgccugcccccacgccggcgccaagagcuucuacaagaaccugaucuggcuggugaagaagggcaacagcuaccccaagcugagcaagagcuacaucaacgacaagggcaaggaggugcuggugcuguggggcauccaccaccccagcaccaccgccgaccagcagagccuguaccagaacgccgacgccuacguguucgugggcaccagcagauacagcaagaaguucaagcccgagaucgccaucagacccaaggugagagaccaggagggcagaaugaacuacuacuggacccugguggagcccggcgacaagaucaccuucgaggccaccggcaaccugguggugcccagauacgccuucgccauggagagaaacgccggcagcggcaucaucaucagcgacacccccgugcacgacugcaacaccaccugccagacccccaagggcgccaucaacaccagccugcccuuccagaacauccaccccaucaccaucggcaagugccccaaguacgugaagagcaccaagcugagacuggccaccggccugagaaacgugcccagcauccagagcagaggccuguucggcgccaucgccggcuucaucgagggcggcuggaccggcaugguggacggcugguacggcuaccaccaccagaacgagcagggcagcggcuacgccgccgaccugaagagcacccagaacgccaucgacaagaucaccaacaaggugaacagcgugaucgagaagaugaacacccaguucaccgccgugggcaaggaguucaaccaccuggagaagagaaucgagaaccugaacaagaagguggacgacggcuuccuggacaucuggaccuacaacgccgagcugcuggugcugcuggagaacgagagaacccuggacuaccacgacagcaacgugaagaaccuguacgagaaggugagaaaccagcugaagaacaacgccaaggagaucggcaacggcugcuucgaguucuaccacaagugcgacaacaccugcauggagagcgugaagaacggcaccuacgacuaccccaaguacagcgaggaggccaagcugaacagagaggagaucgacggcgugaagcuggagagcaccagaaucuaccagauccuggccaucuacagcaccguggccagcagccuggugcugguggugagccugggcgccaucagcuucuggaugugcagcaacggcagccugcagugcagaaucugcaucuga

SEQ ID NO: 166940 - RNA, 1701 nt, Artificial Sequence; identical to SEQ ID NO: 166930
  derived and/or modified CDS sequence (opt4) from hemagglutinin__InfluenzaA__AEI86874

SEQ ID NO: 166941 - RNA, 1701 nt, Artificial Sequence
  derived and/or modified CDS sequence (opt4) from hemagglutinin__InfluenzaA__AEI86894
augaaggccauccugguggugcugcuguacaccuucgccaccgccaacgccgacacccugugcaucggcuaccacgccaacaacagcaccgacaccguggacaccgugcuggagaagaacgugaccgugacccacagcgugaaccugcuggaggacaagcacaacggcaagcugugcaagcugagaggcguggccccccugcaccugggcaagugcaacaucgccggcuggauccugggcaaccccgagugcgagagccugagcaccgccagcagcuggagcuacaucguggagaccagcagcagcgacaacggcaccugcuaccccggcaacuucaucgacuacgaggagcugagagagcagcugagcagcgugagcagcuucgagagauucgagaucuuccccaagaccagcagcuggcccgaccacgacagcaacaagggcgugaccgccgccugcccccacgccggcgccaagagcuucuacaagaaccugaucuggcuggugaagaagggcaacagcuaccccaagcugagcaagagcuacaucaacgacaagggcaaggaggugcuggugcuguggggcauccaccaccccagcaccagcgccgaccagcagagccuguaccagaacgccgacgccuacguguucgugggcaccagcagauacagcaagaaguucaagcccgagaucgccaucagacccaaggugagagaccaggagggcagaaugaacuacuacuggacccugguggagcccggcgacaagaucaccuucgaggccaccggcaaccugguggcccccagauacgccuucgccauggagagaaacgccggcagcggcaucaucaucagcgacacccccgugcacgacugcaacaccaccugccagacccccaagggcgccaucaacaccagccugcccuuccagaacauccaccccaucaccaucggcaagugccccaaguacgugaagagcaccaagcugagacuggccaccggccugagaaacgugcccagcauccagagcagaggccuguucggcgccaucgccggcuucaucgagggcggcuggaccggcaugguggacggcugguacggcuaccaccaccagaacgagcagggcagcggcuacgccgccgaccugaagagcacccagaacgccaucgacaagaucaccaacaaggugaacagcgugaucgagaagaugaacacccaguucaccgccgugggcaaggaguucaaccaccuggagaagagaaucgagaaccugaacaagaagguggacgacggcuuccuggacaucuggaccuacaacgccgagcugcuggugcugcuggagaacgagagaacccuggacuaccacgacagcaacgugaagaaccuguacgagaaggugagaagccagcugaagaacaacgccaaggagaucggcaacggcugcuucgaguucuaccacaagugcgacaacaccugcauggagagcgugaagaacggcaccuacgacuaccccaaguacagcgaggaggccaagcugaacagagaggagaucgacggcgugaagcuggagagcaccagaaucuaccagauccuggccaucuacagcaccguggccagcagccuggugcugguggugagccugggcgccaucagcuucuggaugugcagcaacggcagccugcagugcagaaucugcaucuga

SEQ ID NO: 166942 - RNA, 1701 nt, Artificial Sequence
  derived and/or modified CDS sequence (opt4) from hemagglutinin__InfluenzaA__AEI86904
augaaggccauccugguggugcugcuguacaccuucaccaccgccaacgccgacacccugugcaucggcuaccacgccaacaacagcaccgacaccguggacaccgugcuggagaagaacgugaccgugacccacagcgugaaccugcuggaggacaagcacaacggcaagcugugcaagcugagaggcguggccccccugcaccugggcaagugcaacaucgccggcuggauccugggcaaccccgagugcgagagccugagcaccgccagcagcuggagcuacaucguggagaccagcagcagcgacaacggcaccugcuaccccggcgacuucaucgacuacgaggagcugagagagcagcugagcagcgugagcagcuucgagagauucgagaucuuccccaagaccagcagcuggcccaaccacgacagcaacaagggcgugaccgccgccugcccccacgccggcgccaagagcuucuacaagaaccugaucuggcuggugaagaagggcaacagcuaccccaagcugagcaagagcuacaucaacgacaagggcaaggaggugcuggugcuguggggcauccaccaccccagcaccaccgccgaccagcagagccuguaccagaacgccgacgccuacguguucgugggcaccagcagauacagcaagaaguucaagcccgagaucgccaucagacccaaggugagagaccaggagggcagaaugaacuacuacuggacccugguggagcccggcgacaagaucaccuucgaggccaccggcaaccugguggugcccagauacgccuucgccauggagagaaacgccggcagcggcaucaucaucagcgacacccccgugcacgacugcaacaccaccugccagacccccaagggcgccaucaacaccagccugcccuuccagaacauccaccccaucaccaucggcaagugccccaaguacgugaagagcaccaagcugagacuggccaccggccugagaaacgugcccagcauccagagcagaggccuguucggcgccaucgccggcuucaucgagggcggcuggaccggcaugguggacggcugguacggcuaccaccaccagaacgagcagggcagcggcuacgccgccgaccugaagagcacccagaacgccaucgacaagaucaccaacaaggugaacagcgugaucgagaagaugaacacccaguucaccgccgugggcaaggaguucaaccaccuggagaagagaaucgagaaccugaacaagaagguggacgacggcuuccuggacaucuggaccuacaacgccgagcugcuggugcugcuggagaacgagagaacccuggacuaccacgacagcaacgugaagaaccuguacgagaaggugagaaaccagcugaagaacaacgccaaggagaucggcaacggcugcuucgaguucuaccacaagugcgacaacaccugcauggagagcgugaagaacggcaccuacgacuaccccaaguacagcgaggaggccaagcugaacagagaggagaucgacggcgugaagcuggagagcaccagaaucuaccagauccuggccaucuacagcaccguggccagcagccuggugcugguggugagccugggcgccaucagcuucuggaugugcagcaacggcagccugcagugcagaaucugcaucuga

SEQ ID NO: 166943 - RNA, 1701 nt, Artificial Sequence
  derived and/or modified CDS sequence (opt4) from hemagglutinin__InfluenzaA__AEI86914
augaaggccauccugguggugcugcuguacaccuucgccaccgccaacgccgacacccugugcaucggcuaccacgccaacaacagcaccgacaccguggacaccgugcuggagaagaacgugaccgugacccacagcgugaaccugcuggaggacaagcacaacggcaagcugugcaagcugagaggcguggccccccugcaccugggcaagugcaacaucgccggcuggauccugggcaaccccgagugcgagagccugagcaccgccagcagcuggagcuacaucguggagaccagcagcagcgacaacggcaccugcuaccccggcgacuucaucaacuacgaggagcugagagagcagcugagcagcgugagcagcuucgagagauucgagaucuuccccaagaccagcagcuggcccaaccacgacagcaacaagggcgugaccgccgccugcccccacgccggcgccaagagcuucuacaagaaccugaucuggcuggugaagaagggcaacagcuaccccagacugagcaagagcuacaucaacgacaagggcaaggaggugcuggugcuguggggcauccaccaccccagcaccaccgccgaccagcagagccuguaccagaacgccgacgccuacguguucgugggcaccagcagauacagcaagaaguucaagcccgagaucgccaucagacccaaggugagagaccaggagggcagaaugaacuacuacuggacccugguggagcccggcgacaagaucaccuucgaggccaccggcaaccugguggugcccagauacgccuucgccauggagagaaacgccggcagcggcaucaucaucagcgacacccccgugcacgacugcaacaccaccugccagacccccaagggcgccaucaacaccagccugcccuuccagaacauccaccccaucaccaucggcaagugccccaaguacgugaagagcaccaagcugagacuggccaccggccugagaaacgugcccagcauccagagcagaggccuguucggcgccaucgccggcuucaucgagggcggcuggaccggcaugguggacggcugguacggcuaccaccaccagaacgagcagggcagcggcuacgccgccgaccugaagagcacccagaacgccaucgacaagaucaccaacaaggugaacagcgugaucgagaagaugaacacccaguucaccgccgugggcaaggaguucaaccaccuggagaagagaaucgagaaccugaacaagaagguggacgacggcuuccuggacaucuggaccuacaacgccgagcugcuggugcugcuggagaacgagagaacccuggacuaccacgacagcaacgugaagaaccuguacgagaaggugagaaaccagcugaagaacaacgccaaggagaucggcaacggcugcuucgaguucuaccacaagugcgacaacaccugcauggagagcgugaagaacggcaccuacgacuaccccaaguacagcgaggaggccaagcugaacagagaggagaucgacggcgugaagcuggagagcaccagaaucuaccagauccuggccaucuacagcaccguggccagcagccuggugcugguggugagccugggcgccaucagcuucuggaugugcagcaacggcagccugcagugcagaaucugcaucuga

SEQ ID NO: 166944 - RNA, 1701 nt, Artificial Sequence
  derived and/or modified CDS sequence (opt4) from hemagglutinin__InfluenzaA__AEI86924
augaaggccauccugguggugcugcuguacaccuucgccaccgccaacgccgacacccugugcaucggcuaccacgccaacaacagcaccgacaccguggacaccgugcuggagaagaacgugaccgugacccacagcgugaaccugcuggaggacaagcacaacggcaagcugugcaagcugagaggcguggccccccugcaccugggcaagugcaacaucgccggcuggauccugggcaaccccgagugcgagagccugagcaccgccagcagcuggagcuacaucguggagaccagcagcagcgacaacggcaccugcuaccccggcguguucaucgacuacgaggagcugagagagcagcugagcagcgugagcagcuucgagagauucgagaucuuccccaagaccagcagcuggcccaaccacgacagcaacaagggcgugaccgccgccugcccccacgccggcgccaagagcuucuacaagaaccugaucuggcugaucaagaagggcaacagcuaccccaagcugagcaagagcuacaucaacgacaagggcaaggaggugcuggugcuguggggcauccaccaccccagcaccaccgccgaccagcagagccuguaccagaacgccgacgccuacguguucgugggcaccagcagauacagcaagaaguucaagcccgagaucgccgugagacccaaggugagagaccaggagggcagaaugaacuacuacuggacccugguggagcccggcgacaagaucaccuucgaggccaccggcaaccugguggugcccagauacgccuucgccauggagagaaacgccggcagcggcaucaucaucagcgacacccccgugcacgacugcaacaccaccugccagacccccaagggcgccaucaacaccagccugcccuuccagaacauccaccccaucaccaucggcaagugccccaaguacgugaagagcaccaagcugagacuggccaccggccugagaaacgugcccagcauccagagcagaggccuguucggcgccaucgccggcuucaucgagggcggcuggaccggcaugguggacggcugguacggcuaccaccaccagaacgagcagggcagcggcuacgccgccgaccugaagagcacccagaacgccaucgacaagaucaccaacaaggugaacagcgugaucgagaagaugaacacccaguucaccgccgugggcaaggaguucaaccaccuggagaagagaaucgagaaccugaacaagaagguggacgacggcuuccuggacaucuggaccuacaacgccgagcugcuggugcugcuggagaacgagagaacccuggacuaccacgacagcaacgugaagaaccuguacgagaaggugagaaaccagcugaagaacaacgccaaggagaucggcaacggcugcuucgaguucuaccacaagugcgacaacaccugcauggagagcgugaagaacggcaccuacgacuaccccaaguacagcgaggaggccaagcugaacagagaggagaucgacggcgugaagcuggagagcaccagaaucuaccagauccuggccaucuacagcaccguggccagcagccuggugcugguggugagccugggcgccaucagcuucuggaugugcagcaacggcagccugcagugcagaaucugcaucuga

SEQ ID NO: 166945 - RNA, 1701 nt, Artificial Sequence; identical to SEQ ID NO: 166930
  derived and/or modified CDS sequence (opt4) from hemagglutinin__InfluenzaA__AEI86934

SEQ ID NO: 166946 - RNA, 1701 nt, Artificial Sequence; identical to SEQ ID NO: 165644
  derived and/or modified CDS sequence (opt4) from hemagglutinin__InfluenzaA__AEI86944

SEQ ID NO: 166947 - RNA, 1701 nt, Artificial Sequence
  derived and/or modified CDS sequence (opt4) from hemagglutinin__InfluenzaA__AEI86964
augaaggccauccugguggugcugcuguacaccuucgccaccgccaacgccgacacccugugcaucggcuaccacgccaacaacagcaccgacaccguggacaccgugcuggagaagaacgugaccgugacccacagcgugaaccugcuggaggacaagcacaacggcaagcugugcaagcugagaggcguggccccccugcaccugggcaagugcaacaucgccggcuggauccugggcaaccccgagugcgagagccugagcaccgccagcagcuggagcuacaucguggagaccagcagcagcgacaacggcaccugcuaccccggcguguucaucgacuacgaggagcugagagagcagcugagcagcgugagcagcuucgagagauucgagaucuuccccaagaccagcagcuggcccaaccacgacagcaacaagggcgugaccgccgccugcccccacgccggcgccaagagcuucuacaagaaccugaucuggcuggugaagaagggcaacagcuaccccaagcugagcaagagcuacaucaacgacaagggcaaggaggugcuggugcuguggggcauccaccaccccagcaccaccgccgaccagcagagccuguaccagaacgccgacgccuacguguucgugggcaccagcagauacagcaagaaguucaagcccgagaucgccgugagacccaaggugagagaccaggagggcagaaugaacuacuacuggacccugguggagcccggcgacaagaucaccuucgaggccaccggcaaccugguggugcccagauacgccuucgccauggagagaaacgccggcagcggcaucaucaucagcgacacccccgugcacgacugcaacaccaccugccagacccccaagggcgccaucaacaccagccugcccuuccagaacauccaccccaucaccaucggcaagugccccaaguacgugaagagcaccaagcugagacuggccaccggccugagaaacgugcccagcauccagagcagaggccuguucggcgccaucgccggcuucaucgagggcggcuggaccggcaugguggacggcugguacggcuaccaccaccagaacgagcagggcagcggcuacgccgccgaccugaagagcacccagaacgccaucgacaagaucaccaacaaggugaacagcgugaucgagaagaugaacacccaguucaccgccgugggcaaggaguucaaccaccuggagaagagaaucgagaaccugaacaagaagguggacgacggcuuccuggacaucuggaccuacaacgccgagcugcuggugcugcuggagaacgagagaacccuggacuaccacgacagcaacgugaagaaccuguacgagaaggugagaaaccagcugaagaacaacgccaaggagaucggcaacggcugcuucgaguucuaccacaagugcgacaacaugugcauggagagcgugaagaacggcaccuacgacuaccccaaguacagcgaggaggccaagcugaacagagaggagaucgacggcgugaagcuggagagcaccagaaucuaccagauccuggccaucuacagcaccguggccagcagccuggugcugguggugagccugggcgccaucagcuucuggaugugcagcaacggcagccugcagugcagaaucugcaucuga

SEQ ID NO: 166948 - RNA, 1701 nt, Artificial Sequence; identical to SEQ ID NO: 165886
  derived and/or modified CDS sequence (opt4) from hemagglutinin__InfluenzaA__AEI86974

SEQ ID NO: 166949 - RNA, 1701 nt, Artificial Sequence; identical to SEQ ID NO: 165644
  derived and/or modified CDS sequence (opt4) from hemagglutinin__InfluenzaA__AEI86984

SEQ ID NO: 166950 - RNA, 1701 nt, Artificial Sequence; identical to SEQ ID NO: 165644
  derived and/or modified CDS sequence (opt4) from hemagglutinin__InfluenzaA__AEI86994

SEQ ID NO: 166951 - RNA, 1701 nt, Artificial Sequence
  derived and/or modified CDS sequence (opt4) from hemagglutinin__InfluenzaA__AEI87004
augaaggccauccugguggugcugcuguacaccuucgccaccgccaacgccgacacccugugcaucggcuaccacgccaacaacagcaccgacaccguggacaccgugcuggagaagaacgugaccgugacccacagcgugaaccugcuggaggacaagcacaacggcaagcugugcaagcugaagggcguggccccccugcaccugggcaagugcaacaucgccggcuggauccugggcaaccccgagugcgagagccugagcaccgccagcagcuggagcuacaucguggagaccagcagcagcgacaacggcaccugcuaccccggcaacuucaucgacuacgaggagcugagagagcagcugagcagcgugagcagcuucgagagauucgagaucuuccccaagaccagcagcuggcccgaccacgacagcaacaagggcgugaccgccgccugcccccacgccggcgccaagagcuucuacaagaaccugaucuggcuggugaagaagggcaacagcuaccccaagcugagcaagagcuacaucaacgacaagggcaaggaggugcuggugcuguggggcauccaccaccccagcaccagcgccgaccagcagggccuguaccagaacgccgacgccuacguguucgugggcaccagcagauacagcaagaaguucaagcccgagaucgccaucagacccaaggugagagaccaggagggcagaaugaacuacuacuggacccugguggagcccggcgacaagaucaccuucgaggccaccggcaaccugguggcccccagauacgccuucgccauggagagaaacgccggcagcggcaucaucaucagcgacacccccgugcacgacugcaacaccaccugccagacccccaagggcgccaucaacaccagccugcccuuccagaacauccaccccaucaccaucggcaagugccccaaguacgugaagagcaccaagcugagacuggccaccggccugagaaacgugcccagcauccagagcagaggccuguucggcgccaucgccggcuucaucgagggcggcuggaccggcaugguggacggcugguacggcuaccaccaccagaacgagcagggcagcggcuacgccgccgaccugaagagcacccagaacgccaucgacaagaucaccaacaaggugaacagcgugaucgagaagaugaacacccaguucaccgccgugggcaaggaguucaaccaccuggagaagagaaucgagaaccugaacaagaagguggacgacggcuuccuggacaucuggaccuacaacgccgagcugcuggugcugcuggagaacgagagaacccuggacuaccacgacagcaacgugaagaaccuguacgagaaggugagaagccagcugaagaacaacgccaaggagaucggcaacggcugcuucgaguucuaccacaagugcgacaacaccugcauggagagcgugaagaacggcaccuacgacuaccccaaguacagcgaggaggccaagcugaacagagaggagaucgacggcgugaagcuggagagcaccagaaucuaccagauccuggccaucuacagcaccguggccagcagccuggugcugguggugagccugggcgccaucagcuucuggaugugcagcaacggcagccugcagugcagaaucugcaucuga

SEQ ID NO: 166952 - RNA, 1701 nt, Artificial Sequence
  derived and/or modified CDS sequence (opt4) from hemagglutinin__InfluenzaA__AEI87014
augaaggccauccugguggugcugcuguacaccuucgccaccgccaacgccgacacccugugcaucggcuaccacgccaacaacagcaccgacaccguggacaccgugcuggagaagaacgugaccgugacccacagcgugaaccugcuggaggacaagcacaacggcaagcugugcaagcugagaggcguggccccccugcaccugggcaagugcaacaucgccggcuggauccugggcaaccccgagugcgagagccugagcaccgccagcagcuggagcuacaucguggagaccagcagcagcgacaacggcaccugcuaccccggcgacuucaucgacuacgaggagcugagagagcagcugagcagcgugagcagcuucgagagauucgagaucuuccccaagaccagcagcuggcccaaccacgacagcaacaagggcgugaccgccgccugcccccacgccggcgccaagagcuucuacaagaaccugaucuggcuggugaagaagggcaacagcuaccccaagcugagcaagagcuacaucaacgacaagggcaaggaggugcuggugcuguggggcauccaccaccccagcaccagcgccgaccagcagagccuguaccagaacgccgacgccuacguguucgugggcaccagcagauacagcaagaaguucaagcccgagaucgccaucagacccaaggugagagaccaggagggcagaaugaacuacuacuggacccugguggagcccggcgacaagaucaccuucgaggccaccggcaaccugguggugcccagauacgccuucgccauggagagaaacgccggcagcggcaucaucaucagcgacacccccgugcacgacugcaacaccaccugccagacccccaagggcgccaucaacaccagccugcccuuccagaacauccaccccaucaccaucggcaagugccccaaguacgugaagagcaccaagcugagacuggccaccggccugagaaacgugcccagcauccagagcagaggccuguucggcgccaucgccggcuucaucgagggcggcuggaccggcaugguggacggcugguacggcuaccaccaccagaacgagcagggcagcggcuacgccgccgaccugaagagcacccagaacgccaucgacaagaucaccaacaaggugaacagcgugaucgagaagaugaacacccaguucaccgccgugggcaaggaguucaaccaccuggagaagagaaucgagaaccugaacaagaagguggacgacggcuuccuggacaucuggaccuacaacgccgagcugcuggugcugcuggagaacgagagaacccuggacuaccacgacagcaacgugaagaaccuguacgagaaggugagaagccagcugaagaacaacgccaaggagaucggcaacggcugcuucgaguucuaccacaagugcgacaacaccugcauggagagcgugaagaacggcaccuacgacuaccccaaguacagcggcgaggccaagcugaacagagaggagaucgacggcgugaagcuggagagcaccagaaucuaccagauccuggccaucuacagcaccguggccagcagccuggugcugguggugagccugggcgccaucagcuucuggaugugcagcaacggcagccugcagugcagaaucugcaucuga

SEQ ID NO: 166953 - RNA, 1701 nt, Artificial Sequence
  derived and/or modified CDS sequence (opt4) from hemagglutinin__InfluenzaA__AEI87034
augaaggccauccugguggugcugcuguacaccuucgccaccgccaacgccgacacccugugcaucggcuaccacgccaacaacagcaccgacaccguggacaccgugcuggagaagaacgugaccgugacccacagcgugaaccugcuggaggacaagcacaacggcaagcugugcaagcugagaggcguggccccccugcaccugggcaagugcaacaucgccggcuggauccugggcaaccccgagugcgagagccugagcaccgccagcagcuggagcuacaucguggagaccagcagcagcgacaacggcaccugcuaccccggcgacuucaucgacuacgaggagcugagagagcagcugagcagcgugagcagcuucgagagauucgagaucuuccccaagaccagcagcuggcccgaccacgacagcaacaagggcgugaccgccgccugcccccacgccggcgccaagagcuucuacaagaaccugaucuggcuggugaagaagggcaacagcuaccccaagcugagcaagagcuacaucaacgacaagggcaaggaggugcuggugcuguggggcauccaccaccccagcaccagcgccgaccagcagagccuguaccagaacgccgacgccuacguguucgugggcaccagcagauacagcaagaaguucaagcccgagaucgccaucagacccaaggugagagaccaggagggcagaaugaacuacuacuggacccugguggagcccggcgacaagaucaccuucgaggccaccggcaaccugguggugcccagauacgccuucgccauggagagaaacgccggcagcggcaucaucaucagcgacacccccgugcacgacugcaacaccaccugccagacccccaagggcgccaucaacaccagccugcccuuccagaacauccaccccaucaccaucggcaagugccccaaguacgugaagagcaccaagcugagacuggccaccggccugagaaacgugcccagcauccagagcagaggccuguucggcgccaucgccggcuucaucgagggcggcuggaccggcaugguggacggcugguacggcuaccaccaccagaacgagcagggcagcggcuacgccgccgaccugaagagcacccagaacgccaucgacaagaucaccaacaaggugaacagcgugaucgagaagaugaacacccaguucaccgccaucggcaaggaguucaaccaccuggagaagagaaucgagaaccugaacaagaagguggacgacggcuuccuggacaucuggaccuacaacgccgagcugcuggugcugcuggagaacgagagaacccuggacuaccacgacagcaacgugaagaaccuguacgagaaggugagaagccagcugaagaacaacgccaaggagaucggcaacggcugcuucgaguucuaccacaagugcgacaacaccugcauggagagcgugaagaacggcaccuacgacuaccccaaguacagcgaggaggccaagcugaacagagaggagaucgacggcgugaagcuggagagcaccagaaucuaccagauccuggccaucuacagcaccguggccagcagccuggugcugguggugagccugggcgccaucagcuucuggaugugcagcaacggcagccugcagugcagaaucugcaucuga

SEQ ID NO: 166954 - RNA, 1701 nt, Artificial Sequence; identical to SEQ ID NO: 165644
  derived and/or modified CDS sequence (opt4) from hemagglutinin__InfluenzaA__AEI87044

SEQ ID NO: 166955 - RNA, 1701 nt, Artificial Sequence; identical to SEQ ID NO: 163893
  derived and/or modified CDS sequence (opt4) from hemagglutinin__InfluenzaA__AEI87054

SEQ ID NO: 166956 - RNA, 1701 nt, Artificial Sequence
  derived and/or modified CDS sequence (opt4) from hemagglutinin__InfluenzaA__AEI87064
augaaggccauccugguggugcugcuguacaccuucgccaccgccaacgccgacacccugugcaucggcuaccacgccaacaacagcaccgacaccguggacaccgugcuggagaagaacgugaccgugacccacagcgugaaccugcuggaggacaagcacaacggcaagcugugcaagcugagaggcguggccccccugcaccugggcaagugcaacaucgccggcuggauccugggcaaccccgagugcgagagccugagcaccgccagcagcuggagcuacaucguggagaccagcagcagcgacaacggcaccugcuaccccggcgacuucaucgacuacgaggagcugagagagcagcugagcagcgugagcagcuucgagagauucgagaucuuccccaagaccagcagcuggcccaaccacgacagcaacaagggcgugaccgccgccugcccccacgccggcgccaagagcuucuacaagaaccugaucuggcuggugaagaagggcaacagcuaccccaagcugagcaagagcuacaucaacgacaagggcaaggaggugcuggugcuguggggcauccaccaccccagcaccaccgccgaccagcagagccuguaccagaacgccgacaccuacguguucgugggcaccagcagauacagcaagaaguucaagcccgagaucgccaucagacccaaggugagagaccaggagggcagaaugaacuacuacuggacccugguggagcccggcgacaagaucaccuucgaggccaccggcaaccugguggugcccagauacgccuucgccauggagagaaacgccggcagcggcaucaucaucagcgacacccccgugcacgacugcaacaccaccugccagacccccaagggcgccaucaacaccagccugcccuuccagaacauccaccccaucaccaucggcaagugccccaaguacgugaagagcaccaagcugagacuggccaccggccugagaaacgugcccagcauccagagcagaggccuguucggcgccaucgccggcuucaucgagggcggcuggaccggcaugguggacggcugguacggcuaccaccaccagaacgagcagggcagcggcuacgccgccgaccugaagagcacccagaacgccaucgacaagaucaccaacaaggugaacagcgugaucgagaagaugaacacccaguucaccgccgugggcaaggaguucaaccaccuggagaagagaaucgagaaccugaacaagaagguggacgacggcuuccuggacaucuggaccuacaacgccgagcugcuggugcugcuggagaacgagagaacccuggacuaccacgacagcaacgugaagaaccuguacgagaaggugagaaaccagcugaagaacaacgccaaggagaucggcaacggcugcuucgaguucuaccacaagugcgacaacaccugcauggagagcgugaagaacggcaccuacgacuaccccaaguacagcgaggaggccaagcugaacagagaggagaucgacggcgugaagcuggagagcaccagaaucuaccagauccuggccaucuacagcaccgccgccagcagccuggugcugguggugagccugggcgccaucagcuucuggaugugcagcaacggcagccugcagugcagaaucugcaucuga

SEQ ID NO: 166957 - RNA, 1701 nt, Artificial Sequence
  derived and/or modified CDS sequence (opt4) from hemagglutinin__InfluenzaA__AEI87074
augaaggccacccugguggugcugcuguacaccuucgccaccgccaacgccgacacccugugcaucggcuaccacgccaacaacagcaccgacaccguggacaccgugcuggagaagaacgugaccgugacccacagcgugaaccugcuggaggacaagcacaacggcaagcugugcaagcugagaggcguggccccccugcaccugggcaagugcaacaucgccggcuggauccugggcaaccccgagugcgagagccugagcaccgccagcagcuggagcuacaucguggagaccagcagcagcgacaacggcaccugcuaccccggcgacuucaucaacuacgaggagcugagagagcagcugagcagcgugagcagcuucgagagauucgagaucuuccccaagaccagcagcuggcccaaccacgacagcaacaagggcgugaccgccgccugcccccacgccggcgccaagagcuucuacaagaaccugaucuggcuggugaagaagggcaacagcuaccccaagcugagcaagagcuacaucaacgacaagggcaaggaggugcuggugcuguggggcauccaccaccccagcaccaccgccgaccagcagagccuguaccagaacgccgacgccuacguguucgugggcaccagcagauacagcaagaaguucaagcccgagaucgccaucagacccaaggugagagaccaggagggcagaaugaacuacuacuggacccugguggagcccggcgacaagaucaccuucgaggccaccggcaaccugguggugcccagauacgccuucgccauggagagaaacgccggcagcggcaucaucaucagcgacacccccgugcacgacugcaacaccaccugccagacccccaagggcgccaucaacaccagccugcccuuccagaacauccaccccaucaccaucggcaagugccccaaguacgugaagagcaccaagcugagacuggccaccggccugagaaacgugcccagcauccagagcagaggccuguucggcgccaucgccggcuucaucgagggcggcuggaccggcaugguggacggcugguacggcuaccaccaccagaacgagcagggcagcggcuacgccgccgaccugaagagcacccagaacgccaucgacaagaucaccaacaaggugaacagcgugaucgagaagaugaacacccaguucaccgccgugggcaaggaguucaaccaccuggagaagagaaucgagaaccugaacaagaagguggacgacggcuuccuggacaucuggaccuacaacgccgagcugcuggugcugcuggagaacgagagaacccuggacuaccacgacagcaacgugaagaaccuguacgagaaggugagaaaccagcugaagaacaacgccaaggagaucggcaacggcugcuucgaguucuaccacaagugcgacaacaccugcauggagagcgugaagaacggcaccuacgacuaccccaaguacagcgaggaggccaagcugaacagagaggagaucgacggcgugaagcuggagagcaccagaaucuaccagauccuggccaucuacagcaccguggccagcagccuggugcugguggugagccugggcgccaucagcuucuggaugugcagcaacggcagccugcagugcagaaucugcaucuga

SEQ ID NO: 166958 - RNA, 1701 nt, Artificial Sequence
  derived and/or modified CDS sequence (opt4) from hemagglutinin__InfluenzaA__AEI87094
augaaggccauccugguggugcugcuguacaccuucgccaccgccaacgccgacacccugugcaucggcuaccacgccaacaacagcaccgacaccguggacaccgugcuggagaagaacgugaccgugacccacagcgugaaccugcuggaggacaagcacaacggcaagcugugcaagcugagaggcguggccccccugcaccugggcaagugcaacaucgccggcuggauccugggcaaccccgagugcgagagccugagcaccgccagcagcuggagcuacaucguggagaccagcagcagcgacaacggcaccugcuaccccggcgacuucaucgacuacgaggagcugagagagcagcugagcagcgugagcagcuucgagagauucgagaucuuccccaagaccagcagcuggcccgaccacgacagcaacaagggcgugaccgccgccugcccccacgccggcgccaagagcuucuacaagaaccugaucuggcuggugaagaagggcaacagcuaccccaagcugagcaagagcuacaucaacgacaagggcaaggaggugcuggugcuguggggcauccaccaccccagcaccagcgccgaccagcagagccuguaccagaacgccgacgccuacguguucgugggcaccagcagauacagcaagaaguucaagcccgagaucgccaucagacccaaggugagagaccaggagggcagaaugaacuacuacuggacccugguggagcccggcgacaagaucaccuucgaggccaccggcaaccugguggugcccagauacgccuucgccauggagagaaacaccggcagcggcaucaucaucagcgacacccccgugcacgacugcaacaccaccugccagacccccaagggcgccaucaacaccagccugcccuuccagaacauccaccccaucaccaucggcaagugccccaaguacgugaagagcaccaagcugagacuggccaccggccugagaaacgugcccagcauccagagcagaggccuguucggcgccaucgccggcuucaucgagggcggcuggaccggcaugguggacggcugguacggcuaccaccaccagaacgagcagggcagcggcuacgccgccgaccugaagagcacccagaacgccaucgacaagaucaccaacaaggugaacagcgugaucgagaagaugaacacccaguucaccgccgugggcaaggaguucaaccaccuggagaagagaaucgagaaccugaacaagaagguggacgacggcuuccuggacaucuggaccuacaacgccgagcugcuggugcugcuggagaacgagagaacccuggacuaccacgacagcaacgugaagaaccuguacgagaaggugagaagccagcugaagaacaacgccaaggagaucggcaacggcugcuucgaguucuaccacaagugcgacaacaccugcauggagagcgugaagaacggcaccuacgacuaccccaaguacagcgaggaggccaagcugaacagagagaagaucgacggcaucaagcuggagagcaccagaaucuaccagauccuggccaucuacagcaccguggccagcagccuggugcugguggugagccugggcgccaucagcuucuggaugugcagcaacggcagccugcagugcagaaucugcaucuga

SEQ ID NO: 166959 - RNA, 1701 nt, Artificial Sequence; identical to SEQ ID NO: 166958
  derived and/or modified CDS sequence (opt4) from hemagglutinin__InfluenzaA__AEI87104

SEQ ID NO: 166960 - RNA, 1698 nt, Artificial Sequence; identical to SEQ ID NO: 163686
  derived and/or modified CDS sequence (opt4) from hemagglutinin__InfluenzaA__AEI91963

SEQ ID NO: 166961 - RNA, 1701 nt, Artificial Sequence; identical to SEQ ID NO: 163893
  derived and/or modified CDS sequence (opt4) from hemagglutinin__InfluenzaA__AEI91977

SEQ ID NO: 166962 - RNA, 1701 nt, Artificial Sequence; identical to SEQ ID NO: 165417
  derived and/or modified CDS sequence (opt4) from hemagglutinin__InfluenzaA__AEI91978

SEQ ID NO: 166963 - RNA, 1701 nt, Artificial Sequence; identical to SEQ ID NO: 164359
  derived and/or modified CDS sequence (opt4) from hemagglutinin__InfluenzaA__AEI91998

SEQ ID NO: 166964 - RNA, 1701 nt, Artificial Sequence
  derived and/or modified CDS sequence (opt4) from hemagglutinin__InfluenzaA__AEI91999
augaagaccaucaucgcccugagcuacauccugugccugguguucgcccagaagcugcccggcaacgacaacagcaccgccacccugugccugggccaccacgccgugcccaacggcaccaucgugaagaccaucaccaacgaccagaucgaggugaccaacgccaccgagcuggugcagagcagcagcaccggcgagaucugcaacagcccccaccagauccuggacggcgagaacugcacccugaucgacgcccugcugggcgacccccagugcgacggcuuccagaacaagaagugggaccuguucguggagagaagcaaggccuacagcaacugcuaccccuacgacgugcccgacuacgccagccugagaagccugguggccagcagcggcacccuggaguucaacaacgagagcuucaacuggaccggcgugacccagaacggcaccagcagcgccugcaucagaagaagcaacaacagcuucuucagcagacugaacuggcugacccaccugaacuucaaguaccccgcccugaacgugaccaugcccaacaacgagcaguucgacaagcuguacaucuggggcgugcaccaccccggcaccgacaaggaccagaucuuccuguacgcccaggccagcggcagaaucaccgugagcaccaagagaagccagcaggccgugauccccaacaucggcagcagacccagagugagaaacauccccagcagaaucagcaucuacuggaccaucgugaagcccggcgacauccugcugaucaacagcaccggcaaccugaucgcccccagaggcuacuucaagaucagaagcggcaagagcagcaucaugagaagcgacgcccccaucggcaagugcaacagcgagugcaucacccccaacggcagcauccugaacgacaagcccuuccagaacgugaacagaaucaccuacggcgccugccccagauacgugaagcagaacacccugaagcuggccaccggcaugagaaacgugcccgagaagcagaccagaggcaucuucggcgccaucgccggcuucaucgagaacggcugggagggcaugguggacggcugguacggcuucagacaccagaacagcgagggcagaggccaggccgccgaccugaagagcacccaggccgccaucgaccagaucaacggcaagcugaacagacugaucggcaagaccaacgagaaguuccaccagaucgagaaggaguucagcgagguggagggcagaauccaggaccuggagaaguacguggaggacaccaagaucgaccuguggagcuacaacgccgagcugcugguggcccuggagaaccagcacaccaucgaccugaccgacagcgagaugaacaagcuguucgagaagaccaagaagcagcugagagagaacgccgaggacaugggcaacggcugcuucaagaucuaccacaagugcgacaacgccugcaucggcagcaucagaaacggcaccuacgaccacgacguguacagagacgaggcccugaacaacagauuccagaucaagggcguggagcugaagagcggcuacaaggacuggauccuguggaucagcuucgccaucagcugcuuccugcugugcguggcccugcugggcuucaucaugugggccugccagaagggcaacaucagaugcaacaucugcaucuga

SEQ ID NO: 166965 - RNA, 1698 nt, Artificial Sequence
  derived and/or modified CDS sequence (opt4) from hemagglutinin__InfluenzaA__AEI92018
augaaggugaagcugcuggugcugcugugcaccuucaccgccaccuacgccgacaccaucugcaucggcuaccacgccaacaacagcaccgacaccguggacaccgugcuggagaagaacgugaccgugacccacagcgugaaccugcuggagaacagccacaacggcaagcugugccugcugaagggcaucgccccccugcagcugggcaacugcagcguggccggcuggauccugggcaaccccgagugcgagcugcugaucagcaaggagagcuggagcuacaucguggagaagcccaaccccgagaacggcaccugcuaccccggccacuucgccgacuacgaggagcugagagagcagcugagcagcgugagcagcuucgagagauucgagaucuuccccaaggagagcagcuggcccaaccacaccgugaccggcgugagcgccagcugcagccacaacggcgagagcagcuucuacagaaaccugcuguggcugaccggcaagaacggccuguaccccaaccugagcaagagcuacgccaacaacaaggagaaggaggugcuggugcuguggggcgugcaccacccccccaacaucgccgaccagaagacccuguaccacaccgagaacgccuacgugagcguggugagcagccacuacagcagaaaguucacccccgagaucgccaagagacccaaggugagagaccaggagggcagaaucaacuacuacuggacccugcuggagcccggcgacaccaucaucuucgaggccaacggcaaccugaucgcccccagauacgccuucgcccugagcagaggcuucggcagcggcaucaucaacagcaacgcccccauggacaagugcgacgccaagugccagaccccccagggcgccaucaacagcagccugcccuuccagaacgugcaccccgugaccaucggcgagugccccaaguacgugagaagcgccaagcugagaauggugaccggccugagaaacauccccagcauccagagcagaggccuguucggcgccaucgccggcuucaucgagggcggcuggaccggcaugguggacggcugguacggcuaccaccaccagaacgagcagggcagcggcuacgccgccgaccagaagagcacccagaacgccaucaacggcaucaccaacaaggugaacagcgugaucgagaagaugaacacccaguucaccgccgugggcaaggaguucaacaagcuggagagaagaauggagaaccugaacaagaagguggacgacggcuucaucgacaucuggaccuacaacgccgagcugcuggugcugcuggagaacgagagaacccuggacuuccacgacagcaacgugaagaaccuguacgagaaggugaagagccagcugaagaacaacgccaaggagaucggcaacggcugcuucgaguucuaccacaagugcaacgacgagugcauggagagcgugaagaacggcaccuacgacuaccccaaguacagcgaggagagcaagcugaacagagagaagaucgacggcgugaagcuggagagcaugggcguguaccagauccuggccaucuacagcaccguggccagcagccuggugcugcuggugagccugggcgccaucagcuucuggaugugcagcaacggcagccugcagugcagaaucugcaucuga

SEQ ID NO: 166966 - RNA, 1701 nt, Artificial Sequence; identical to SEQ ID NO: 166941
  derived and/or modified CDS sequence (opt4) from hemagglutinin__InfluenzaA__AEJ10400

SEQ ID NO: 166967 - RNA, 1701 nt, Artificial Sequence
  derived and/or modified CDS sequence (opt4) from hemagglutinin__InfluenzaA__AEJ10410
augaagaccauccugguggugcugcuguacaccuucgccaccgccaacgccgacacccugugcaucggcuaccacgccaacaacagcaccgacaccaucgacaccgugcuggagaagaacgugaccgugacccacagcgugaaccugcuggaggacaagcacaacggcaagcugugcaagcugagaggcguggccccccugcaccugggcaagugcaacaucgccggcuggauccugggcaaccccgagugcgagagccugagcaccgccagcagcuggagcuacaucguggagaccagcagcagcgacaacggcaccugcuaccccggcaacuucaucgacuacgaggagcugagagagcagcugagcagcgugagcagcuucgagagauucgagaucuuccccaagaccagcagcuggagcgaccacgacagcaacaagggcgugaccgccgccugcccccacgccggcgccaagagcuucuacaagaaccugaucuggcuggugaagaagggcaacagcuaccccaagcugagcaagagcuacaucaacgacaagggcaaggaggugcuggugcuguggggcauccaccaccccagcaccagcgccgaccagcagagccuguaccagaacgccgacgccuacguguucgugggcaccagcagauacagcaagaaguucaagcccgagaucgccaucagacccaaggugagagaccaggagggcagaaugaacuacuacuggacccugguggagcccggcgacaagaucaccuucgaggccaccggcaaccugguggcccccagauacgccuucgccauggagagaaacgccggcagcggcaucaucaucagcgacacccccgugcacgacugcaacaccaccugccagacccccaagggcgccaucaacaccagccugcccuuccagaacauccaccccaucaccaucggcaagugccccaaguacgugaagagcaccaagcugagacuggccaccggccugagaaacgugcccagcauccagagcagaggccuguucggcgccaucgccggcuucaucgagggcggcuggaccggcaugguggacggcugguacggcuaccaccaccagaacgagcagggcagcggcuacgccgccgaccugaagagcacccagaacgccaucgacaagaucaccaacaaggugaacagcgugaucgagaagaugaacacccaguucaccgccgugggcaaggaguucaaccaccuggagaagagaaucgagaaccugaacaagaagguggacgacggcuuccuggacaucuggaccuacaacgccgagcugcuggugcugcuggagaacgagagaacccuggacuaccacgacagcaacgugaagaaccuguacgagaaggugagaagccagcugaagaacaacgccaaggagaucggcaacggcugcuucgaguucuaccacaagugcgacaacaccugcauggagagcgugaagaacggcaccuacgacuaccccaaguacagcgaggaggccaagcugaacagagaggagaucgacggcgugaagcuggagagcaccagaaucuaccagauccuggccaucuacagcaccguggccagcagccuggugcugguggugagccugggcgccaucagcuucuggaugugcagcaacggcagccugcagugcagaaucugcaucuga

SEQ ID NO: 166968 - RNA, 1701 nt, Artificial Sequence
  derived and/or modified CDS sequence (opt4) from hemagglutinin__InfluenzaA__AEJ10420
augaaggccauccugguggugcugcuguacaccuucgccaccgccaacgccgacacccugugcaucggcuaccacgccaacaacagcaccgacaccguggacaccgugcuggagaagaacgugaccgugacccacagcgugaaccugcuggaggacagacacaacggcaagcugugcaagcugagaggcguggccccccugcaccugggcaagugcaacaucgccggcuggauccugggcaaccccgagugcgagagccugagcaccgccagcagcuggagcuacaucguggagaccagcagcagcgacaacggcaccugcuaccccggcgacuucaucgacuacgaggagcugagagagcagcugagcagcgugagcagcuucgagagauucgagaucuuccccaagaccagcagcuggcccgaccacgacagcaacaagggcgugaccgccgccugcccccacgccggcgccaagagcuucuacaagaaccugaucuggcuggugaagaagggcaacagcuaccccaagcugagcaagagcuacaucaacgacaagggcaaggaggugcuggugcuguggggcauccaccaccccagcaccagcgccgaccagcagagccuguaccagaacgccgacgccuacguguucgugggcaccagcagauacagcaagaaguucaagcccgagaucgccaucagacccaaggugagagaccaggagggcagaaugaacuacuacuggacccugguggagcccggcgacaagaucaccuucgaggccaccggcaaccugguggugcccagauacgccuucgccauggagagaaacgccggcagcggcaucaucaucagcgacacccccgugcacgacugcaacaccaccugccagacccccaagggcgccaucaacaccagccugcccuuccagaacauccaccccaucaccaucggcaagugccccaaguacgugaagagcaccaagcugagacuggccaccggccugagaaacgugcccagcauccagagcagaggccuguucggcgccaucgccggcuucaucgagggcggcuggaccggcaugguggacggcugguacggcuaccaccaccagaacgagcagggcagcggcuacgccgccgaccugaagagcacccagaacgccaucgacaagaucaccaacaaggugaacagcgugaucgagaagaugaacacccaguucaccgccgugggcaaggaguucaaccaccuggagaagagaaucgagaaccugaacaagaagguggacgacggcuuccuggacaucuggaccuacaacgccgagcugcuggugcugcuggagaacgagagaacccuggacuaccacgacagcaacgugaagaaccuguacgagaaggugagaagccagcugaagaacaacgccaaggagaucggcaacggcugcuucgaguucuaccacaagugcgacaacaccugcauggagagcgugaagaacggcaccuacgacuaccccaaguacagcgaggaggccaagcugaacagagaggagaucgacggcgugaagcuggagagcaccagaaucuaccagauccuggccaucuacagcaccguggccagcagccuggugcugguggugagccugggcgccaucagcuucuggaugugcagcaacggcagccugcagugcagaaucugcaucuga

SEQ ID NO: 166969 - RNA, 1701 nt, Artificial Sequence
  derived and/or modified CDS sequence (opt4) from hemagglutinin__InfluenzaA__AEJ10430
augaaggccauccugguggugcugcuguacaccuucgccaccgccaacgccgacacccugugcaucggcuaccacgccaacaacagcaccgacaccguggacaccgugcuggagaagaacgugaccgugacccacagcgugaaccugcuggaggacaagcacaacggcaagcugugcaagcugagaggcguggccccccugcaccugggcaagugcaacaucgccggcuggauccugggcaaccccgagugcgagagccugagcaccgccagcagcuggagcuacaucguggagaccagcagcagcgacaacggcaccugcuaccccggcgacuucaucgacuacgaggagcugagagagcagcugagcagcgugagcagcuucgagagauucgagaucuuccccaagaccagcagcuggcccaaccacgacagcaacaagggcgugaccaccgccugcccccacgccggcgccaagagcuucuacaagaaccugaucuggcuggugaagaagggcaacagcuaccccaagcugagcaagagcuacaucaacgacaagggcaaggaggugcuggugcuguggggcauccaccacccccccaccagcgccgaccagcagagccuguaccagaacgccgacgccuacguguucgugggcaccagcagauacagcaagaaguucaagcccgagaucgccaucagacccaaggugagagaccaggagggcagaaugaacuacuacuggacccugguggagcccggcgacaagaucaccuucgaggccaccggcaaccugguggugcccagauacgccuucgccauggagagaaacgccggcagcggcaucaucaucagcgacacccccgugcacgacugcaacaccaccugccagacccccaagggcgccaucaacaccagccugcccuuccagaacauccaccccaucaccaucggcaagugccccaaguacgugaagagcaccaagcugagacuggccaccggccugagaaacgugcccagcauccagagcagaggccuguucggcgccaucgccggcuucaucgagggcggcuggaccggcaugguggacggcugguacggcuaccaccaccagaacgagcagggcagcggcuacgccgccgaccugaagagcacccagaacgccaucgacgagaucaccaacaaggugaacagcgugaucgagaagaugaacacccaguucaccgccgugggcaaggaguucaaccaccuggagaagagaaucgagaaccugaacaagaagguggacgacggcuuccuggacaucuggaccuacaacgccgagcugcuggugcugcuggagaacgagagaacccuggacuaccacgacagcaacgugaagaaccuguacgagaaggugagaagccagcugaagaacaacgccaaggagaucggcaacggcugcuucgaguucuaccacaagugcgacaacaccugcauggagagcgugaagaacggcaccuacgacuaccccaaguacagcgaggaggccaagcugaacagagaggagaucgacggcgugaagcuggagagcaccagaaucuaccagauccuggccaucuacagcaccguggccagcagccuggugcugguggugagccugggcgccaucagcuucuggaugugcagcaacggcagccugcagugcagaaucugcaucuga

SEQ ID NO: 166970 - RNA, 1701 nt, Artificial Sequence
  derived and/or modified CDS sequence (opt4) from hemagglutinin__InfluenzaA__AEJ10440
augaaggccauccugguggugcugcuguacaccuucgccaccgccaacgccgacacccugugcaucggcuaccacgccaacaacagcaccgacaccguggacaccgugcuggagaagaacgugaccgugacccacagcgugaaccugcuggaggacaagcacaacggcaagcugugcaagcugagaggcguggccccccugcaccugggcaagugcaacaucgccggcuggauccugggcaaccccgagugcgagagccugagcaccgccagcagcuggagcuacaucguggagaccagcagcagcgacaacggcaccugcuaccccggcgacuucaucgacuacgaggagcugagagagcagcugagcagcgugagcagcuucgagagauucgagaucuuccccaagaccagcagcuggcccaaccacgacagcaacaagggcgugaccgccgccugcccccacgccggcgccaagagcuucuacaagaaccugaucuggcuggugaagaagggcaacagcuaccccaagcugagcaagagcuacaucaacgacaagggcaaggaggugcuggugcuguggggcauccaccaccccagcaccaccgccgaccagcagauccuguaccagaacgccgacaccuacguguucgugggcaccagcagauacagcaagaaguucaagcccgagaucgccaucagacccaaggugagagaccaggagggcagaaugaacuacuacuggacccugguggagcccggcgacaagaucaccuucgaggccaccggcaaccugguggugcccagauacgccuucgccauggagagaaacgccggcagcggcaucaucaucagcgacacccccgugcacgacugcaacaccaccugccagacccccaagggcgccaucaacaccagccugcccuuccagaacauccaccccaucaccaucggcaagugccccaaguacgugaagagcaccaagcugagacuggccaccggccugagaaacgugcccagcauccagagcagaggccuguucggcgccaucgccggcuucaucgagggcggcuggaccggcaugguggacggcugguacggcuaccaccaccagaacgagcagggcagcggcuacgccgccgaccugaagagcacccagaacgccaucgacaagaucaccaacaaggugaacagcgugaucgagaagaugaacacccaguucaccgccgugggcaaggaguucaaccaccuggagaagagaaucgagaaccugaacaagaagguggacgacggcuuccuggacaucuggaccuacaacgccgagcugcuggugcugcuggagaacgagagaacccuggacuaccacgacagcaacgugaagaaccuguacgagaaggugagaaaccagcugaagaacaacgccaaggagaucggcaacggcugcuucgaguucuaccacaagugcgacaacaccugcauggagagcgugaagaacggcaccuacgacuaccccaaguacagcgaggaggccaagcugaacagagaggagaucgacggcgugaagcuggagagcaccagaaucuaccagauccuggccaucuacagcaccguggccagcagccuggugcugguggugagccugggcgccaucagcuucuggaugugcagcaacggcagccugcagugcagaaucugcaucuga

SEQ ID NO: 166971 - RNA, 1701 nt, Artificial Sequence; identical to SEQ ID NO: 166884
  derived and/or modified CDS sequence (opt4) from hemagglutinin__InfluenzaA__AEJ10450

SEQ ID NO: 166972 - RNA, 1701 nt, Artificial Sequence
  derived and/or modified CDS sequence (opt4) from hemagglutinin__InfluenzaA__AEJ10480
augaaggccauccugguggugcugcuguacaccuucgccaccgccaacgccgacacccugugcaucggcuaccacgccaacaacagcaccgacaccguggacaccgugcuggagaagaacgugaccgugacccacagcgugaaccugcuggaggacaagcacaacggcaagcugugcaagcugagaggcguggccccccugcaccugggcaagugcaacaucgccggcuggauccugggcaaccccgagugcgagagccugagcaccgccagcagcuggagcuacaucguggagaccagcagcagcgacaacggcaccugcuaccccggcgacuucaucaacuacgaggagcugagagagcagcugagcagcgugagcagcuucgagagauucgagaucuuccccaagaccagcagcuggcccaaccacgacagcaacaagggcgugaccgccgccugcccccaggccggcgccaagagcuucuacaagaaccugaucuggcuggugaagaagggcaacagcuaccccaagcugagcaagagcuacaucaacgacaagggcaaggaggugcuggugcuguggggcauccaccaccccagcaccagcgccgaccagcagagccuguaccagagcgccgacgccuacguguucgugggcaccagcaaguacagcaagaaguucaagcccgagaucgccgugagacccaaggugagagaccaggagggcagaaugaacuacuacuggacccugguggagcccggcgacaagaucaccuucgaggccaccggcaaccugcuggugcccagauacgccuucgccauggagagaaacgccggcagcggcaucaucaucagcgacacccccgugcacgacugcaacaccaccugccagacccccaagggcgccaucaacaccagccugcccuuccagaacauccaccccaucaccaucggcaagugccccaaguacgugaagagcaccaagcugagacuggccaccggccugagaaacgugcccagcauccagagcagaggccuguucggcgccaucgccggcuucaucgagggcggcuggaccggcaugguggacggcugguacggcuaccaccaccagaacgcccagggcagcggcuacgccgccgaccugaagagcacccagaacgccaucgacaagaucaccaacaaggugaacagcgugaucgagaagaugaacacccaguucaccgccgugggcaaggaguucaaccaccuggagaagagaaucgagaaccugaacaagaagguggacgacggcuuccuggacaucuggaccuacaacgccgagcugcuggugcugcuggagaacgagagaacccuggacuaccacgacagcaacgugaagaaccuguacgagaaggugagaagccagcugaagaacaacgccaaggagaucggcaacggcugcuucgaguucuaccacaagugcgacaacaccugcauggagagcgugaagaacggcaccuacgacuaccccaaguacagcgaggaggccaagcugaacagagaggagaucgacggcgugaagcuggagagcaccagaaucuaccagauccuggccaucuacagcaccguggccagcagccuggugcugguggugagccugggcgccaucagcuucuggaugugcagcaacggcagccugcagugcagaaucugcaucuga

SEQ ID NO: 166973 - RNA, 1701 nt, Artificial Sequence
  derived and/or modified CDS sequence (opt4) from hemagglutinin__InfluenzaA__AEJ10490
augaaggccauccugguggugcugcuguacaccuucgccaccgccaacgccgacacccugugcaucggcuaccacgccaacaacagcaccgacaccguggacaccgugcuggagaagaacgugaccgugacccacagcgugaaccugcuggaggacaagcacaacggcaagcugugcaagcugagaggcguggccccccugcaccugggcaagugcaacaucgccggcuggauccugggcaaccccgagugcgagagccugagcaccgccagcagcuggagcuacaucguggagaccagcagcagcgacaacggcaccugcuaccccggcgacuucaucgacuacgaggagcugagagagcagcugagcagcgugagcagcuucgagagauucgagaucuuccccaagaccagcagcuggcccaaccacgacagcaacaagggcgugaccaccgccugcccccacgccggcgccaagagcuucuacaagaaccugaucuggcuggugaagaagggcaacagcuaccccaagcugagcaagagcuacaucaacgacaagggcaaggaggugcuggugcuguggggcauccaccacccccccaccagcgccgaccagcagagccuguaccagaacgccgacgccuacguguucgugggcaccagcagauacagcaagaaguucaagcccgagaucgccaucagacccaaggugagagaccaggagggcagaaugaacuacuacuggacccugguggagcccggcgacaagaucaccuucgaggccaccggcaaccugguggugcccagauacgccuucgccauggagagaaacgccggcagcggcaucaucaucagcgacacccccgugcacgacugcaacaccaccugccagacccccaagggcgccaucaacaccagccugcccuuccagaacauccaccccaucaccaucggcagaugccccaaguacgugaagagcaccaagcugagacuggccaccggccugagaaacgugcccagcauccagagcagaggccuguucggcgccaucgccggcuucaucgagggcggcuggaccggcaugguggacggcugguacggcuaccaccaccagaacgagcagggcagcggcuacgccgccgaccugaagagcacccagaacgccaucgacggcaucaccaacaaggugaacagcgugaucgagaagaugaacacccaguucaccgccgugggcaaggaguucaaccaccuggagaagagaaucgagaaccugaacaagaagguggacgacggcuuccuggacaucuggaccuacaacgccgagcugcuggugcugcuggagaacgagagaacccuggacuaccacgacagcaacgugaagaaccuguacgagaaggugagaagccagcugaagaacaacgccaaggagaucggcaacggcugcuucgaguucuaccacaagugcgacaacaccugcauggagagcgugaagaacggcaccuacgacuaccccaaguacagcgaggaggccaagcugaacagagaggagaucgacggcgugaagcuggagagcaccaugaucuaccagauccuggccaucuacagcaccguggccagcagccuggugcugaucgugagccugggcgccaucagcuucuggaugugcagcaacggcagccugcagugcagaaucugcaucuga

SEQ ID NO: 166974 - RNA, 1701 nt, Artificial Sequence
  derived and/or modified CDS sequence (opt4) from hemagglutinin__InfluenzaA__AEJ10500
augaaggccauccugguggugcugcuguacaccuucgccaccgccaacgccgacacccugugcaucggcuaccacgccaacaacagcaccgacaccguggacaccgugcuggagaagaacgugaccgugacccacagcgugaaccugcuggagggcaagcacaacggcaagcugugcaagcugagaggcguggccccccugcaccugggcaagugcaacaucgccggcuggauccugggcaaccccgagugcgagagccugagcaccgccagcagcuggagcuacaucguggagaccagcagcagcgacaacggcaccugcuaccccggcgacuucaucgacuacgaggagcugagagagcagcugagcagcgugagcagcuucgagagauucgagaucuuccccaagaccagcagcuggcccaaccacgacagcaacaagggcgugaccgccgccugcccccacgccggcgccaagggcuucuacaagaaccugaucuggcuggugaagaagggcaacagcuaccccaagcugaacaagagcuacaucaacgacaagggcaaggaggugcuggugcuguggggcauccaccaccccagcaccaccgccgaccagcagagccuguaccagaacgccgacaccuacguguucgugggcaccagcagauacagcaagaaguucaagcccgagaucgccaucagacccaaggugagagaccaggagggcagaaugaacuacuacuggacccugguggagcccggcgacaagaucaccuucgaggccaccggcaaccugguggugcccagauacgccuucgccauggagagaaacgccggcagcggcaucaucaucagcgacacccccgugcacgacugcaacaccaccugccagacccccaagggcgccaucaacaccagccugcccuuccagaacauccaccccaucaccaucggcaagugccccaaguacgugaagagcaccaagcugagacuggccaccggccugagaaacgugcccagcauccagagcagaggccuguucggcgccaucgccggcuucaucgagggcggcuggaccggcaugguggacggcugguacggcuaccaccaccagaacgagcagggcagcggcuacgccgccgaccugaagagcacccagaacgccaucgacaagaucaccaacaaggugaacagcgugaucgagaagaugaacacccaguucaccgccgugggcaaggaguucaaccaccuggagaagagaaucgagaaccugaacaagaagguggacgacggcuuccuggacaucuggaccuacaacgccgagcugcuggugcugcuggagaacgagagaacccuggacuaccacgacagcaacgugaagaaccuguacgagaaggugagaaaccagcugaagaacaacgccaaggagaucggcaacggcugcuucgaguucuaccacaagugcgacaacaccugcauggagagcgugaagaacggcaccuacgacuaccccaaguacagcgaggaggccaagcugaacagagaggagaucgacggcgugaagcuggagagcaccagaaucuaccagauccuggccaucuacagcaccguggccagcagccuggugcugguggugagccugggcgccaucagcuucuggaugugcagcaacggcagccugcagugcagaaucugcaucuga

SEQ ID NO: 166975 - RNA, 1701 nt, Artificial Sequence; identical to SEQ ID NO: 166927
  derived and/or modified CDS sequence (opt4) from hemagglutinin__InfluenzaA__AEJ10510

SEQ ID NO: 166976 - RNA, 1701 nt, Artificial Sequence
  derived and/or modified CDS sequence (opt4) from hemagglutinin__InfluenzaA__AEJ10520
augaaggccauccugguggugcugcuguacaccuucgccaccgccaacgccgacacccugugcaucggcuaccacgccaacaacagcaccgacaccguggacaccgugcuggagaagaacgugaccgugacccacagcgugaaccugcuggaggacaagcacaacggcaagcugugcaagcugagaggcguggccccccugcaccugggcaagugcaacaucgccggcuggauccugggcaaccccgagugcgagagccugagcaccgccagcagcuggagcuacaucguggagaccagcagcagcgacaacggcaccugcuaccccggcgacuucaucgacuacgaggagcugagagagcagcugagcagcgugagcagcuucgagagauucgagaucuuccccaagaccagcagcuggcccaacuacgacagcaacaagggcgugaccgccgccugcccccacgccggcgccaagagcuucuacaagaaccugaucuggcuggugaagaagggcaacagcuaccccaagcugagcaagagcuacaucaacgacaagggcaaggaggugcuggugcuguggggcauccaccaccccagcaccagcgccgaccagcagagccuguaccagaacgccgacgccuacguguucgugggcaccagcagauacagcaagaaguucaagcccgagaucgccaucagacccaaggugagagaccaggagggcagaaugaacuacuacuggacccugguggagcccggcgacaagaucaccuucgaggccaccggcaaccugguggugcccagauacgccuucgccauggagagaaacgccggcagcggcaucaucaucagcgacacccccgugcacgacugcaacaccaccugccagacccccaagggcgccaucaacaccagccugcccuuccagaacauccaccccaucaccaucggcaagugcagcaaguacgugaagagcaccaagcugagacuggccaccggccugagaaacgugcccagcauccagagcagaggccuguucggcgccaucgccggcuucaucgagggcggcuggaccggcaugguggacggcugguacggcuaccaccaccagaacgagcagggcagcggcuacgccgccgaccugaagagcacccagaacgccaucgacgagaucaccaacaaggugaacagcgugaucgagaagaugaacacccaguucaccgccgugggcaaggaguucaaccaccuggagaagagaaucgagaaccugaacaagaagguggacgacggcuuccuggacaucuggaccuacaacgccgagcugcuggugcugcuggagaacgagagaacccuggacuaccacgacagcaacgugaagaaccuguacgagaaggugagaagccagcugaagaacaacgccaaggagaucggcaacggcugcuucgaguucuaccacaagugcgacaacaccugcauggagagcgugaagaacggcaccuacgacuaccccaaguacagcgaggaggccaagcugaacagagaggagaucgacggcgugaagcuggagagcaccagaaucuaccagauccuggccaucuacagcaccguggccagcagccuggugcugguggugagccugggcgccaucagcuucuggaugugcagcaacggcagccugcagugcagaaucugcaucuga

SEQ ID NO: 166977 - RNA, 1701 nt, Artificial Sequence; identical to SEQ ID NO: 162729
  derived and/or modified CDS sequence (opt4) from hemagglutinin__InfluenzaA__AEJ10530

SEQ ID NO: 166978 - RNA, 1701 nt, Artificial Sequence; identical to SEQ ID NO: 162729
  derived and/or modified CDS sequence (opt4) from hemagglutinin__InfluenzaA__AEJ10540

SEQ ID NO: 166979 - RNA, 1701 nt, Artificial Sequence; identical to SEQ ID NO: 162729
  derived and/or modified CDS sequence (opt4) from hemagglutinin__InfluenzaA__AEJ10550

SEQ ID NO: 166980 - RNA, 1701 nt, Artificial Sequence
  derived and/or modified CDS sequence (opt4) from hemagglutinin__InfluenzaA__AEJ10570
augaaggccauccugguggugcugcuguacacccuggccaccgccaacgccgacacccugugcaucggcuaccacgccaacaacagcaccgacaccguggacaccgugcuggagaagaacgugaccgugacccacagcgugaaccugcuggaggacaagcacgacggcaagcugugcaagcugagaggcguggccccccugcaccugggcaagugcaacaucgccggcuggauccugggcaaccccgagugcgagagccugagcaccgccagcagcuggagcuacaucguggagaccagcagcagcgacaacggcaccugcuaccccggcgacuucaucgacuacgaggagcugagagagcagcugagcagcgugagcagcuucgagagauucgagaucuuccccaagaccagcagcuggcccaaccacgacagcaacaagggcgugaccgccgccugcccccacgccggcgccaagagcuucuacaagaaccugaucuggcuggugaagaagggcaacagcuaccccaagcugagcaagagcuacaucaacgacaagggcaaggaggugcuggugcuguggggcauccaccaccccagcaccagcgccgaccagcagagccuguaccagaacgccgacgccuacguguucgugggcaccagcagauacagcaagaaguucaagcccgagaucgccaucagacccaaggugagagaccaggagggcagaaugaacuacuacuggacccugguggagcccggcgacaagaucaccuucgaggccaccggcaaccugguggugcccagauacgccuucgccauggagagaaacgccggcagcggcaucaucaucagcgacacccccgugcacgacugcaacgccaccugccagacccccaagggcgccaucaacaccagccugcccuuccagaacauccaccccaucaccaucggcaagugccccaaguacgugaagagcaccaagcugagacuggccaccggccugagaaacgugcccagcauccagagcagaggccuguucggcgccaucgccggcuucaucgagggcggcuggaccggcaugguggacggcugguacggcuaccaccaccagaacgagcagggcagcggcuacgccgccgaccugaagagcacccagaacgccaucgacaagaucaccaacaaggugaacagcgugaucgagaagaugaacacccaguucaccgccgugggcaaggaguucaaccaccuggagaagagaaucgagaaccugaacaagaagguggacgacggcuuccuggacaucuggaccuacaacgccgagcugcuggugcugcuggagaacgagagaacccuggacuaccacgacagcaacgugaagaaccuguacgagaaggugagaagccagcugaagaacaacgccaaggagaucggcaacggcugcuucgaguucuaccacaagugcgacaacaccugcauggagagcgugaagaacggcaccuacgacuaccccaaguacagcgaggaggccaagcugaacagagaggagaucgacggcgugaagcuggagagcaccagaaucuaccagauccuggccaucuacagcaccguggccagcagccuggugcugguggugagccugggcgccaucagcuucuggaugugcagcaacggcagccugcagugcagaaucugcaucuga

SEQ ID NO: 166981 - RNA, 1701 nt, Artificial Sequence; identical to SEQ ID NO: 166980
  derived and/or modified CDS sequence (opt4) from hemagglutinin__InfluenzaA__AEJ10580

SEQ ID NO: 166982 - RNA, 1701 nt, Artificial Sequence
  derived and/or modified CDS sequence (opt4) from hemagglutinin__InfluenzaA__AEJ36302
augaaggccauccugguggugcugcuguacaccuucgccaccgccaacgccgacacccugugcaucggcuaccacgccaacaacagcaccgacaccguggacaccgugcuggagaagaacgugaccgugacccacagcgugaaccugcuggaggacaagcacaacggcaagcugugcaagcugagaggcguggccccccugcaccugggcaagugcaacaucgccggcuggauccugggcaaccccgagugcgagagccugagcaccgccagcagcuggagcuacaucguggagaccagcagcagcuacaacggcaccugcuaccccggcgacuucaucgacuacgaggagcugagagagcagcugagcagcgugagcagcuucgagagauucgagaucuuccccaagaccagcagcuggcccaaccacgaccccaacaagggcgugaccgccgccugcccccacgccggcgccaagagcuucuacaagaaccugaucuggcuggugaagaagggcaacagcuaccccaagcugagcaagagcuacaucaacgacaagggcaaggaggugcuggugcuguggggcauccaccaccccagcaccagcgccgaccagcagagacuguaccagaacgccgacgccuacgccuucgugggcaccagcagauacagcaagaaguucaagcccgagaucgccaucagacccaaggugagagaccaggagggcagaaugaacuacuacuggacccugguggagcccggcgacaagaucaccuucgaggccaccggcaaccugguggugcccagauacgccuucgccauggagagaaacgccggcagcggcaucaucaucagcgacacccccgcccacgacugcaacaccaccugccagacccccaagggcgccaucaacaccagccugcccuuccagaacgugcaccccaucaccaucggcaagugccccaaguacgugaagagcaccaagcugagacuggccaccggccugagaaacgugcccagcauccagagcagaggccuguucggcgccaucgccggcuucaucgagggcggcuggaccggcaugguggacggcugguacggcuaccaccaccagaacgagcagggcagcggcuacgccgccgaccugaagagcacccagaacgccuucgacgagaucaccaacaaggugaacagcgugaucgagaagaugaacacccaguucaccgccgugggcaaggaguucaaccaccuggagaagagaaucgagaaccugaacaagaagguggacgacggcuuccuggacaucuggaccuacaacgccgagcugcuggugcugcuggagaacgagagaacccuggacuaccacgacagcaacgugaagaaccuguacgagaaggugagaagccagcugaagaacaacgccaaggagaccggcaacggcugcuucgaguucuaccacaagugcgacaacaccugcauggagagcgugaagaacggcaccuacgacuaccccaaguacagcgaggaggccaagcugaacagagaggagaucgacggcgugaagcuggagagcaccagaaucuaccagauccuggccaucuacagcaccguggccagcagccuggugcugguggugagccugggcgccaucagcuucuggaugugcagcaacggcagccugcagugcagaaucugcaucuga

SEQ ID NO: 166983 - RNA, 1701 nt, Artificial Sequence
  derived and/or modified CDS sequence (opt4) from hemagglutinin__InfluenzaA__AEJ36312
augaaggccauccugguggugcugcuguacaccuucgccaccgccaacgccgacacccugugcaucggcuaccacgccaacaacagcaccgacaccguggacaccgugcuggagaagaacgugaccgugacccacagcgugaaccugcuggaggacaagcacaacggcaagcugugcaagcugagaggcguggccccccugcaccugggcaagugcaacaucgccggcuggauccugggcaaccccgagugcgagagccugagcaccgccagcagcuggagcuacaucguggagaccagcagcagcgacaacggcaccugcuaccccggcgacuucaucgacuacgaggagcugagagagcagcugagcagcgugagcagcuucgagagauucgagaucuuccccaagaccagcagcuggcccgaccacgacagcaacaagggcgugaccgccgccugcccccacgccggcgccaagagcuucuacaagaaccugaucuggcuggugaagaagggcaacagcuaccccaagcugagcaagagcuacaucaacgacaagggcaaggaggugcuggugcuguggggcauccaccaccccagcaccagcgccgaccagcagagccuguaccagaacgccgacgccuacguguucgugggcaccagcagauacagcaagaaguucaagcccgagaucgccaucagacccaaggugagagaccaggagggcagaaugaacuacuacuggacccugguggagcccggcgacaagaucaccuucgaggccaccggcaaccugguggugcccagauacgccuucgccauggagagaaacgccggcagcggcaucaucaucagcgacacccccgugcacgacugcaacaccaccugccagacccccaagggcgccaucaacaccagccugcccuuccagaacauccaccccaucaccaucggcaagugccccaaguacgugaagagcaccaagcugagacuggccaccggccugagaaacgugcccagcauccagagcagaggccuguucggcgccaucgccggcuucaucgagggcggcuggaccggcaugguggacggcugguacggcuaccaccaccagaacgagcagggcagcggcuacgccgccgaccugaagagcacccagaacgccaucgacaagaucaccaacaaggugaacagcgugaucgagaagaugaacauccaguucaccgccgugggcaaggaguucaaccaccuggagaagagaaucgagaaccugaacaagaagguggacgacggcuuccuggacaucuggaccuacaacgccgagcugcuggugcugcuggagaacgagagaacccuggacuaccacgacagcaacgugaagaaccuguacgagaaggugagaagccagcugaagaacaacgccaaggagaucggcaacggcugcuucgaguucuaccacaagugcgacaacaccugcauggagagcgugaagaacggcaccuacgacuaccccaaguacagcgaggaggccaagcugaacagagaggagaucgacggcgugaagcuggagagcaccagaaucuaccagauccuggccaucuacagcaccguggccagcagccuggugcugguggugagccugggcgccaucagcuucuggaugugcagcaacggcagccugcagugcagaaucugcaucuga

SEQ ID NO: 166984 - RNA, 1701 nt, Artificial Sequence
  derived and/or modified CDS sequence (opt4) from hemagglutinin__InfluenzaA__AEJ37853
augaaggccauccugguggugcugcuguacaccuucgccaccgccaacgccgacacccugugcaucggcuaccacgccaacaacagcaccgacaccguggacaccgugcuggagaagaacgugaccgugacccacagcgugaaccugcuggaggacaagcacaacggcaagcugugcaagcugagaggcguggccccccugcaccugggcaagugcaacaucgccggcuggauccugggcaaccccgagugcgagagccugagcaccgccagcagcuggagcuacaucguggaggccagcagcagcgacaacggcaccugcuaccccggcgacuucaucgacuacgaggagcugagagagcagcugagcagcgugagcagcuucgagagauucgagaucuuccccaagaccagcagcuggcccaaccacgacagcaacaagggcgugaccgccgccugcccccacgccggcgccaagagcuucuacaagaaccugaucuggcuggugaagaagggcaacagcuaccccaagcugagcaagagcuacaucaacgacaagggcaaggaggugcuggugcuguggggcauccaccaccccagcaccagcgccgaccagcagagccuguaccagaacgccgacgccuacguguucgugggcaccagcagauacagcaagaaguucaagcccgagaucgccaucagacccaaggugagagaccaggagggcagaaugaacuacuacuggacccugguggagcccggcgacaagaucaccuucgaggccaccggcaaccugguggugcccagauacgccuucgccauggagagaaacgccggcagcggcaucaucaucagcgacacccccgugcacgacugcaacaccaccugccagacccccaagggcgccaucaacaccagccugcccuuccagaacauccaccccaucaccaucggcaagugccccaaguacgugaagagcaccaagcugagacuggccaccggccugagaaacgugcccagcauccagagcagaggccuguucggcgccaucgccggcuucaucgagggcggcuggaccggcaugguggacggcugguacggcuaccaccaccagaacgagcagggcagcggcuacgccgccgaccugaagagcacccagaacgccaucgacaagaucaccaacaaggugaacagcgugaucgagaagaugaacacccaguucaccgccgugggcaaggaguucaaccaccuggagaagagaaucgagaaccugaacaagaagguggacgacggcuuccuggacaucuggaccuacaacgccgagcugcuggugcugcuggagaacgagagaacccuggacuaccacgacagcaacgugaagaaccuguacgagaaggugagaagccagcugaagaacaacgccaaggagaucggcaacggcugcuucgaguucuaccacaagugcgacaacaugugcauggagagcgugaagaacggcaccuacgacuaccccaaguacagcgaggaggccaagcugaacagagaggagaucgacggcgugaagcuggagagcaccagaaucuaccagauccuggccaucuacagcaccguggccagcagccuggugcugguggugagccugggcgccaucagcuucuggaugugcagcaacggcagccugcagugcagaaucugcaucuga

SEQ ID NO: 166985 - RNA, 1701 nt, Artificial Sequence
  derived and/or modified CDS sequence (opt4) from hemagglutinin__InfluenzaA__AEJ37863
augaaggccauccugguggugcugcuguacaccuucgccaccgccaacgccgacacccugugcaucggcuaccacgccaacaacagcaccgacaccguggacaccgugcuggagaagaacgugaccgugacccacagcgugaaccugcuggaggacaagcacaacggcaagcugugcaagcugagaggcguggccccccugcaccugggcaagugcaacaucgccggcuggauccugggcaaccccgagugcgagagccugagcaccgccagcagcuggagcuacaucguggagaccagcagcagcgacaacggcaccugcuaccccggcgacuucaucgacuacgaggagcugagagagcagcugagcagcgugagcagcuucgagagauucgagaucuuccccaagaccagcagcuggcccaaccacgacagcaacaagggcgugaccgccgccugcccccacgccggcgccaagagcuucuacaagaaccugaucuggcuggugaagaagggcaacagcuaccccaagcugagcaagagcuacaucaacgacaagggcaaggaggugcuggugcuguggggcauccaccaccccagcaccagcgccgaccagcagagccuguaccagaacgccgacgccuacguguucgugggcaccagcagauacagcaagaaguucaagcccgagaucgccaucagacccaagcugagagaccaggagggcagaaugaacuacuacuggacccugguggagcccggcgacaagaucaccuucgaggccaccggcaaccugguggugcccagauacgccuucgccauggagagaaacgccggcagcggcaucaucaucagcgacacccccgugcacgacugcaacaccaccugccagacccccaagggcgccaucaacaccagccugcccuuccagaacauccaccccaucaccaucggcaagugccccaaguacgugaagagcaccaagcugagacuggccaccggccugagaaacgugcccagcauccagagcagaggccuguucggcgccaucgccggcuucaucgagggcggcuggaccggcaugguggacggcugguacggcuaccaccaccagaacgagcagggcagcggcuacgccgccgaccugaagagcacccagaacgccaucgacaagaucaccaacaaggugaacagcgugaucgagaagaugaacacccaguucaccgccgugggcaaggaguucaaccaccuggagaagagaaucgagaaccugaacaagaagguggacgacggcuuccuggacaucuggaccuacaacgccgagcugcuggugcugcuggagaacgagagaacccuggacuaccacgacagcaacgugaagaaccuguacgagaaggugagaagccagcugaagaacaacgccaaggagaucggcaacggcugcuucgaguucuaccacaagugcgacaacaccugcauggagagcgugaagaacggcaccuacgacuaccccaaguacagcgaggaggccaagcugaacagagaggagaucgacggcgugaagcuggagagcaccagaaucuaccagauccuggccaucuacagcaccguggccagcagccuggugcugguggugagccugggcgccaucagcuucuggaugugcagcaacggcagccugcagugcagaaucugcaucuga

SEQ ID NO: 166986 - RNA, 1701 nt, Artificial Sequence; identical to SEQ ID NO: 163893
  derived and/or modified CDS sequence (opt4) from hemagglutinin__InfluenzaA__AEJ37873

SEQ ID NO: 166987 - RNA, 1701 nt, Artificial Sequence; identical to SEQ ID NO: 166941
  derived and/or modified CDS sequence (opt4) from hemagglutinin__InfluenzaA__AEJ37883

SEQ ID NO: 166988 - RNA, 1701 nt, Artificial Sequence
  derived and/or modified CDS sequence (opt4) from hemagglutinin__InfluenzaA__AEJ37893
augaaggccauccugguggugcugcuguacaccuucgccaccaccaacgccgacacccugugcaucggcuaccacgccaacaacagcaccgacaccguggacaccgugcuggagaagaacgugaccgugacccacagcgugaaccugcuggaggacaagcacaacggcaagcugugcaagcugagaggcguggccccccugcaccugggcaagugcaacaucgccggcuggauccugggcaaccccgagugcgagagccugagcaccgccagcagcuggagcuacaucguggagaccagcagcagcgacaacggcaccugcuaccccggcaacuucaucgacuacgaggagcugagagagcagcugagcagcgugagcagcuucgagagauucgagaucuuccccaagaccagcagcuggcccgaccacgacagcaacaagggcgugaccgccgccugcccccacgccggcgccaagagcuucuacaagaaccugaucuggcuggugaagaagggcaacagcuaccccaagcugagcaagagcuacaucaacgacaagggcaaggaggugcuggugcuguggggcauccaccaccccagcaccagcgccgaccagcagagccuguaccagaacgccgacgccuacguguucgugggcaccagcagauacagcaagaaguucaagcccgagaucgccaucagacccaaggugagagaccaggagggcagaaugaacuacuacuggacccugguggagcccggcgacaagaucaccuucgaggccaccggcaaccugguggcccccagauacgccuucgccauggagagaaacgccggcagcggcaucaucaucagcgacaagcccgugcacgacugcaacaccaccugccagacccccaagggcgccaucaacaccagccugcccuuccagaacauccaccccaucaccaucggcaagugccccaaguacgugaagagcaccaagcugagacuggccaccggccugagaaacgugcccagcauccagagcagaggccuguucggcgccaucgccggcuucaucgagggcggcuggaccggcaugguggacggcugguacggcuaccaccaccagaacgagcagggcagcggcuacgccgccgaccugaagagcacccagaacgccaucgacaagaucaccaacaaggugaacagcgugaucgagaagaugaacacccaguucaccgccgugggcaaggaguucaaccaccuggagaagagaaucgagaaccugaacaagaagguggacgacggcuuccuggacaucuggaccuacaacgccgagcugcuggugcugcuggagaacgagagaacccuggacuaccacgacagcaacgugaagaaccuguacgagaaggugagaagccagcugaagaacaacgccaaggagaucggcaacggcugcuucgaguucuaccacaagugcgacaacaccugcauggagagcgugaagaacggcaccuacgacuaccccaaguacagcgaggaggccaagcugaacagagaggagaucgacggcgugaagcuggagagcaccagaaucuaccagauccuggccaucuacagcaccguggccagcagccuggugcugguggugagccugggcgccaucagcuucuggaugugcagcaacggcagccugcagugcagaaucugcaucuga

SEQ ID NO: 166989 - RNA, 1701 nt, Artificial Sequence; identical to SEQ ID NO: 166941
  derived and/or modified CDS sequence (opt4) from hemagglutinin__InfluenzaA__AEJ37903

SEQ ID NO: 166990 - RNA, 1701 nt, Artificial Sequence
  derived and/or modified CDS sequence (opt4) from hemagglutinin__InfluenzaA__AEJ37923
augaaggccauccugguggugcugcuguacaccuucgccaccgccaacgccgacacccugugcaucggcuaccacgccaacaacagcaccgacaccguggacaccgugcuggagaagaacgugaccgugacccacagcgugaaccugcuggaggacaagcacaacggcaagcugugcaagcugagaggcguggccccccugcaccugggcaagugcaacaucgccggcuggauccugggcaaccccgagugcgagagccugagcaccgccagcagcuggagcuacaucguggagaccagcagcagcgacaacggcaccugcuaccccggcaacuucaucgacuacgaggagcugagagagcagcugagcagcgugagcagcuucgagagauucgagaucuuccccaagaccagcagcuggcccgaccacgacagcaacaagggcgugaccgccgccugcccccacgccggcgccaagagcuucuacaagaaccugaucuggcuggugaagaagggcaacagcuaccccaagcugagcaagagcuacaucaacgacaagggcaaggaggugcuggugcuguggggcauccaccaccccagcaccagcgccgaccagcagagccuguaccagaacgccgacgccuacguguucgugggcaccagcagauacagcaagaaguucaagcccgagaucgccaucagacccaaggugagagaccaggagggcagaaugaacuacuacuggacccugguggagcccggcgacaagaucaccuucgaggccaccggcaaccugguggcccccagauacgccuucgccaucgagagaauggccggcagcggcaucaucaucagcgacacccccgugcacgacugcaacaccaccugccagacccccaagggcgccaucaacaccagccugcccuuccagaacauccaccccaucaccaucggcaagugccccaaguacgugaagagcaccaagcugagacuggccaccggccugagaaacgugcccagcauccagagcagaggccuguucggcgccaucgccggcuucaucgagggcggcuggaccggcaugguggacggcugguacggcuaccaccaccagaacgagcagggcagcggcuacgccgccgaccugaagagcacccagaacgccaucgacaagaucaccaacaaggugaacagcgugaucgagaagaugaacacccaguucaccgccgugggcaaggaguucaaccaccuggagaagagaaucgagaaccugaacaagaagguggacgacggcuuccuggacaucuggaccuacaacgccgagcugcuggugcugcuggagaacgagagaacccuggacuaccacgacagcaacgugaagaaccuguacgagaaggugagaagccagcugaagaacaacgccaaggagaucggcaacggcugcuucgaguucuaccacaagugcgacaacaccugcauggagagcgugaagaacggcaccuacgacuaccccaaguacagcgaggaggccaagcugaacagagaggagaucgacggcgugaagcuggagagcaccagaaucuaccagauccuggccaucuacagcaccguggccagcagccuggugcugguggugagccugggcgccaucagcuucuggaugugcagcaacggcagccugcagugcagaaucugcaucuga

SEQ ID NO: 166991 - RNA, 1701 nt, Artificial Sequence
  derived and/or modified CDS sequence (opt4) from hemagglutinin__InfluenzaA__AEJ37943
augaaggccauccugguggugcugcuguacaccuucgccaccgccaacgccgacacccugugcaucggcuaccacgccaacaacagcaccgacaccguggacaccgugcuggagaagaacgugaccgugacccacagcgugaaccugcuggaggacaagcacaacggcaagcugugcaagcugagaggcguggccccccugcaccugggcaagugcaacaucgccggcuggauccugggcaaccccgagugcgagagccugagcaccgccagcagcuggagcuacaucguggagaccagcagcagcgacaacggcaccugcuaccccggcgacuucaucgacuacgaggagcugagagagcagcugagcagcgugagcagcuucgagagauucgagaucuuccccaagaccagcagcuggcccaaccacgacagcaacaagggcgugaccgccgccugcccccacgccggcgccaagagcuucuacaagaaccugaucuggcuggugaagaagggcaacagcuaccccaagcugagcaagagcuacaucaacgacaagggcaaggaggugcuggugcuguggggcauccaccaccccagcaccagcgccgaccagcagagccuguaccagaacgccgacgccuacguguucgugggcaccagcagauacagcaagaaguucaagcccgagaucgccaucagacccaaggugagagaccaggagggcagaaugaacuaccacuggacccugguggagcccggcgacaagaucaccuucgaggccaccggcaaccugguggugcccagauacgccuucgccauggagagaaacgccggcagcggcaucaucaucagcgacacccccgugcacgacugcaacaccaccugccagacccccaagggcgccaucaacaccagccugcccuuccagaacauccaccccaucaccaucggcaagugccccaaguacgugaagagcaccaagcugagacuggccaccggccugagaaacgugcccagcauccagagcagaggccuguucggcgccaucgccggcuucaucgagggcggcuggaccggcaugguggacggcugguacggcuaccaccaccagaacgagcagggcagcggcuacgccgccgaccugaagagcacccagaacgccaucgacaagaucaccaacaaggugaacagcgugaucgagaagaugaacacccaguucaccgccgugggcaaggaguucaaccaccuggagaagagaaucgagaaccugaacaagaagguggacgacggcuuccuggacaucuggaccuacaacgccgagcugcuggugcugcuggagaacgagagaacccuggacuaccacgacagcaacgugaagaaccuguacgagaaggugagaagccagcugaagaacaacgccaaggagaucggcaacggcugcuucgaguucuaccacaagugcgacaacaccugcauggagagcgugaagaacggcaccuacgacuaccccaaguacagcgaggaggccaagcugaacagagaggagaucgacggcgugaagcuggagagcaccagaaucuaccagauccuggccaucuacagcaccguggccagcagccuggugcugguggugagccugggcgccaucagcuucuggaugugcagcaacggcagccugcagugcagaaucugcaucuga

SEQ ID NO: 166992 - RNA, 1701 nt, Artificial Sequence; identical to SEQ ID NO: 166941
  derived and/or modified CDS sequence (opt4) from hemagglutinin__InfluenzaA__AEJ37953

SEQ ID NO: 166993 - RNA, 1701 nt, Artificial Sequence
  derived and/or modified CDS sequence (opt4) from hemagglutinin__InfluenzaA__AEJ37963
augaaggccauccugguggugcugcuguacaccuucgccaccgccaacgccgacacccugugcaucggcuaccacgccaacaacagcaccgacaccguggacaccgugcuggagaagaacgugaccgugacccacagcgugaaccugcuggaggacaagcacaacggcaagcugugcaagcugagaggcguggccccccugcaccugggcaagugcaacaucgccggcuggauccugggcaaccccgagugcgagagccugagcaccgccagcagcuggagcuacaucguggagaccagcagcagcgacaacggcaccugcuaccccggcaacuucaucgacuacgaggagcugagagagcagcugagcagcgugagcagcuucgagagauucgagaucuuccccaagaccagcagcuggcccgaccacgacagcaacaagggcgugaccgccgccugcccccacgccggcgccaagagcuucuacaagaaccugaucuggcuggugaagaagggcaacagcuaccccaagcugagcaagagcuacaucaacgacaagggcaaggaggugcuggugcuguggggcauccaccaccccagcaccagcgccgaccagcagagccuguaccagaacgccgacgccuacguguucgugggcaccagcagauacagcaagaaguucaagcccgagaucgccaucagacccaaggugagagaccaggagggcagaaugaacuacuacuggacccugguggagcccggcgacaagaucaccuucgaggccaccggcaaccugguggcccccagauacgccuucgccauggagagaaacgccggcagcggcaucaucaucagcgacacccccgugcacgacugcaacaccaccugccagacccccaagggcgccaccaacaccagccugcccuuccagaacauccaccccaucaccaucggcaagugccccaaguacgugaagagcaccaagcugagacuggccaccggccugagaaacgugcccagcauccagagcagaggccuguucggcgccaucgccggcuucaucgagggcggcuggaccggcaugguggacggcugguacggcuaccaccaccagaacgagcagggcagcggcuacgccgccgaccugaagagcacccagaacgccaucgacaagaucaccaacaaggugaacagcgugaucgagaagaugaacacccaguucaccgccgugggcaaggaguucaaccaccuggagaagagaaucgagaaccugaacaagaagguggacgacggcuuccuggacaucuggaccuacaacgccgagcugcuggugcugcuggagaacgagagaacccuggacuaccacgacagcaacgugaagaaccuguacgagaaggugagaagccagcugaagaacaacgccaaggagaucggcaacggcugcuucgaguucuaccacaagugcgacaacaccugcauggagagcgugaagaacggcaccuacgacuaccccaaguacagcgaggaggccaagcugaacagagaggagaucgacggcgugaagcuggagagcaccagaaucuaccagauccuggccaucuacagcaccguggccagcagccuggugcugguggugagccugggcgccaucagcuucuggaugugcagcaacggcagccugcagugcagaaucugcaucuga

SEQ ID NO: 166994 - RNA, 1701 nt, Artificial Sequence; identical to SEQ ID NO: 163893
  derived and/or modified CDS sequence (opt4) from hemagglutinin__InfluenzaA__AEJ37973

SEQ ID NO: 166995 - RNA, 1701 nt, Artificial Sequence; identical to SEQ ID NO: 166941
  derived and/or modified CDS sequence (opt4) from hemagglutinin__InfluenzaA__AEJ37983

SEQ ID NO: 166996 - RNA, 1701 nt, Artificial Sequence; identical to SEQ ID NO: 165593
  derived and/or modified CDS sequence (opt4) from hemagglutinin__InfluenzaA__AEK21369

SEQ ID NO: 166997 - RNA, 1698 nt, Artificial Sequence; identical to SEQ ID NO: 163676
  derived and/or modified CDS sequence (opt4) from hemagglutinin__InfluenzaA__AEK21380

SEQ ID NO: 166998 - RNA, 1701 nt, Artificial Sequence
  derived and/or modified CDS sequence (opt4) from hemagglutinin__InfluenzaA__AEK21396
augaaggccauccugguggugcugcuguacaccuucgccaccgccaacgccgacacccugugcaucggcuaccacgccaacaacagcaccgacaccguggacaccgugcuggagaagaacgugaccgugacccacagcguggaccugcuggaggacaagcacaacggcaagcugugcaagcugagaggcguggccccccugcaccugggcaagugcaacaucgccggcuggauccugggcaaccccgagugcgagagccugagcaccgccagcagcuggagcuacaucguggagaccagcagcagcgacaacggcaccugcuaccccggcgacuucaucgacuacgaggagcugagagagcagcugagcagcgugagcagcuucgagagauucgagaucuuccccaagaccagcagcuggcccaaccacgacagcaacaagggcgugaccgccgccugcccccacgccggcgccaagagcuucuacaagaaccugaucuggcuggugaagaagggcaacagcuaccccaagcugagcaagagcuacaucaacgacaagggcaaggaggugcuggugcuguggggcauccaccaccccagcaccagcgccgaccagcagagccuguaccagaacgccgacgccuacguguucgugggcaccagcaaguacagcaagaaguucaagcccgagaucgccaucagacccaaggugagagaccaggagggcagaaugaacuacuacuggacccugguggagcccggcgacaagaucaccuucgaggccaccggcaaccugcuggugcccagauacgccuucgagauggagagaaagagcggcagcggcaucaucaucagcgacacccccgugcacgacugcaacaccaccugccagacccccaagggcgccaucaacaccagccugcccuuccagaacauccaccccaucaccaucggcaagugccccaaguacgugaagagcaccaagcugagacuggccaccggccugagaaacgugcccagcauccagagcagaggccuguucggcgccaucgccggcuucaucgagggcggcuggaccggcaugguggacggcugguacggcuaccaccaccagaacgagcagggcagcggcuacgccgccgaccugaagagcacccagaacgccaucgacgagaucaccaacaaggugaacagcgugaucgagaagaugaacacccaguucaccgccgugggcaaggaguucaaccaccuggagaagagaaucgagaaccugaacaagaagguggacgacggcuuccuggacaucuggaccuacaacgccgagcugcuggugcugcuggagaacgagagaacccuggacuaccacgacagcaacgugaagaaccuguacgagaaggugagaagccagcugaagaacaacgccaaggagaucggcaacggcugcuucgaguucuaccacaagugcgacaacaccugcauggagagcgugaagaacggcaccuacgacuaccccaaguacagcgaggaggccaagcugaacagagagaagaucgacggcgugaagcuggagagcaccagaaucuaccagauccuggccaucuacagcaccguggccagcagccuggugcugguggugagccugggcgccaucagcuucuggaugugcagcaacggcagccugcagugcagaaucugcaucuga

SEQ ID NO: 166999 - RNA, 1701 nt, Artificial Sequence
  derived and/or modified CDS sequence (opt4) from hemagglutinin__InfluenzaA__AEK21406
augaaggccauccugguggugcugcuguacaccuucgccaccgccaacgccgacacccugugcaucggcuaccacgccaacaacagcaccgacaccguggacaccgugcuggagaagaacgugaccgugacccacagcgugaaccugcuggaggacaagcacaacggcaagcugugcaagcugagaggcguggccccccugcaccugggcaagugcaacaucgccggcuggauccugggcaaccccgagugcgagagccugagcaccgccagcagcuggagcuacaucguggagaccagcagcagcgacaacggcaccugcuaccccggcgacuucaucgacuacgaggagcugagagagcagcugagcagcaugagcagcuucgagagauucgagaucuuccccaagaccagcagcuggcccgaccacgacagcaacaagggcgugaccgccgccugcccccacgccggcgccaagagcuucuacaagaaccugaucuggcuggugaagaagggcaacagcuaccccaagcugagcaagagcuacaucaacgacaagggcaaggaggugcuggugcuguggggcauccaccaccccagcaccagcgccgaccagcagagccuguaccagaacgccgacgccuacguguucgugggcaccagcagauacagcaagaaguucaagcccgagaucgccaucagacccaaggugagagaccaggagggcagaaugaacuacuacuggacccugguggagcccggcgacaagaucaccuucgaggccaccggcaaccugguggugcccagauacgccuucgccauggagagaaacgccggcagcggcaucaucaucagcgacacccccgugcacgacugcaacaccaccugccagacccccaagggcgccaucaacaccagccugcccuuccagaacauccaccccaucaccaucggcaagugccccaaguacgugaagagcaccaagcugagacuggccaccggccugagaaacgugcccagcauccagagcagaggccuguucggcgccaucgccggcuucaucgagggcggcuggaccggcaugguggacggcugguacggcuaccaccaccagaacgagcagggcagcggcuacgccgccgaccugaagagcacccagaacgccaucgacaagaucaccaacaaggugaacagcgugaucgagaagaugaacacccaguucaccgccgugggcaaggaguucaaccaccuggagaagagaaucgagaaccugaacaagaagguggacgacggcuuccuggacaucuggaccuacaacgccgagcugcuggugcugcuggagaacgagagaacccuggacuaccacgacagcaacgugaagaaccuguacgagaaggugagaagccagcugaagaacaacgccaaggagaucggcaacggcugcuucgaguucuaccacaagugcgacaacaccugcauggagagcgugaagaacggcaccuacgacuaccccaaguacagcgaggaggccaagcugaacagagaggagaucgacggcgugaagcuggagagcaccagaaucuaccagauccuggccaucuacagcaccguggccagcagccuggugcugguggugagccugggcgccaucagcuucuggaugugcagcaacggcagccugcagugcagaaucugcaucuga

SEQ ID NO: 167000 - RNA, 1701 nt, Artificial Sequence
  derived and/or modified CDS sequence (opt4) from hemagglutinin__InfluenzaA__AEK21416
augaaggccauccugguggugcugcuguacaccuucgccaccgccaacgccgacacccugugcaucggcuaccacgccaacaacagcaccgacaccguggacaccgugcuggagaagaacgugaccgugacccacagcgugaaccugcuggaggacaagcacaacggcaagcugugcaagcugagaggcguggccccccugcaccugggcaagugcaacaucgccggcuggauccugggcaaccccgagugcgagagccugagcaccgccagcagcuggagcuacaucguggagaccagcagcagcgacaacggcaccugcuaccccggcguguucaucgacuacgaggagcugagagagcagcugagcagcgugagcagcuucgagagauucgagaucuuccccaagaccagcagcuggcccaaccacgacagcaacaagggcgugaccgccgccugcccccacgccggcgccaagagcuucuacaagaaccugaucuggcuggugaagaagggcaacagcuaccccaagcugagcaagagcuacaucaacgacaagggcaaggaggugcuggugcuguggggcauccaccaccccagcaccaccgccgaccagcagagccuguaccagaacgccgacgccuacguguucgugggcaccagcagauacagcaagaaguucaagcccgagaucgccgugagacccaaggugagagaccaggagggcagaaugaacuacuacuggacccugguggagcccggcgacaagaucaccuucgaggccaccggcaaccugguggugcccagauacgccuucgccauggagagaaacgccggcagcggcaucaucaucagcgacacccccgugcacgacugcaacaccaccugccagacccccaagggcgccaucaacaccagccugcccuuccagaacauccaccccaucaccaucggcaagugccccaaguacgugaagagcaccaagcugagacuggccaccggccugagaaacgugcccagcauccagagcagaggccuguucggcgccaucgccggcuucaucgagggcggcuggaccggcaugguggacggcugguacggcuaccaccaccagaacgagcagggcagcggcuacgccgccgaccugaagagcacccagaacgccaucgacaagaucaccaacaaggugaacagcgugaucgagaagaugaacacccaguucaccgccgugggcaaggaguucaaccaccuggagaagagaaucgagaaccugaacaagaagguggacgacggcuuccuggacaucuggaccuacaacgccgagcugcuggugcugcuggagaacgagagaacccuggacuaccacgacagcaacgugaagaaccuguacgagaaggugagaaaccagcugaagaacaacgccaaggagaucggcaacggcugcuucgaguucuaccacaagugcgacaacaccugcauggagagcgugaagaacggcaccuacgacuaccccaaguacagcgaggaggccaagcugaacagagaggagaucgacggcgugaagcuggagagcaccagaaucuaccagauccuggccaucuacagcaccguggccagcagccuggugcugguggugagccugggcgccaucagcuucuggaugugcagcaacggcagccugcagugcagaaucugcaucuga

SEQ ID NO: 167001 - RNA, 1701 nt, Artificial Sequence
  derived and/or modified CDS sequence (opt4) from hemagglutinin__InfluenzaA__AEK21426
augaaggccauccugguggugcugcuguacaccuucgccaccgccaacgccgacacccugugcaucggcuaccacgccaacaacagcaccgacaccguggacaccgugcuggagaagaacgugaccgugacccacagcgugaaccugcuggaggacaagcacaacggcaagcugugcaagcugagaggcguggccccccugcaccugggcaagugcaacaucgccggcuggauccugggcaaccccgagugcgagagccugagcaccgccagcagcuggagcuacaucguggagaccagcagcagcgacaacggcaccugcuaccccggcaacuucaucgacuacgaggagcugagagagcagcugagcagcgugagcagcuucgagagauucgagaucuuccccaagaccagcagcuggcccgaccacgacagcaacaagggcgugaccgccgccugcccccacgccggcgccaagagcuucuacaagaaccugaucuggcuggugaagaagggcaacagcuaccccaagcugagcaagagcuacaucaacgacaagggcaaggaggugcuggugcuguggggcauccaccaccccagcaccagcgccgaccagcagagccuguaccagaacgccgacgccuacguguucgugggcaccagcagauacagcaagaaguucaagcccgagaucgccaucagacccaaggugagagaccaggagggcagaaugaacuacuacuggacccugguggagcccggcgacaagaucaccuucgaggccaccggcaaccugguggcccccagauacgccuucgccauggagagaaacgccggcagcggcaucaucaucagcgacacccccgugcacgacugcaacaccaccugccagacccccaagggcgccaucaacaccagccugcccuuccagaacauccaccccaucaccaucggcaagugccccaaguacgugagaagcaccaagcugagacuggccaccggccugagaaacgugcccagcauccagagcagaggccuguucggcgccaucgccggcuucaucgagggcggcuggaccggcaugguggacggcugguacggcuaccaccaccagaacgagcagggcagcggcuacgccgccgaccugaagagcacccagaacgccaucgacaagaucaccaacaaggugaacagcgugaucgagaagaugaacacccaguucaccgccgugggcaaggaguucaaccaccuggagaagagaaucgagaaccugaacaagaagguggacgacggcuuccuggacaucuggaccuacaacgccgagcugcuggugcugcuggagaacgagagaacccuggacuaccacgacagcaacgugaagaaccuguacgagaaggugagaagccagcugaagaacaacgccaaggagaucggcaacggcugcuucgaguucuaccacaagugcgacaacaccugcauggagagcgugaagaacggcaccuacgacuaccccaaguacagcgaggaggccaagcugaacagagaggagaucgacggcgugaagcuggagagcaccagaaucuaccagauccuggccaucuacagcaccguggccagcagccuggugcugguggugagccugggcgccaucagcuucuggaugugcagcaacggcagccugcagugcagaaucugcaucuga

SEQ ID NO: 167002 - RNA, 1701 nt, Artificial Sequence; identical to SEQ ID NO: 163893
  derived and/or modified CDS sequence (opt4) from hemagglutinin__InfluenzaA__AEK21436

SEQ ID NO: 167003 - RNA, 1701 nt, Artificial Sequence
  derived and/or modified CDS sequence (opt4) from hemagglutinin__InfluenzaA__AEK21456
augaaggccauccugguggugcugcuguacaccuucgccaccgccaacgccgacacccugugcaucggcuaccacgccaacaacagcaccgacaccguggacaccgugcuggagaagaacgugaccgugacccacagcgugaaccugcuggaggacaagcacaacggcaagcugugcaagcugagaggcguggccccccugcaccugggcaagugcaacaucgccggcuggauccugggcaaccccgagugcgagagccugagcaccgccagcagcuggagcuacaucguggagaccagcagcagcgacaacggcaccugcuaccccggcgacuucaucgacuacgaggagcugagagagcagcugagcagcgugagcagcuucgagagauucgagaucuuccccaagaccagcagcuggcccaaccacgacagcaacaagggcgugaccgccgccugcccccacgccggcgccaagagcuucuacaagaaccugaucuggcuggugaagaagggcaacagcuaccccaagcugagcaagagcuacaucaacgacaagggcaaggaggugcuggugcuguggggcauccaccaccccagcaccagcgccgaccagcagagccuguaccagaacgccgacgccuacguguucgugggcaccagcagauacagcaagaaguucaagcccgagaucgccaucagacccaaggugagagaccaggagggcagaaugaacuacuacuggacccugguggagcccggcgacaagaucaccuucgaggccaccggcaaccugguggugcccagauacgccuucgccauggagagaaacgccggcagcggcaucaucaucagcgacacccccgugcacgacugcaacaccaccugccagacccccaagggcgccaucaacaccagccugcccuuccagaacauccaccccaucaccaucggcaagugccccaaguacgugaagagcaccaagcugagacuggccaccggccugagaaacgugcccagcauccagagcagaggccuguucggcgccaucgccggcuucaucgagggcggcuggaccggcaugguggacggcugguacggcuaccaccaccagaacgagcagggcagcggcuacgccgccgaccugaagagcacccagaacgccaucgacaagaucaccaacaaggugaacagcgugaucgagaagaugaacacccaguucaccgccgugggcaaggaguucaaccaccuggagaagagaaucgagaaccugaacaagaagguggacgacggcuuccuggacaucuggaccuacaacgccgagcugcuggugcugcuggagaacgagagaacccuggacuaccacgacagcaacgugaagaaccuguacgagaaggugagaagccagcugaagaacaacgccaaggagaucggcaacggcugcuucgaguucuaccacaagugcgacaacaccugcauggagaacgugaagaacggcaccuacgacuaccccaaguacagcgaggaggccaagcugaacagagaggagaucgacggcgugaagcuggagagcaccagaaucuaccagauccuggccaucuacagcaccguggccagcagccuggugcugguggugagccugggcgccaucagcuucuggaugugcagcaacggcagccugcagugcagaaucugcaucuga

SEQ ID NO: 167004 - RNA, 1701 nt, Artificial Sequence; identical to SEQ ID NO: 166941
  derived and/or modified CDS sequence (opt4) from hemagglutinin__InfluenzaA__AEK21466

SEQ ID NO: 167005 - RNA, 1701 nt, Artificial Sequence; identical to SEQ ID NO: 166941
  derived and/or modified CDS sequence (opt4) from hemagglutinin__InfluenzaA__AEK21476

SEQ ID NO: 167006 - RNA, 1701 nt, Artificial Sequence; identical to SEQ ID NO: 163893
  derived and/or modified CDS sequence (opt4) from hemagglutinin__InfluenzaA__AEK21486

SEQ ID NO: 167007 - RNA, 1701 nt, Artificial Sequence
  derived and/or modified CDS sequence (opt4) from hemagglutinin__InfluenzaA__AEK28774
augaagaccaucaucgcccugagcuacauccugugccugguguucgcccagaagcugcccggcaacgacaacagcaccgccacccugugccugggccaccacgccgugcccaacggcaccaucgugaagaccaucaccaacgaccagaucgaggugaccaacgccaccgagcuggugcagagcagcagcaccggcgagaucugcgacagcccccaccagauccuggacggcaagaacugcacccugaucgacgcccugcugggcgacccccagugcgacggcuuccagaacaagaagugggaccuguucguggagagaagcaaggccuacagcaacugcuaccccuacgacgugcccgacuacgccagccugagaagccugguggccagcagcggcacccuggaguucaacaacgagagcuucaacuggaccggcgugacccagaacggcaccagcagcgccugcaucagaagaagcaagaacagcuucuucagcagacugaacuggcugacccaccugaacuucaaguaccccgcccugaacgugaccaugcccaacaacgagcaguucgacaagcuguacaucuggggcgugcaccaccccggcaccgacaaggaccagaucuuccuguacgcccaggccagcggcagaaucaccgugagcaccaagagaagccagcagaccgccauccccaacaucggcagcagacccagagugagaaacauccccagcagaaucagcaucuacuggaccaucgugaagcccggcgacauccugcugaucaacagcaccggcaaccugaucgcccccagaggcuacuucaagaucagaagcggcaagagcagcaucaugagaagcgacgcccccaucggcaagugcaacagcgagugcaucacccccaacggcagcauccccaacgacaagcccuuccagaacgugaacagaaucaccuacggcgccugccccagauacgugaagcagaacacccugaagcuggccaccggcaugagaaacgugcccgagaagcagaccagaggcaucuucggcgccaucgccggcuucaucgagaacggcugggagggcaugguggacggcugguacggcuucagacaccagaacagcgagggcagaggccaggccgccgaccugaagagcacccaggccgccaucgaccagaucaacggcaagcugaacagacugaucggcaagaccaacgagaaguuccaccagaucgagaaggaguucagcgagguggagggcagaauccaggaccuggagaaguacguggaggacaccaagaucgaccuguggagcuacaacgccgagcugcugguggcccuggagaaccagcacaccauccaccugaccgacagcgagaugaacaagcuguucgagaagaccaagaagcagcugagagagaacgccgaggacaugggcaacggcugcuucaagaucuaccacaagugcgacaacgccugcaucggcagcaucagaaacggcaccuacgaccacgacguguacagagacgaggcccugaacaacagauuccagaucaagggcguggagcugaagagcggcuacaaggacuggauccuguggaucagcuucgccaucagcugcuuccugcugugcguggcccugcugggcuucaucaugugggccugccagaagggcaacaucagaugcaacaucugcaucuga

SEQ ID NO: 167008 - RNA, 1701 nt, Artificial Sequence
  derived and/or modified CDS sequence (opt4) from hemagglutinin__InfluenzaA__AEK28785
augaagaccaucaucgcccugagcuacauccugugccugguguucgcccagaaccugcccggcaacgacaacagcgccgccacccugugccugggccaccacgccgugcccaacggcaccaucgugaagaccaucaccaacgaccagguggaggugaccaacgccaccgagcuggugcagaacagcagcaccggcgagaucugcgacagcccccaccagauccuggacggcgagaacugcacccugaucgacgcccugcugggcgacccccagugcgacggcuuccagaacaagaagugggaccuguucguggagagaagcaaggccuacagcaacugcuaccccuacgacgugcccgacuacgccagccugagaagccugguggccagcagcggcacccuggaguucaacaacgagagcuucaacuggaccggcgugacccagaacggcaccagcagcgccugcaucagaagaagcaacaacagcuucuucagcagacugaacuggcugacccaccugaacuucaaguaccccgcccugaacgugaccaugcccaacaacgagcaguucgacaagcuguacaucuggggcgugcaccaccccggcaccgacaaggaccagaucuuccuguacgcccaggccagcggcagaaucaccgugagcaccaagagaagccagcaggccgugauccccaacaucggcagcagacccagagugagaaacauccccagcagaaucagcaucuacuggaccaucgugaagcccggcgacauccugcugaucaacagcaccggcaaccugaucgcccccagaggcuacuucaagaucagaagcggcaagagcagcaucaugagaagcgacgcccccaucggcaagugcaacagcgagugcaucacccccaacggcagcauccccaacgacaagcccuuccagaacgugaacagaaucaccuacggcgccugccccagauacgugaagcagaacacccugaagcuggccaccggcaugagaaacgugcccgagaagcagaccagaggcaucuucggcgccaucgccggcuucaucgagaacggcugggagggcaugguggacggcugguacggcuucagacaccagaacagcgagggcagaggccaggccgccgaccugaagagcacccaggccgccaucgaccagaucaacggcaagcugaacagacugaucggcaagaccaacgagaaguuccaccagaucgagaaggaguucagcgagguggagggcagaauccaggaccuggagaaguacguggaggacaccaagaucgaccuguggagcuacaacgccgagcugcugguggcccuggagaaccagcacaccauccaccugaccgacagcgagaugaacaagcuguucgagaagaccaagaagcagcugagagagaacgccgaggacaugggcaacggcugcuucaagaucuaccacaagugcgacaacgccugcaucggcagcaucagaaacggcaccuacgaccacgacguguacagagacgaggcccugaacaacagauuccagaucaagggcguggagcugaagagcggcuacaaggacuggauccuguggaucagcuucgccaucagcugcuuccugcugugcguggcccugcugggcuucaucaugugggccugccagaagggcaacaucagaugcaacaucugcaucuga

SEQ ID NO: 167009 - RNA, 1701 nt, Artificial Sequence
  derived and/or modified CDS sequence (opt4) from hemagglutinin__InfluenzaA__AEK28796
augaagaccaucaucgcccugagcuacauccugugccugguguucgcccagaagcugcccggcaacgacaacagcaccgccacccugugccugggccaccacgccgugcccaacggcaccaucgugaagaccaucaccaacgacaagaucgaggugaccaacgccaccgagcuggugcagagcagcagcaccggcgagaucugcgacagcccccaccagauccuggacggcaagaacugcacccugaucgacgcccugcugggcgacccccagugcgacggcuuccagaacaagaagugggaccuguucguggagagaagcaaggccuacagcaacugcuaccccuacgacgugcccgacuacgccagccugagaagccugguggccagcagcggcacccuggaguucaacaacgagagcuucaacuggaccggcgugacccaggacggcaccagcagcgccugcaucagaggcagcaagaacagcuucuucagcagacugaacuggcugacccaccugaacuucaaguaccccgcccugaacgugaccaugcccaacaacgagcaguucgacaagcuguacaucuggggcgugcaccaccccggcaccgacaaggaccagaucuuccuguacgcccaggccagcggcagaaucaccgugagcaccaagagaagccagcaggccgccauccccaacaucggcagcagacccagagugagaaacauccccagcagaaucagcaucuacuggaccaucgugaagcccggcgacauccugcugaucaacagcaccggcaaccugaucgcccccagaggcuacuucaagaucagaagcggcaagagcagcaucaugagaagcgacgcccccaucggcaagugcaacagcgagugcaucacccccaacggcagcauccccaacgacaagcccuuccagaacgugaacagaaucaccuacggcgccugccccagauacgugaagcagaacacccugaagcuggccaccggcaugagaaacgugcccgagaagcagaccagaggcaucuucggcgccaucgccggcuucaucgagaacggcugggagggcaugguggacggcugguacggcuucagacaccagaacagcgagggcagaggccaggccgccgaccugaagagcacccaggccgccaucgaccagaucaacggcaagcugaacagacugaucggcaagaccaacgagaaguuccaccagaucgagaaggaguucagcgagguggagggcagaauccaggaccuggagaaguacguggaggacaccaagaucgaccuguggagcuacaacgccgagcugcugguggcccuggagaaccagcacaccauccaccugaccgacagcgagaugaacaagcuguucgagaagaccaagaagcagcugagagagaacgccgaggacaugggcaacggcugcuucaagaucuaccacaagugcgacaacgccugcaucggcagcaucagaaacggcaccuacgaccacgacguguacagagacgaggcccugaacaacagauuccagaucaagggcguggagcugaagagcggcuacaaggacuggauccuguggaucagcuucgccaucagcugcuuccugcugugcguggcccugcugggcuucaucaugugggccugccagaagggcaacaucagaugcaacaucugcaucuga

SEQ ID NO: 167010 - RNA, 1701 nt, Artificial Sequence
  derived and/or modified CDS sequence (opt4) from hemagglutinin__InfluenzaA__AEK28807
augaagaccaucaucgcccugagcuacauccugugccugguguucgcccagaagcugcccggcaacgacaacagcaccgccacccugugccugggccaccacgccgugcccaacggcaccaucgugaagaccaucaccaacgaccagaucgaggugaccaacgccaccgagcuggugcagagcagcagcaccggcgagaucugcgacagcccccaccagauccuggacggcgagaacugcacccugaucgacgcccugcugggcgacccccagugcgacggcuuccagaacaagaagugggaccuguucguggagagaagcaaggccuacggcaacugcuaccccuacgacgugcccgacuacgccagccugagaagccugguggccagcagcggcacccuggaguucaacaacgagagcuucaacuggaccggcgugacccagaacggcaccagcagcgccugcaucagaaagagcaacaacagcuucuucagcagacugaacuggcugacccaccugaaguucaaguaccccgcccugaacgugaccaugcccaacaacgagcaguucgacaagcuguacaucuggggcgugcaccaccccggcaccgacaacgaccagaucuuccuguacgcccaggccagcggcagaaucaccgugagcaccaagagaagccagcagaccgugauccccaacaucggcagcagacccagagugagaaacauccccagcagaaucagcaucuacuggaccaucgugaagcccggcgacauccugcugaucaacagcaccggcaaccugaucgcccccagaggcuacuucaagaucagaagcggcaagagcagcaucaugagaagcgacgcccccaucggcaagugcaacagcgagugcaucacccccaacggcagcauccccaacgacaagcccuuccagaacgugaacagaaucaccuacggcgccugccccagauacgugaagcagaacacccugaagcuggccaccggcaugagaaacgugcccgagaagcagaccagaggcaucuucggcgccaucgccggcuucaucgagaacggcugggagggcaugguggacggcugguacggcuucagacaccagaacagcgagggcagaggccaggccgccgaccugaagagcacccaggccgccaucgaccagaucaacggcaagcugaacagacugaucggcaagaccaacgagaaguuccaccagaucgagaaggaguucagcgagguggagggcagaauccaggaccuggagaaguacguggaggacaccaagaucgaccuguggagcuacaacgccgagcugcugguggcccuggagaaccagcacaccauccaccugaccgacagcgagaugaacaagcuguucgagaagaccaagaagcagcugagagagaacgccgaggacaugggcaacggcugcuucaagaucuaccacaagugcgacaacgccugcaucggcagcaucagaaacggcaccuacgaccacgacguguacagagacgaggcccugaacaacagauuccagaucaagggcguggagcugaagagcggcuacaaggacuggauccuguggaucagcuucgccaucagcugcuuccugcugugcguggcccugcugggcuucaucaugugggccugccagaagggcaacaucagaugcaacaucugcaucuga

SEQ ID NO: 167011 - RNA, 1701 nt, Artificial Sequence
  derived and/or modified CDS sequence (opt4) from hemagglutinin__InfluenzaA__AEK28818
augaagaccaucaucgcccugagcuacauccugugccugguguucgcccagaagcugcccggcaacgacaacagcaccgccacccugugccugggccaccacgccgugcccaacggcaccaucgugaagaccaucaccaacgaccagaucgaggugaccaacgccaccgagcuggugcagagcagcagcaccggcgagaucugcgacagcccccaccagauccuggacggcaagaacugcacccugaucgacgcccugcugggcgacccccagugcgacggcuuccagaacaagaagugggaccuguucguggagagaagcaaggccuacagcaacugcuaccccuacgacgugcccgacuacgccagccugagaagccugguggccagcagcggcacccuggaguucaacaacgagagcuucaacuggaccggcgugacccagaacggcaccagcagcgccugcaucagaagaagcaagaacagcuucuucagcagacugaacuggcugacccaccugaacuucaaguaccccgcccugaacgugaccaugcccaacaacgagcaguucgacaagcuguacaucuggggcgugcaccaccccggcaccgacaaggaccagaucuuccuguacgcccaggccagcggcagaaucaccgugagcaccaagagaagccagcagaccgugauccccaacaucggcagcagacccagagugagaaacauccccagcagaaucagcaucuacuggaccaucgugaagcccggcgacauccugcugaucaacaacaccggcaaccugaucgcccccagaggcuacuucaagaucagaagcggcaagagcagcaucaugagaagcgacgcccccaucggcaagugcaacagcgagugcaucacccccaacggcagcauccccaacgacaagcccuuccagaacgugaacagaaucaccuacggcgccugccccagauacgugaagcagaacacccugaagcuggccaccggcaugagaaacgugcccgagaagcagaccagaggcaucuucggcgccaucgccggcuucaucgagaacggcugggagggcaugguggacggcugguacggcuucagacaccagaacagcgagggcagaggccaggccgccgaccugaagagcacccaggccgccaucgaccagaucaacggcaagcugaacagacugaucggcaagaccaacgagaaguuccaccagaucgagaaggaguucagcgagguggagggcagaauccaggaccuggagaaguacguggaggacaccaagaucgaccuguggagcuacaacgccgagcugcugguggcccuggagaaccagcacaccauccaccugaccgacagcgagaugaacaagcuguucgagaagaccaagaagcagcugagagagaacgccgaggacaugggcaacggcugcuucaagaucuaccacaagugcgacaacgccugcaucggcagcaucagaaacggcaccuacgaccacgacguguacagagacgaggcccugaacaacagauuccagaucaagggcguggagcugaagagcggcuacaaggacuggauccuguggaucagcuucgccaucagcugcuuccugcugugcguggcccugcugggcuucaucaugugggccugccagaagggcaacaucagaugcaacaucugcaucuga

SEQ ID NO: 167012 - RNA, 1701 nt, Artificial Sequence
  derived and/or modified CDS sequence (opt4) from hemagglutinin__InfluenzaA__AEK28828
augaagaccaucaucgcccugagcuacauccugugccugguguucgcccagaagcugcccggcaacgacaacagcaccgccacccugugccugggccaccacgccgugcccaacggcaccaucgugaagaccaucaccaacgaccagaucgaggugaccaacgccaccgagcuggugcagagcagcagcaccggcgagaucugcgacagcccccaccagauccuggacggcaagaacugcacccugaucgacgcccugcugggcgacccccagugcgacggcuuccagaacaagaagugggaccuguucguggagagaagcaaggccuacagcaacugcuaccccuacgacgugcccgacuacgccagccugagaagccugguggccagcagcggcacccuggaguucaacaacgagagcuucaacuggaccggcgugacccagaacggcaccagcagcgccugcaucagaagaagcaagaacagcuucuucagcagacugaacuggcugacccaccugaacuucaaguaccccgcccugaacgugaccaugcccaacaacgagcaguucgacaagcuguacaucuggggcgugcaccaccccggcaccgacaaggaccagaucuuccuguacgcccaggccagcggcagaaucaccgugagcaccaagagaagccagcagaccgugauccccaacaucggcagcagacccagagugagagacauccccagcagaaucagcaucuacuggaccaucgugaagcccggcgacauccugcugaucaacagcaccggcaaccugaucgcccccagaggcuacuucaagaucagaagcggcaagagcagcaucaugagaagcgacgcccccaucggcaagugcaacagcgagugcaucacccccaacggcagcauccccaacgacaagcccuuccagaacgugaacagaaucaccuacggcgccugccccagauacgugaagcagaacacccugaagcuggccaccggcaugagaaacgugcccgagaagcagaccagaggcaucuucggcgccaucgccggcuucaucgagaacggcugggagggcaugguggacggcugguacggcuucagacaccagaacagcgagggcagaggccaggccgccgaccugaagagcacccaggccgccaucgaccagaucaacggcaagcugaacagacugaucggcaagaccaacgagaaguuccaccagaucgagaaggaguucagcgagguggagggcagaauccaggaccuggagaaguacguggaggacaccaagaucgaccuguggagcuacaacgccgagcugcugguggcccuggagaaccagcacaccauccaccugaccgacagcgagaugaacaagcuguucgagaagaccaagaagcagcugagagagaacgccgaggacaugggcaacggcugcuucaagaucuaccacaagugcgacaacgccugcaucggcagcaucagaaacggcaccuacgaccacgacguguacagagacgaggcccugaacaacagauuccagaucaagggcguggagcugaagagcggcuacaaggacuggauccuguggaucagcuucgccaucagcugcuuccugcugugcguggcccugcugggcuucaucaugugggugugccagaagggcaacaucagaugcaacaucugcaucuga

SEQ ID NO: 167013 - RNA, 1701 nt, Artificial Sequence; identical to SEQ ID NO: 162494
  derived and/or modified CDS sequence (opt4) from hemagglutinin__InfluenzaA__AEK28839

SEQ ID NO: 167014 - RNA, 1701 nt, Artificial Sequence
  derived and/or modified CDS sequence (opt4) from hemagglutinin__InfluenzaA__AEK28850
augaagaccaucaucgcccugagcuacauccugugccugguguucgcccagaagcugcccggcaacgacaacagcaccgccacccugugccugggccaccacgccgugcccaacggcaccaucgugaagaccaucaccaacgaccagaucgaggugaccaacgccaccgagcuggugcagagcagcagcaccggcgagaucugcgacagcccccaccagauccuggacggcgagaacugcacccugaucgacgcccugcugggcgacccccagugcgacggcuuccagaacaagaagugggaccuguucguggagagaagcaaggccuacagcaacugcuaccccuacgacgugcccgacuacgccagccugagaagccugguggccagcagcggcacccuggaguucaacaacgagagcuucaacuggaccggcgugacccagaacggcaccagcagcgccugcaucagaagaagcaacaacagcuucuucagcagacugaacuggcugacccaccugaaguucaaguaccccgcccugaacgugaccaugcccaacaacgagcaguucgacaagcuguacaucuggggcgugcaccaccccggcaccgacaacgaccagaucuuccuguacgcccaggccagcggcagaaucaccgugagcaccaagagaagccagcagaccgugauccccaacaucggcagcagacugagagugagaaacauccccagcagaaucagcaucuacuggaccaucgugaagcccggcgacauccugcugaucaacagcaccggcaaccugaucgcccccagaggcuacuucaagaucagaagcggcaagagcagcaucaugagaagcgacgcccccaucggcaagugcaacagcgagugcaucacccccaacggcagcauccccaacgacaagcccuuccagaacgugaacagaaucaccuacggcgccugccccagauacgugaagcagaacacccugaagcuggccaccggcaugagaaacgugcccgagaagcagaccagaggcaucuucggcgccaucgccggcuucaucgagaacggcugggagggcaugguggacggcugguacggcuucagacaccagaacagcgagggcagaggccaggccgccgaccugaagagcacccaggccgccaucgaccagaucaacggcaagcugaacagacugaucggcaagaccaacgagaaguuccaccagaucgagaaggaguucagcgagguggagggcagaauccaggaccuggagaaguacguggaggacaccaagaucgaccuguggagcuacaacgccgagcugcugguggcccuggagaaccagcacaccaucgaccugaccgacagcgagaugaacaagcuguucgagaagaccaagaagcagcugagagagaacgccgaggacaugggcaacggcugcuucaagaucuaccacaagugcgacaacgccugcaucggcagcaucagaaacggcaccuacgaccacgacguguacagagacgaggcccugaacaacagauuccagaucaagggcguggagcugaagagcggcuacaaggacuggauccuguggaucagcuucgccaucagcugcuuccugcugugcguggcccugcugggcuucaucaugugggccugccagaagggcaacaucagaugcaacaucugcaucuga

SEQ ID NO: 167015 - RNA, 1701 nt, Artificial Sequence
  derived and/or modified CDS sequence (opt4) from hemagglutinin__InfluenzaA__AEK28861
augaagaccaucaucgcccugagcuacauccugugccugguguucgcccagaagcugcccggcaacgacaacagcaccgccacccugugccugggccaccacgccgugcccaacggcaccaucgugaagaccaucaccaacgaccagaucgaggugaccaacgccaccgagcuggugcagagcagcagcaccggcgagaucugcgacagcccccaccagauccuggacggcgagaacugcacccugaucgacgcccugcugggcgacccccagugcgacggcuuccagaacaagaagugggaccuguucguggagagaagcaaggccuacagcaacugcuaccccuacgacgugcccgacuacgccagccugagaagccugguggccagcagcggcacccuggaguucaacaacgagagcuucaacuggaccggcgugacccagaacggcaccagcagcgccugcaucagaagaagcaacaacagcuucuucagcagacugaacuggcugacccaccugaaguucaaguaccccgcccugaacgugaccaugcccaacaacgagcaguucgacaagcuguacaucuggggcgugcaccaccccggcaccgacaacgaccagaucuuccuguacgcccaggccagcggcagaaucaccgugagcaccaagagaagccagcagaccgugauccccaacaucggcagcagacccagagugagaaacauccccagcagaaucagcaucuacuggaccaucgugaagcccggcgacauccugcugaucaacagcaccggcaaccugaucgcccccagaggcuacuucaagaucagaagcggcaagagcagcaucaugagaagcgacgcccccaucggcaagugcaacagcgagugcaucacccccaacggcagcauccccaacgacaagcccuuccagaacgugaacagaaucaccuacggcgccugccccagauacgugaagcagaacacccugaagcuggccaccggcaugagaaacgugcccgagaagcagaccagaggcaucuucggcgccaucgccggcuucaucgagaacggcugggagggcaugguggacggcugguacggcuucagacaccagaacagcgagggcagaggccaggccgccgaccugaagagcacccaggccgccaucgaccagaucaacggcaagcugaacagacugaucggcaagaccaacgagaaguuccaccagaucgagaaggaguucagcgagguggagggcagaauccaggaccuggagaaguacguggaggacaccaagaucgaccuguggagcuacaacgccgagcugcugguggcccuggagaaccagcacaccaucgaccugaccgacagcgagaugaacaagcuguucgagaagaccaagaagcagcugaaggagaacgccgaggacaugggcaacggcugcuucaagaucuaccacaagugcgacaacgccugcaucggcagcaucagaaacggcaccuacgaccacgacguguacagagacgaggcccugaacaacagauuccacaucaagggcguggagcugaagagcggcuacaaggacuggauccuguggaucagcuucgccaccagcugcuuccugcugugcguggcccugcugggcuucaucaugugggccugccagaagggcaacaucagaugcaacaucugcaucuga

SEQ ID NO: 167016 - RNA, 1701 nt, Artificial Sequence
  derived and/or modified CDS sequence (opt4) from hemagglutinin__InfluenzaA__AEK28872
augaagaccaucaucgcccugagcuacauccugugccugguguucgcccagaagcugcccggcaacgacaacagcaccgccacccugugccugggccaccacgccgugcccaacggcaccaucgugaagaccaucaccaacgaccagaucgaggugaccaacgccaccgagcuggugcagagcagcagcaccggcgagaucugcgacagcccccaccagauccuggacggcgagaacugcacccugaucgacgcccugcugggcgacccccagugcgacggcuuccagaacaagaagugggaccuguucguggagagaagcaaggccuacagcaacugcuaccccuacgacgugcccgacuacgccagccugagaagccugguggccagcagcggcacccuggaguucaacaacgagagcuucaacuggaccggcgugacccagaacggcaccagcagcgccugcaucagaagaagcaacaacagcuucuucagcagacugaacuggcugacccaccugaaguucaaguaccccgcccugaacgugaccaugcccaacaacgagcaguucgacaagcuguacaucuggggcgugcaccaccccggcaccgacaacgaccagaucuuccuguacgcccaggccagcggcagaaucaccgugagcaccaagagaagccagcagaccgugauccccaacaucggcagcagacccagagugagagacauccccagcagaaucagcaucuacuggaccaucgugaagcccggcgacauccugcugaucaacagcaccggcaaccugaucgcccccagaggcuacuucaagaucagaagcggcaagagcagcaucaugagaagcgacgcccccaucggcaagugcaacagcgagugcaucacccccaacggcagcauccccaacgacaagcccuuccagaacgugaacagaaucaccuacggcgccugccccagauacgugaagcagaacacccugaagcuggccaccggcaugagaaacgugcccgagaagcagaccagaggcaucuucggcgccaucgccggcuucaucgagaacggcugggagggcaugguggacggcugguacggcuucagacaccagaacagcgagggcagaggccaggccgccgaccugaagagcacccaggccgccaucgaccagaucaacggcaagcugaacagacugaucggcaagaccaacgagaaguuccaccagaucgagaaggaguucagcgagguggagggcagaauccaggaccuggagaaguacguggaggacaccaagaucgaccuguggagcuacaacgccgagcugcugguggcccuggagaaccagcacaccauccaccugaccgacagcgagaugaacaagcuguucgagaagaccaagaagcagcugagagagaacgccgaggacaugggcaacggcugcuucaagaucuaccacaagugcgacaacgccugcaucggcagcaucagaaacggcaccuacgaccacgacguguacagagacgaggcccugaacaacagauuccagaucaagggcguggagcugaagagcggcuacaaggacuggauccuguggaucagcuucgccaucagcugcuuccugcugugcguggcccugcugggcuucaucaugugggccugccagaagggcaacaucagaugcaacaucugcaucuga

SEQ ID NO: 167017 - RNA, 1701 nt, Artificial Sequence
  derived and/or modified CDS sequence (opt4) from hemagglutinin__InfluenzaA__AEK28883
augaagaccaucaucgcccugagcuacauccugugccugguguucgcccagaagcugcccggcaacgacaacagcaccgccacccugugccugggccaccacgccgugcccaacggcaccaucgugaagaccaucaccaacgaccagaucgaggugaccaacgccaccgagcuggugcagagcagcagcaccggcgagaucugcgacagcccccaccagauccuggacggcgagaacugcacccugaucgacgcccugcugggcgacccccagugcgacggcuuccagaacaagaagugggaccuguucguggagagaagcaaggccuacagcaacugcuaccccuacgacgugcccgacuacgccagccugagaagccugaucgccagcagcggcacccuggaguucaacaacgagagcuucaacuggaccggcgugacccagaacggcaccagcagcgccugcaucagaagaagcagcaacagcuucuucagcagacugaacuggcugacccaccugaaguucaaguaccccgcccugaacgugaccaugcccaacaacgagcaguucgacaagcuguacaucuggggcgugcaccaccccggcaccgacaacgaccagaucuuccuguacgcccaggccagcggcagaaucaccgugagcaccaagagaagccagcagaccgugauccccaacaucggcagcagacccagagugagaaacauccccagcagaaucagcaucuacuggaccaucgugaagcccggcgacauccugcugaucaacagcaccggcaaccugaucgcccccagaggcuacuucaagaucagaagcggcaagagcagcaucaugagaagcgacgcccccaucggcaagugcaacagcgagugcaucacccccaacggcagcauccccaacgacaagcccuuccagaacgugaacagaaucaccuacggcgccugccccagauacgugaagcagaacacccugaagcuggccaccggcaugagaaacgugcccgagaagcagaccagaggcaucuucggcgccaucgccggcuucaucgagaacggcugggagggcaugguggacggcugguacggcuucagacaccagaacagcgagggcagaggccaggccgccgaccugaagagcacccaggccgccaucgaccagaucaacggcaagcugaacagacugaucggcaagaccaacgagaaguuccaccagaucgagaaggaguucagcgagguggagggcagaauccaggaccuggagaaguacguggaggacaccaagaucgaccuguggagcuacaacgccgagcugcugguggcccuggagaaccagcacaccauccaccugaccgacagcgagaugaacaagcuguucgagaagaccaagaagcagcugagagagaacgccgaggacaugggcaacggcugcuucaagaucuaccacaagugcgacaacgccugcaucggcagcaucagaaacggcaccuacgaccacgacguguacagagacgaggcccugaacaacagauuccagaucaagggcguggagcugaagagcggcuacaaggacuggauccuguggaucagcuucgccaucagcugcuuccugcugugcguggcccugcugggcuucaucaugugggccugccagaagggcaacaucagaugcaacaucugcaucuga

SEQ ID NO: 167018 - RNA, 1701 nt, Artificial Sequence
  derived and/or modified CDS sequence (opt4) from hemagglutinin__InfluenzaA__AEK28894
augaagaccaucaucgcccugagcuacauccugugccugguguucgcccagaagcugcccggcaacgacaacagcaccgccacccugugccugggccaccacgccgugcccaacggcaccaucgugaagaccaucaccaacgaccagaucgaggugaccaacgccaccgagcuggugcagagcagcagcaccggcgagaucugcgacagcccccaccagauccuggacggcgagaacugcacccugaucgacgcccugcugggcgacccccagugcgacggcuuccagaacaagaagugggaccuguucguggagagaagcaaggccuacagcaacugcuaccccuacgacgugcccgacuacgccagccugagaagccugguggccagcagcggcacccuggaguucaacaacgagagcuucaacuggaccggcgugacccagaacggcaccagcagcgccugcaucagaagaagcaacaacagcuucuucagcagacugaacuggcugacccaccugaaguucaaguaccccgcccugaacgugaccaugcccaacaacgagcaguucgacaagcuguacaucuggggcgugcaccaccccggcaccgacaacgaccagaucuuccuguacgcccaggccagcggcagaaucaccgugagcaccaagagaagccagcagaccgugauccccaacaucggcagcagacccagagugagaaacauccccagcagaaucagcaucuacuggaccaucgugaagcccggcgacauccugcugaucaacagcaccggcaaccugaucgcccccagaggcuacuucaagaucagaagcggcaagagcagcaucaugagaagcgacgcccccaucggcaagugcaacagcgagugcaucacccccaacggcagcauccccaacgacaagcccuuccagaacgugaacagaaucaccuacggcgccugccccagauacgugaagcagaacacccugaagcuggccaccggcaugagaaacgugcccgagaagcagaccagaggcaucuucggcgccaucgccggcuucaucgagaacggcugggagggcaugguggacggcugguacggcuucagacaccagaacagcgagggcagaggccaggccgccgaccugaagagcacccaggccgccaucgaccagaucaacggcaagcugaacagacugaucggcaagaccaacgagaaguuccaccagaucgagaaggaguucagcgagguggagggcagaauccaggaccuggagaaguacguggaggacaccaagaucgaccuguggagcuacaacgccgagcugcugguggcccuggagaaccagcacaccauccaccugaccgacagcgagaugaacaagcuguucgagaagaccaagaagcagcugagagagaacgccgaggacaugggcaacggcugcuucaagaucuaccacaagugcgacaacgccugcaucggcagcaucagaaacggcaccuacgaccacgacguguacagagacgaggcccugaacaacagauuccagaucaagggcguggagcugaagagcggcuacaaggacuggauccuguggaucagcuucgccaucagcugcuuccugcugugcguggcccugcugggcuucaucaugugggccugccagaagggcaacaucagaugcaacaucugcaucuga

SEQ ID NO: 167019 - RNA, 1701 nt, Artificial Sequence
  derived and/or modified CDS sequence (opt4) from hemagglutinin__InfluenzaA__AEK28905
augaagaccaucaucgcccugagcuacauccugugccugguguucgcccagaagcugcccggcaacgacaacagcaccgccacccugugccugggccaccacgccgugcccaacggcaccaucgugaagaccaucaccaacgaccagaucgaggugaccaacgccaccgagcuggugcagagcagcagcaccggcgagaucugcgacagcccccaccagauccuggacggcgagaacugcacccugaucgacgcccugcugggcgacccccagugcgacggcuuccagaacaagaagugggaccuguucguggagagaagcaaggccuacagcaacugcuaccccuacgacgugcccgacuacgccagccugagaagccugguggccagcagcggcacccuggaguucaacaacgagagcuucaacuggaccggcgugacccagaacggcaccagcagcgccugcaucagaagaagcaacaacagcuucuucagcagacugaacuggcugacccaccugagauucaaguaccccgcccugaacgugaccaugcccaacaacgagcaguucgacaagcuguacaucuggggcgugcaccaccccggcaccgacaacgaccagaucuuccccuacgcccaggccagcggcagaaucaccgugagcaccaagagaagccagcagaccgugauccccaacaucggcagcagacccagagugagaaacauccccagcagaaucagcaucuacuggaccaucgugaagcccggcgacauccugcugaucaacagcaccggcaaccugaucgcccccagaggcuacuucaagaucagaagcggcaagagcagcaucaugagaagcgacgcccccaucggcaagugcaacagcgagugcaucacccccaacggcagcauccccaacgacaagcccuuccagaacgugaacagaaucaccuacggcgccugccccagauacgugaagcagaacacccugaagcuggccaccggcaugagaaacgugcccgagaagcagaccagaggcaucuucggcgccaucgccggcuucaucgagaacggcugggagggcaugguggacggcugguacggcuucagacaccagaacagcgagggcagaggccaggccgccgaccugaagagcacccaggccgccaucgaccagaucaacggcaagcugaacagacugaucggcaagaccaacgagaaguuccaccagaucgagaaggaguucagcgagguggagggcagaauccaggaccuggagaaguacguggaggacaccaagaucgaccuguggagcuacaacgccgagcugcugguggcccuggagaaccagcacaccaucgaccugaccgacagcgagaugaacaagcuguucgagaagaccaagaagcagcugagagagaacgccgaggacaugggcaacggcugcuucaagaucuaccacaagugcgacaacgccugcaucggcagcaucagaaacggcaccuacgaccacgacguguacagagacgaggcccugaacaacagauuccagaucaagggcguggagcugaagagcggcuacaaggacuggauccuguggaucagcuucgccaucagcugcuuccugcugugcguggcccugcugggcuucaucaugugggccugccagaagggcaacaucagaugcaacaucugcaucuga

SEQ ID NO: 167020 - RNA, 1701 nt, Artificial Sequence
  derived and/or modified CDS sequence (opt4) from hemagglutinin__InfluenzaA__AEK28916
augaagaccaucaucgcccugagcuacauccugugccugguguucgcccagaagcugcccggcaacgacaacagcaccgccacccugugccugggccaccacgccgugcccaacggcaccaucgugaagaccaucaccaacgaccagaucgaggugaccaacgccaccgagcuggugcagagcagcagcaccggcgagaucugcgacagcccccaccagauccuggacggcgagaacugcacccugaucgacgcccugcugggcgacccccagugcgacggcuuccagaacaagaagugggaccuguucguggagagaagcaaggccuacagcaacugcuaccccuacgacgugcccgacuacgccagccugagaagccugguggccagcagcggcacccuggaguucaacaacgagagcuucaacuggaccggcgugacccagaacggcaccagcagcgccugcaucagaagaagcaacaacagcuucuucagcagacugaacuggcugacccaccugaaguucaaguaccccgcccugaacgugaccaugcccaacaacgagcaguucgacaagcuguacaucuggggcgugcaccaccccggcaccgacaacgaccagaucuuccuguacgcccaggccagcggcagaaucaccgugagcaccaagagaagccagcagaccgugauccccaacaucggcagcagacccagaaucagaaacauccccagcagaaucagcaucuacuggaccaucgugaagcccggcgacauccugcugaucaacagcaccggcaaccugaucgcccccagaggcuacuucaagaucagaagcggcaagagcagcgugaugagaagcgacgcccccaucggcaagugcaacagcgagugcaucacccccaacggcagcauccccaacgacaagcccuuccagaacgugaacagaaucaccuacggcgccugccccagauacgugaagcagaacacccugaagcuggccaccggcaugagaaacgugcccgagaagcagaccagaggcaucuucggcgccaucgccggcuucaucgagaacggcugggagggcaugguggacggcugguacggcuucagacaccagaacagcgagggcagaggccaggccgccgaccugaagagcacccaggccgccaucgaccagaucaacggcaagcugaacagacugaucggcaagaccaacgagaaguuccaccagaucgagaaggaguucagcgagguggagggcagaauccaggaccuggagaaguacguggaggacaccaagaucgaccuguggagcuacaacgccgagcugcugguggcccuggagaaccagcacaccaucgaccugaccgacagcgagaugaacaagcuguucgagaagaccaagaagcagcugagagagaacgccgaggacaugggcaacggcugcuucaagaucuaccacaagugcgacaacgccugcaucggcagcaucagaaacggcaccuacgaccacgacguguacagagacgaggcccugaacaacagauuccagaucaagggcguggagcugaagagcggcuacaaggacuggauccuguggaucagcuucgccaucagcugcuuccugcugugcguggcccugcugggcuucaucaugugggccugccagaagggcaacaucagaugcaacaucugcaucuga

SEQ ID NO: 167021 - RNA, 1701 nt, Artificial Sequence
  derived and/or modified CDS sequence (opt4) from hemagglutinin__InfluenzaA__AEK28927
augaagaccaucaucgcccugagcuacauccugugccugguguucgcccagaagcugcccggcaacgacaacagcaccgccacccugugccugggccaccacgccgugcccaacggcaccaucgugaagaccaucaccaacgaccagaucgaggugaccaacgccaccgagcuggugcagagcagcagcaccggcgagaucugcgacagcccccaccagauccuggacggcgagaacugcacccugaucgacgcccugcugggcgacccccagugcgacggcuuccagaacaagaagugggaccuguucguggagagaagcaaggccuacagcaacugcuaccccuacgacgugcccgacuacgccagccugagaagccugaucgccagcagcggcacccuggaguucaacaacgagagcuucaacuggaccggcgugacccagaacggcaccagcagcgccugcaucagaagaagcaacaacagcuucuucagcagacugaacuggcugacccaccugaaguucaaguaccccgcccugaacgugaccaugcccaacaacgagcaguucgacaagcuguacaucuggggcgugcaccaccccggcaccgacaacgaccagaucuuccuguacgcccaggccagcggcagaaucaccgugagcaccaagagaagccagcagaccgugauccccaacaucggcagcagacccagagugagaaacauccccagcagaaucagcaucuacuggaccaucgugaagcccggcgacauccugcugaucaacagcaccggcaaccugaucgcccccagaggcuacuucaagaucagaagcggcaagagcagcaucaugagaagcgacgcccccaucggcaagugcaacagcgagugcaucacccccaacggcagcauccccaacgacaagcccuuccagaacgugaacagaaucaccuacggcgccugccccagauacgugaagcagaacacccugaagcuggccaccggcaugagaaacgugcccgagaagcagaccagaggcaucuucggcgccaucgccggcuucaucgagaacggcugggagggcaugguggacggcugguacggcuucagacaccagaacagcgagggcagaggccaggccgccgaccugaagagcacccaggccgccaucgaccagaucaacggcaagcugaacagacugaucggcaagaccaacgagaaguuccaccagaucgagaaggaguucagcgagguggagggcagaauccaggaccuggagaaguacguggaggacaccaagaucgaccuguggagcuacaacgccgagcugcugguggcccuggagaaccagcacaccauccaccugaccgacagcgagaugaacaagcuguucgagaagaccaagaagcagcugagagagaacgccgaggacaugggcaacggcugcuucaagaucuaccacaagugcgacaacgccugcaucggcagcaucagaaacggcaccuacgaccacgacguguacagagacgaggcccugaacaacagauuccagaucaagggcguggagcugaagagcggcuacaaggacuggauccuguggaucagcuucgccaucagcugcuuccugcugugcguggcccugcugggcuucaucaugugggccugccagaagggcaacaucagaugcaacaucugcaucuga

SEQ ID NO: 167022 - RNA, 1701 nt, Artificial Sequence
  derived and/or modified CDS sequence (opt4) from hemagglutinin__InfluenzaA__AEK28949
augaagaccaucaucgcccugagcuacauccugugccugguguucgcccagaagcugcccggcaacgacaacagcaccgccacccugugccugggccaccacgccgugcccaacggcaccaucgugaagaccaucaccaacgaccagaucgaggugaccaacgccaccgagcuggugcagagcagcagcaccggcgagaucugcgacagcccccaccagauccuggacggcgagaacugcacccugaucgacgcccugcugggcgacccccagugcgacggcuuccagaacaagaagugggaccuguucguggagagaagcaaggccuacagcaacugcuaccccuacgacgugcccgacuacgccagccugagaagccugguggccagcagcggcacccuggaguucaacaacgagagcuucaacuggaccggcgugacccagaacggcaccagcagcgccugcaucagaagaagcaacaacagcuucuucagcagacugaacuggcugacccaccugaaguucaaguaccccgcccugaacgugaccaugcccaacaacgagcaguucgacaagcuguacaucuggggcgugcaccaccccggcaccgacaacgaccagaucuuccuguacgcccaggccagcggcagaaucaccgugagcaccaagagaagccagcagaccgugauccccaacaucggcagcagacccagagugagaaacauccccagcagaaucagcaucuacuggaccaucgugaagcccggcgacauccugcugaucaacagcaccggcaaccugaucgcccccagaggcuacuucaagaucagaagcggcaagagcagcaucaugagaagcgacgcccccaucggcaagugcaacagcgagugcaucacccccaacggcagcauccccaacgacaagcccuuccagaacgugaacagaaucaccuacggcgccugccccagauacgugaagcagaacacccugaagcuggccaccggcaugagaaacgugcccgagaagcagaccagaggcaucuucggcgccaucgccggcuucaucgagaacggcugggagggcaugguggacggcugguacggcuucagacaccagaacagcgagggcagaggccaggccgccgaccugaagagcacccaggccgccaucgaccagaucaacggcaagcugaacagacugaucggcaagaccaacgagaaguuccaccagaucgagaaggaguucagcgagguggagggcagaauccaggaccuggagaaguacguggaggacaccaagaucgaccuguggagcuacaacgccgagcugcugguggcccuggagaaccagcacaccaucgaccugaccgacagcgagaugaacaagcuguucgagaagaccaagaagcagcugagagagaacgccgaggacaugggcaacggcugccugaagaucuaccacaagugcgacaacgccugcaucggcagcaucagaaacggcaccuacgaccacgacguguacagagacgaggcccugaacaacagauuccagaucaagggcguggagcugaagagcggcuacaaggacuggauccuguggaucagcuucgccaucagcugcuuccugcugugcguggcccugcugggcuucaucaugugggccugccagaagggcaacaucagaugcaacaucugcaucuga

SEQ ID NO: 167023 - RNA, 1701 nt, Artificial Sequence; identical to SEQ ID NO: 162494
  derived and/or modified CDS sequence (opt4) from hemagglutinin__InfluenzaA__AEK28960

SEQ ID NO: 167024 - RNA, 1701 nt, Artificial Sequence; identical to SEQ ID NO: 162494
  derived and/or modified CDS sequence (opt4) from hemagglutinin__InfluenzaA__AEK28971

SEQ ID NO: 167025 - RNA, 1701 nt, Artificial Sequence
  derived and/or modified CDS sequence (opt4) from hemagglutinin__InfluenzaA__AEK28982
augaagaccaucaucgcccugagcuacauccugugccugguguucgcccagaagcugcccggcaacuacaacagcaccgccacccugugccugggccaccacgccgugcccaacggcaccaucgugaagaccaucaccaacgaccagaucgaggugaccaacgccaccgagcuggugcagagcagcagcaccggcgagaucugcgacagcccccaccagauccuggacggcgagaacugcacccugaucgacgcccugcugggcgacccccagugcgacggcuuccagaacaagaagugggaccuguucguggagagaagcaaggccuacagcaacugcuaccccuacgacgugcccgacuacgccagccugagaagccugguggccagcagcggcacccuggaguucaacaacgagagcuucaacuggaccggcgugacccagaacggcaccagcagcgccugcaucagaagaagcaacaacagcuucuucagcagacugaacuggcugacccaccugaaguucaaguaccccgcccugaacgugaccaugcccaacaacgagcaguucgacaagcuguacaucuggggcgugcaccaccccggcaccgacaacgaccagaucuuccuguacgcccaggccagcggcagaaucaccgugagcaccaagagaagccagcagaccgugauccccaacaucggcagcagacccagagugagaaacauccccagcagaaucagcaucuacuggaccaucgugaagcccggcgacauccugcugaucaacagcaccggcaaccugaucgcccccagaggcuacuucaagaucagaagcggcaagagcagcaucaugagaagcgacgcccccaucggcaagugcaacagcgagugcaucacccccaacggcagcauccccaacgacaagcccuuccagaacgugaacagaaucaccuacggcgccugccccagauacgugaagcagaacacccugaagcuggccaccggcaugagaaacgugcccgagaagcagaccagaggcaucuucggcgccaucgccggcuucaucgagaacggcugggagggcaugguggacggcugguacggcuucagacaccagaacagcgagggcagaggccaggccgccgaccugaagagcacccaggccgccaucgaccagaucaacggcaagcugaacagacugaucggcaagaccaacgagaaguuccaccagaucgagaaggaguucagcgagguggagggcagaauccaggaccuggagaaguacguggaggacaccaagaucgaccuguggagcuacaacgccgagcugcugguggcccuggagaaccagcacaccauccaccugaccgacagcgagaugaacaagcuguucgagaagaccaagaagcagcugagagagaacgccgaggacaugggcaacggcugcuucaagaucuaccacaagugcgacaacgccugcaucggcagcaucagaaacggcaccuacgaccacgacguguacagagacgaggcccugaacaacagauuccagaucaagggcguggagcugaagagcggcuacaaggacuggauccuguggaucagcuucgccaucagcugcuuccugcugugcguggcccugcugggcuucaucaugugggccugccagaagggcaacaucagaugcaacaucugcaucuga

SEQ ID NO: 167026 - RNA, 1701 nt, Artificial Sequence
  derived and/or modified CDS sequence (opt4) from hemagglutinin__InfluenzaA__AEK28993
augaagaccaucaucgcccugagcuacauccugugccugguguucgcccagaagcugcccggcaacuacaacagcaccgccacccugugccugggccaccacgccgugcccaacggcaccaucgugaagaccaucaccaacgaccagaucgaggugaccaacgccaccgagcuggugcagagcagcagcaccggcgagaucugcgacagcccccaccagauccuggacggcgagaacugcacccugaucgacgcccugcugggcgacccccagugcgacggcuuccagaacaagaagugggaccuguucguggagagaagcaaggccuacagcaacugcuaccccuacgacgugcccgacuacgccagccugagaagccugguggccagcagcggcacccuggaguucaacaacgagagcuucaacuggaccggcgugacccagaacggcaccagcagcgccugcaucagaagaagcaacaacagcuucuucagcagacugaacuggcugacccaccugaaguucaaguaccccgcccugaacgugaccaugcccaacaacgagcaguucgacaagcuguacaucuggggcgugcaccaccccggcaccgacaacgaccagaucuuccuguacgcccaggccagcggcagaaucaccgugagcaccaagagaagccagcagaccgugauccccaacaucggcagcagacccagagugagaaacauccccagcagaaucagcaucuacuggaccaucgugaagcccggcgacauccugcugaucaacagcaccggcaaccugaucgcccccagaggcuacuucaagaucagaagcggcaagagcagcaucaugagaagcgacgcccccaucggcaagugcaacagcgagugcaucacccccaacggcagcauccccaacgacaagcccuuccagaacgugaacagaaucaccuacggcgccugccccagauacgugaagcagaacacccugaagcuggccaccggcaugagaaacgugcccgagaagcagaccagaggcaucuucggcgccaucgccggcuucaucgagaacggcugggagggcaugguggacggcugguacggcuucagacaccagaacagcgagggcagaggccaggccgccgaccugaagagcacccaggccgccaucgaccagaucaacggcaagcugaacagacugaucggcaagaccaacgagaaguuccaccagaucgagaaggaguucagcgagguggagggcagaauccaggaccuggagaaguacguggaggacaccaagaucgaccuguggagcuacaacgccgagcugcugguggcccuggagaaccagcacaccaucgaccugaccgacagcgagaugaacaagcuguucgagaagaccaagaagcagcugagagagaacgccgaggacaugggcaacggcugcuucaagaucuaccacaagugcgacaacgccugcaucggcagcaucagaaacggcaccuacgaccacgacguguacagagacgaggcccugaacaacagauuccagaucaagggcguggagcugaagagcggcuacaaggacuggauccuguggaucagcuucgccaucagcugcuuccugcugugcguggcccugcugggcuucaucaugugggccugccagaagggcaacaucagaugcaacaucugcaucuga

SEQ ID NO: 167027 - RNA, 1701 nt, Artificial Sequence
  derived and/or modified CDS sequence (opt4) from hemagglutinin__InfluenzaA__AEK29004
augaagaccaucaucgcccugagcuacauccugugccugguguucgcccagaagcugcccggcaacgacaacagcaccgccacccugugccugggccaccacgccgugcccaacggcaccaucgugaagaccaucaccaacgaccagaucgaggugaccaacgccaccgagcuggugcagagcagcagcaccggcgagaucugcaacagcccccaccagauccuggacggcgagaacugcacccugaucgacgcccugcugggcgacccccagugcgacggcuuccagaacaagaagugggaccuguucguggagagaagcaaggcccacagcaacugcuaccccuacgacgugcccgacuacgugagccugagaagccugguggccagcagcggcacccuggaguucaacaacgagagcuucaacuggaccggcgugacccagaacggcaccagcagcgccugcaucagaagaagcaacaacagcuucuucagcagacugaacuggcugacccaccugaacuucaaguaccccgcccugaacgugaccaugcccaacaacgagcaguucgacaagcuguacaucuggggcgugcaccaccccggcaccgacaaggaccagaucuuccuguacgcccaggccagcggcagaaucaccgugagcaccaagagaagccagcaggccgugauccccaacaucggcagcagacccagagugagaaacauccccagcagagugagcaucuacuggaccaucgugaagcccggcgacauccugcugaucaacagcaccggcaaccugaucgcccccagaggcuacuucaagaucagaagcggcaagagcagcaucaugagaagcgacgcccccaucggcaagugcaacagcgccugcaucacccccaacggcagcauccccaacgacaagcccuuccagaacgugaacagaaucaccuacggcgccugccccagauacgugaagcagaacacccugaagcuggccaccggcaugagaaacgugcccgagaagcagaccagaggcaucuucggcgccaucgccggcuucaucgagaacggcugggagggcaugguggacggcugguacggcuucagacaccagaacagcgagggcagaggccaggccgccgaccugaagagcacccaggccgccaucgaccagaucaacggcaagcugaacagacugaucggcaagaccaacgagaaguuccaccagaucgagaaggaguucagcgagguggagggcagaauccaggaccuggagaaguacguggaggacaccaagaucgaccuguggagcuacaacgccgagcugcugguggcccuggagaaccagcacaccaucgaccugaccgacagcgagaugaacaagcuguucgagaagaccaagaagcagcugagagagaacgccgaggacaugggcaacggcugcuucaagaucuaccacaagugcgacaacgccugcaucggcagcaucagaaacggcaccuacgaccacgacguguacagagacgaggcccugaacaacagauuccagaucaagggcguggagcugaagagcggcuacaaggacuggauccuguggaucagcuucgccaucagcugcuuccugcugugcguggcccugcugggcuucaucaugugggccugccagaagggcaacaucagaugcaacaucugcaucuga

SEQ ID NO: 167028 - RNA, 1701 nt, Artificial Sequence
  derived and/or modified CDS sequence (opt4) from hemagglutinin__InfluenzaA__AEK29026
augaagaccaucaucgcccugagcuacauccugugccugguguucgcccagaagcugcccggcaacgacaacagcaccgccacccugugccugggccaccacgccgugcccaacggcaccaucgugaagaccaucaccaacgaccagaucgaggugaccaacgccaccgagcuggugcagagcagcagcaccggcgagaucugcgacagcccccaccagauccuggacggcaagaacugcacccugaucgacgcccugcugggcgacccccagugcgacggcuuccaggacaagaagugggaccuguucguggagagaagcaaggccuacagcaacugcuaccccuacgacgugcccgacuacgccagccugagaagccugguggccagcagcggcacccuggaguucaacaacgagagcuucaacuggaccggcgugacccagaacggcaccagcagcgccugcaucagaagaagcaagaacagcuucuucagcagacugaacuggcugacccaccugaacuucaaguacagcgcccugaacgugaccaugcccaacaacgagcaguucgacaagcuguacaucuggggcgugcaccaccccggcaccgacaaggaccagaucuuccuguacgcccaggccagcggcagaaucaccgugagcaccaagagaagccagcagaccgugauccccaacaucggcagcagacccagagugagaaacauccccagcagaaucagcaucuacuggaccaucgugaagcccggcgacauccugcugaucaacagcaccggcaaccugaucgcccccagaggcuacuucaagaugcagagcggcaagagcagcaucaugagaagcgacgcccccaucggcaagugcaacagcgagugcaucacccccaacggcagcauccccaacgacaagcccuuccagaacgugaacagaaucaccuacggcgccugccccagauacgugaagcagaacacccugaagcuggccaccggcaugagaaacgugcccgagaagcagaccagaggcaucuucggcgccaucgccggcuucaucgagaacggcugggagggcaugguggacggcugguacggcuucagacaccagaacagcgagggcagaggccaggccgccgaccugaagagcacccaggccgccaucgaccagaucaacggcaagcugaacagacugaucggcaagaccaacgagaaguuccaccagaucgagaaggaguucagcgagguggagggcagaauccaggaccuggagaaguacguggaggacaccaagaucgaccuguggagcuacaacgccgagcugcugguggcccuggagaaccagcacaccaucgaccugaccgacagcgagaugaacaagcuguucgagaagaccaagaagcagcugagagagaacgccgaggacaugggcaacggcugcuucaagaucuaccacaagugcgacaacgccugcaucggcagcaucagaaacggcaccuacgaccacgacguguacagagacgaggcccugaacaacagauuccagaucaagggcguggagcugaagagcggcuacaaggacuggauccuguggaucagcuucgccaucagcugcuuccugcugugcguggcccugcugggcuucaucaugugggccugccagaagggcaacaucagaugcaacaucugcaucuga

SEQ ID NO: 167029 - RNA, 1701 nt, Artificial Sequence
  derived and/or modified CDS sequence (opt4) from hemagglutinin__InfluenzaA__AEK29048
augaagaccaucaucgcccugagcuacauccugugccugguguucgcccagaagcugcccggcaacgacaacagcaccgccacccugugccugggccaccacgccgugcccaacggcaccaucgugaagaccaucaccaacgaccagaucgaggugaccaacgccaccgagcuggugcagagcagcagcaccggcgagaucugcaacagcccccaccagauccuggacggcgagaacugcacccugaucgacgcccugcugggcgacccccagugcgacggcuuccagaacaagaagugggaccuguucguggagagaagcaaggcccacagcaacugcuaccccuacgacgugcccgacuacgccagccugagaagccugguggccagcagcggcacccuggaguucaacaacgagagcuucaacuggaccggcguggcccagaacggcaccagcagcgccugcaucagaagaagcaacaacagcuucuucagcagacugaacuggcugacccaccugaacuucaaguaccccgcccugaacgugaccaugcccaacaacgagcaguucgacaagcuguacaucuggggcgugcaccaccccggcaccgacaaggaccagaucuuccuguacgcccaggccgccggcagaaucaccgugagcaccaagagaagccagcaggccgugauccccaacaucggcagcagacccagagugagaaacauccccagcagagugagcaucuacuggaccaucgugaagcccggcgacauccugcugaucaacagcaccggcaaccugaucgcccccagaggcuacuucaagaucagaagcggcaagagcagcaucaugagaagcgacgcccccaucggcaagugcaacagcgccugcaucacccccaacggcagcauccccaacgacaagcccuuccagaacgugaacagaaucaccuacggcgccugccccagauacgugaagcagaacacccugaagcuggccaccggcaugagaaacgugcccgagaagcagaccagaggcaucuucggcgccaucgccggcuucaucgagaacggcugggagggcaugguggacggcugguacggcuucagacaccagaacagcgagggcagaggccaggccgccgaccugaagagcacccaggccgccaucgaccagaucaacggcaagcugaacagacugaucggcaagaccaacgagaaguuccaccagaucgagaaggaguucagcgagguggagggcagaauccaggaccuggagaaguacguggaggacaccaagaucgaccuguggagcuacaacgccgagcugcugguggcccuggagaaccagcacaccaucgaccugaccgacagcgagaugaacaagcuguucgagaagaccaagaagcagcugagagagaacgccgaggacaugggcaacggcugcuucaagaucuaccacaagugcgacaacgccugcaucggcagcaucagaaacggcaccuacgaccacgacguguacagagacgaggcccugaacaacagauuccagaucaagggcguggagcugaagagcggcuacaaggacuggauccuguggaucagcuucgccaucagcugcuuccugcugugcguggcccugcugggcuucaucaugugggccugccagaagggcaacaucagaugcaacaucugcaucuga

SEQ ID NO: 167030 - RNA, 1701 nt, Artificial Sequence
  derived and/or modified CDS sequence (opt4) from hemagglutinin__InfluenzaA__AEK29070
augaagaccaucaucgcccugagcuacauccugugccugguguucgcccagaagcugcccggcaacgacaacagcaccgccacccugugccugggccaccacgccgugcccaacggcaccaucgugaagaccaucaccaacgaccagaucgaggugaccaacgccaccgagcuggugcagagcagcagcaccggcgagaucugcgacagcccccaccagauccuggacggcgagaacugcacccugaucgacgcccugcugggcgacccccagugcgacggcuuccagaacaagaagugggaccuguucguggagagaagcaaggccuacagcaacugcuaccccuacgacgugcccgacuacgccagccugagaagccugguggccagcagcggcacccuggaguucaacaacgagagcuucaacuggaccggcgugacccagaacggcaccagcagcgccugcaucagaagaagcaacaacagcuucuucagcagacugaacuggcugacccaccugaacuucaaguaccccgcccugaacgugaccaugcccaacaacgagcaguucgacaagcuguacaucuggggcgugcaccaccccggcaccgacaaggaccagaucuuccuguacgcccaggccagcggcagaaucaccgugagcaccaagagaagccagcaggccgugauccccaacaucggcagcagacccagagugagaaacauccccagcagaaucagcaucuacuggaccaucgugaagcccggcgacauccugcugaucaacagcaccggcaaccugaucgcccccagaggcuacuucaagaucagaagcggcaagagcagcaucaugagaagcgacgcccccaucggcaagugcaacagcgagugcaucacccccaacggcagcauccccaacgacaagcccuuccagaacgugaacagaaucaccuacggcgccugccccagauacgugaagcagaacacccugaagcuggccaccggcaugagaaacgugcccgagaagcagaccagaggcaucuucggcgccaucgccggcuucaucgagaacggcugggagggcaugguggacggcugguacggcuucagacaccagaacagcgagggcagaggccaggccgccgaccugaagagcacccaggccgccaucgaccagaucaacggcaagcugaacagacugaucggcaagaccaacgagaaguuccaccagaucgagaaggaguucagcgagguggagggcagaauccaggaccuggagaaguacguggaggacaccaagaucgaccuguggagcuacaacgccgagcugcugguggcccuggagaaccagcacaccauccaccugaccgacagcgagaugaacaagcuguucgagaagaccaagaagcagcugagagagaacgccgaggacaugggcaacggcugcuucaagaucuaccacaagugcgacaacgccugcaucggcagcaucagaaacggcaccuacgaccacgacguguacagagacgaggcccugaacaacagauuccagaucaagggcguggagcugaagagcggcuacaaggacuggauccuguggaucagcuucgccaucagcugcuuccugcugugcguggcccugcugggcuucaucaugugggccugccagaagggcaacaucagaugcaacaucugcaucuga

SEQ ID NO: 167031 - RNA, 1701 nt, Artificial Sequence
  derived and/or modified CDS sequence (opt4) from hemagglutinin__InfluenzaA__AEK29081
augaagaccaucaucgcccugagcuacauccugugccugguguucgcccagaagcugcccggcaacgacaacagcaccgccacccugugccugggccaccacgccgugcccaacggcaccaucgugaagaccaucaccaacgaccagaucgaggugaccaacgccaccgagcuggugcagagcagcagcaccggcgagaucugcgacagcccccaccagauccuggacggcgagaacugcacccugaucgacgcccugcugggcgacccccagugcgacggcuuccagaacaagaagugggaccuguucguggagagaagcaaggccuacagcaacugcuaccccuacgacgugcccgacuacgccagccugagaagccugguggccagcagcggcacccuggaguucaacaacgagagcuucaacuggaccggcgugacccagaacggcaccagcagcagcugcaucagaagaagcaacaacagcuucuucagcagacugaacuggcugacccaccugaacuucaaguaccccgcccugaacgugaccaugcccaacaacgagcaguucgacaagcuguacaucuggggcgugcaccaccccggcaccgacaaggaccagaucuuccuguacgcccaggccagcggcagaaucaccgugagcaccaagagaagccagcaggccgugauccccaacaucggcagcagacccagagugagaaacauccccagcagaaucagcaucuacuggaccaucgugaagcccggcgacauccugcugaucaacagcaccggcaaccugaucgcccccagaggcuacuucaagaucagaagcggcaagagcagcaucaugagaagcgacgcccccaucggcaagugcaacagcgagugcaucacccccaacggcagcauccccaacgacaagcccuuccagaacgugaacagaaucaccuacggcgccugccccagauacgugaagcagaacacccugaagcuggccaccggcaugagaaacgugcccgagaagcagaccagaggcaucuucggcgccaucgccggcuucaucgagaacggcugggagggcaugguggacggcugguacggcuucagacaccagaacagcgagggcagaggccaggccgccgaccugaagagcacccaggccgccaucgaccagaucaacggcaagcugaacagacugaucggcaagaccaacgagaaguuccaccagaucgagaaggaguucagcgagguggagggcagaauccaggaccuggagaaguacguggaggacaccaagaucgaccuguggagcuacaacgccgagcugcugguggcccuggagaaccagcacaccauccaccugaccgacagcgagaugaacaagcuguucgagaagaccaagaagcagcugagagagaacgccgaggacaugggcaacggcugcuucaagaucuaccacaagugcgacaacgccugcaucggcagcaucagaaacggcaccuacgaccacgacguguacagagacgaggcccugaacaacagauuccagaucaagggcguggagcugaagagcggcuacaaggacuggauccuguggaucagcuucgccaucagcugcuuccugcugugcguggcccugcugggcuucaucaugugggccugccagaagggcaacaucagaugcaacaucugcaucuga

SEQ ID NO: 167032 - RNA, 1701 nt, Artificial Sequence; identical to SEQ ID NO: 165593
  derived and/or modified CDS sequence (opt4) from hemagglutinin__InfluenzaA__AEK29092

SEQ ID NO: 167033 - RNA, 1701 nt, Artificial Sequence; identical to SEQ ID NO: 166915
  derived and/or modified CDS sequence (opt4) from hemagglutinin__InfluenzaA__AEK29125

SEQ ID NO: 167034 - RNA, 1701 nt, Artificial Sequence; identical to SEQ ID NO: 166915
  derived and/or modified CDS sequence (opt4) from hemagglutinin__InfluenzaA__AEK29136

SEQ ID NO: 167035 - RNA, 1701 nt, Artificial Sequence; identical to SEQ ID NO: 166915
  derived and/or modified CDS sequence (opt4) from hemagglutinin__InfluenzaA__AEK29169

SEQ ID NO: 167036 - RNA, 1701 nt, Artificial Sequence; identical to SEQ ID NO: 166915
  derived and/or modified CDS sequence (opt4) from hemagglutinin__InfluenzaA__AEK29180

SEQ ID NO: 167037 - RNA, 1701 nt, Artificial Sequence; identical to SEQ ID NO: 166915
  derived and/or modified CDS sequence (opt4) from hemagglutinin__InfluenzaA__AEK29191

SEQ ID NO: 167038 - RNA, 1701 nt, Artificial Sequence; identical to SEQ ID NO: 166915
  derived and/or modified CDS sequence (opt4) from hemagglutinin__InfluenzaA__AEK29202

SEQ ID NO: 167039 - RNA, 1701 nt, Artificial Sequence; identical to SEQ ID NO: 166915
  derived and/or modified CDS sequence (opt4) from hemagglutinin__InfluenzaA__AEK29213

SEQ ID NO: 167040 - RNA, 1701 nt, Artificial Sequence; identical to SEQ ID NO: 166915
  derived and/or modified CDS sequence (opt4) from hemagglutinin__InfluenzaA__AEK29224

SEQ ID NO: 167041 - RNA, 1701 nt, Artificial Sequence; identical to SEQ ID NO: 166915
  derived and/or modified CDS sequence (opt4) from hemagglutinin__InfluenzaA__AEK29235

SEQ ID NO: 167042 - RNA, 1701 nt, Artificial Sequence
  derived and/or modified CDS sequence (opt4) from hemagglutinin__InfluenzaA__AEK29268
augaagaccaucaucgcccugagcuacauccugugccugguguucgcccagaagcugcccggcaacgacaacagcaccgccacccugugccugggccaccacgccgugcccaacggcaccaucgugaagaccaucaccaacgaccagaucgaggugaccaacgccaccgagcuggugcagagcagcagcaccggcgagaucugcaacagcccccaccagauccuggacggcgagaacugcacccugaucgacgcccugcugggcgacccccagugcgacggcuuccagaacaagaagugggaccuguucguggagagaagcaaggcccacagcaacugcuaccccuacgacgugcccgacuacgccagccugagaagccugguggccagcagcggcacccuggaguucaacaacgagagcuucaacuggaccggcgugacccagaacggcaccagcagcgccugcaucagaagaagcaacaacagcuucuucagcagacugaacuggcugacccaccugaacuucaaguaccccgcccugaacgugaccaugcccaacaacgagcaguucgacaagcuguacaucuggggcgugcaccaccccggcaccgacaaggaccagaucuuccuguacgcccaggccagcggcagaaucaccgugagcaccaagagaagccagcaggccgugauccccaacaucggcagcagacccagagugagaaacauccccagcagagugagcaucuacuggaccaucgugaagcccggcgacauccugcugaucaacagcaccggcaaccugaucgcccccagaggcuacuucaagaucagaagcggcaagagcagcaucaugagaagcgacgcccccaucggcaagugcaacagcgccugcaucacccccaacggcagcauccccaacgacaagcccuuccagaacgugaacagaaucaccuacggcgccugccccagauacgugaagcagaacacccugaagcuggccaccggcaugagaaacgugcccgagaagcagaccagaggcaucuucggcgccaucgccggcuucaucgagaacggcugggagggcaugguggacggcugguacggcuucagacaccagaacagcgagggcagaggccaggccgccgaccugaagagcacccaggccgccaucgaccagaucaacggcaagcugaacagacugaucggcaagaccaacgagaaguuccaccagaucgagaaggaguucagcgagguggagggcagaauccaggaccuggagaaguacguggaggacaccaagaucgaccuguggagcuacaacgccgagcugcugguggcccuggagaaccagcacaccaucgaccugaccgacagcgagaugaacaagcuguucgagaagaccaagaagcagcugagagagaacgccgaggacaugggcaacggcugcuucaagaucuaccacaagugcgacaacgccugcaucggcagcaucagaaacggcaccuacgaccacgacguguacagagacgaggcccugaacaacagauuccagaucaagggcguggagcugaagagcggcuacaaggacuggauccuguggaucagcuucgccaucagcugcuuccugcugugcguggcccugcugggcuucaucaugugggccugccagaagggcaacaucagaugcaacaucugcaucuga

SEQ ID NO: 167043 - RNA, 1698 nt, Artificial Sequence
  derived and/or modified CDS sequence (opt4) from hemagglutinin__InfluenzaA__AEK59838
augaaggugaagcugcuggugcugcugugcaccuucaccgccaccuacgccgacaccaucugcaucggcuaccacgccaacaacagcaccgacaccguggacaccgugcuggagaagaacgugaccgugacccacagcgugaaccugcuggaggacagccacaacggcaagcugugccugcugaagggcaucgccccccugcagcugggcaacugcagcguggccggcuggauccugggcaaccccgagugcgagcugcugaucagcaaggagagcuggagcuacaucguggagaagcccgaccccgagaacggcaccugcuaccccggccacuucgccgacuacgaggagcugagagagcagcugagcagcgugagcagcuucgagagauucgagaucuuccccaaggagagcagcuggcccaaccacaccgugaccggcgugagcgccagcugcagccacaacggcaagagcagcuucuacaagaaccugcuguggcugaccggcaagaacggccuguaccccaaccugagcaagagcuacgccaacaacaaggagaaggaggugcuggugcuguggggcgugcaccacccccccaacaucggcgaccagaaggcccuguaccacaccgagaacgccuacgugagcguggugagcagccacuacagcaagaaguucacccccgagaucgccaagagacccaaggugagagaccaggagggcagaaucaacuacuacuggacccugcuggagcccggcaacaccaucaucuucgaggccaacggcaaccugaucgcccccagauacgccuucgcccugagcagaggcuucggcagcggcaucaucaacagcaacgcccccauggacaagugcgacgccaagugccagaccccccagggcgccaucaacagcagccugcccuuccagaacgugcaccccgugaccaucggcgagugccccaaguacgugagaagcgccaagcugagaauggugaccggccugagaaacauccccagcauccagagcagaggccuguucggcgccaucgccggcuucaucgagggcggcuggaccggcaugguggacggcugguacggcuaccaccaccagaacgagcagggcagcggcuacgccgccgaccagaagagcacccagaacgccaucaacggcaucaccaacaaggugaacagcgugaucgagaagaugaacacccaguucaccgccgugggcaaggaguucaacaagcuggagagaagaauggagaaccugaacaagaagguggacgacggcuucaucgacaucuggaccuacaacgccgagcugcuggugcugcuggagaacgagagaacccuggacuuccacgacagcaacgugaagaaccuguacgagaaggugaagagccagcugaagaacaacgccaaggagaucggcaacggcugcuucgaguucuaccacaagugcaacgacgagugcauggagagcgugaagaacggcaccuacgacuaccccaaguacagcgaggagagcaagcugaacagagagaagaucgacggcgugaagcuggagagcaugggcguguaccagauccuggccaucuacagcaccguggccagcagccuggugcugcuggugagccugggcgccaucagcuucuggaugugcagcaacggcagccugcagugcagaaucugcaucuga

SEQ ID NO: 167044 - RNA, 1701 nt, Artificial Sequence
  derived and/or modified CDS sequence (opt4) from hemagglutinin__InfluenzaA__AEK98378
augaagaccaucaucgcccugagcuacauccugugccugguguucgcccagaagcugcccggcaacgacaacagcaccgccacccugugccugggccaccacgccgugcccaacggcaccaucgugaagaccaucaccaacgaccagaucgaggugaccaacgccaccgagcuggugcagagcagcagcaccggcgagaucugcgacagcccccaccagauccuggacggcgagaacugcacccugaucgacgcccugcugggcgacccccagugcgacggcuuccagaacaagaagugggaccuguucguggagagaagcaaggccuacagcaacugcuaccccuacgacgugcccgacuacgccagccugagaagccugguggccagcagcggcacccuggaguucaacaacgagagcuucaacuggaccggcgugacccagaacggcaccagcagcgccugcaucagaagaagcaacaacagcuucuucagcagacugaacuggcugacccaccugaaguucaaguaccccgcccugaacgugaccaugcccaacaacgagaaguucgacaagcuguacaucuggggcgugcaccaccccggcaccgacaacgaccagaucuuccccuacgcccaggccagcggcagaaucaccgugagcaccaagagaagccagcagaccgugauccccaacaucggcagcagacccagagugagaaacauccccagcagaaucagcaucuacuggaccaucgugaagcccggcgacauccugcugaucaacagcaccggcaaccugaucgcccccagaggcuacuucaagauccagagcggcaagagcagcaucaugagaagcgacgcccccaucggcaagugcaacagcgagugcaucacccccaacggcagcauccccaacgacaagcccuuccagaacgugaacagaaucaccuacggcgccugccccagauacgugaagcagaacacccugaagcuggccaccggcaugagaaacgugcccgagaagcagaccagaggcaucuucggcgccaucgccggcuucaucgagaacggcugggagggcaugguggacggcugguacggcuucagacaccagaacagcgagggcaucggccaggccgccgaccugaagagcacccaggccgccaucgaccagaucaacggcaagcugaacagacugaucggcaagaccaacgagaaguuccaccagaucgagaaggaguucagcgagguggagggcagaauccaggaccuggagaaguacguggaggacaccaagaucgaccuguggagcuacaacgccgagcugcugguggcccuggagaaccagcacaccaucgaccugaccgacagcgagaugaacaagcuguucgagaagaccaagaagcagcugagagagaacgccgaggacaugggcaacggcugcuucaagaucuaccacaagugcgacaacgccugcaucggcagcaucagaaacggcaccuacgaccacgacguguacagagacgaggcccugaacaacagauuccagaucaagggcguggagcugaagagcggcuacaaggacuggauccuguggaucagcuucgccaucagcugcuuccugcugugcguggcccugcugggcuucaucaugugggccugccagaagggcaacaucagaugcaacaucugcaucuga

SEQ ID NO: 167045 - RNA, 1701 nt, Artificial Sequence; identical to SEQ ID NO: 161975
  derived and/or modified CDS sequence (opt4) from hemagglutinin__InfluenzaA__AEK98380

SEQ ID NO: 167046 - RNA, 1701 nt, Artificial Sequence
  derived and/or modified CDS sequence (opt4) from hemagglutinin__InfluenzaA__AEK98382
augaagaccaucaucgcccugagcuacauccugugccugguguucgcccagaagcugcccggcaacgacaacagcaccgccacccugugccugggccaccacgccgugcccaacggcaccaucgugaagaccaucaccaacgaccagaucgaggugaccaacgccaccgagcuggugcagaacagcagcaccggcgagaucugcgacagcccccaccagauccuggacggcgagaacugcacccugaucgacgcccugcugggcgacccccagugcgacggcuuccagaacaagaagugggaccuguucguggagagaagcaaggccuacagcaacugcuaccccuacgacgugcccgacuacgccagccugagaagccugguggccagcagcggcacccuggaguucaacaacgagagcuucaacuggaccggcgugacccagaacggcaccagcagcgccugcaucagaagaagcaacaacagcuucuucagcagacugaacuggcugacccaccugaaguucaaguaccccgcccugaacgugaccaugcccaacaacgagaaguucgacaagcuguacaucuggggcgugcaccaccccggcaccgacaacgaccagaucuuccuguacgcccaggccagcggcagaaucaccgugagcaccaagagaagccagcagaccgugauccccaacaucggcagcagacccagaaucagaaacauccccagcagaaucagcaucuacuggaccaucgugaagcccggcgacauccugcugaucaacagcaccggcaaccugaucgcccccagaggcuacuucaagauccagaucggcaagagcagcaucaugagaagcgacgcccccaucggcaagugcaacagcgagugcaucacccccaacggcagcauccccaacgacaagcccuuccagaacgugaacagaaucaccuacggcgccugccccagauacgugaagcagaacacccugaagcuggccaccggcaugagaaacgugcccgagaagcagaccagaggcaucuucggcgccaucgccggcuucaucgagaacggcugggagggcaugguggacggcugguacggcuucagacaccagaacagcgagggcaucggccaggccgccgaccugaagagcacccaggccgccaucgaccagaucaacggcaagcugaacagacugaucggcaagaccaacgagaaguuccaccagaucgagaaggaguucagcgagguggagggcagaauccaggaccuggagaaguacguggaggacaccaagaucgaccuguggagcuacaacgccgagcugcugguggcccuggagaaccagcacaccaucgaccugaccgacagcgagaugaacaagcuguucgagaagaccaagaagcagcugagagagaacgccgaggacaugggcaacggcugcuucaagaucuaccacaagugcgacaacgccugcaucggcagcaucagaaacggcaccuacgaccacgacguguacagagacgaggcccugaacaacagauuccagaucaagggcguggagcugaagagcggcuacaaggacuggauccuguggaucagcuucgccaucagcugcuuccugcugugcguggcccugcugggcuucaucaugugggccugccagaagggcaacaucagaugcaacaucugcaucuga

SEQ ID NO: 167047 - RNA, 1701 nt, Artificial Sequence
  derived and/or modified CDS sequence (opt4) from hemagglutinin__InfluenzaA__AEK98386
augaagaccaucaucgcccugagcuacauccugugccugguguucgcccagaagcugcccggcaacgacaacagcaccgccacccugugccugggccaccacgccgugcccaacggcaccaucgugaagaccaucaccaacgaccagaucgaggugaccaacgccaccgagcuggugcagagcagcagcaccggcgagaucugcaacagcccccaccagauccuggacggcgagaacugcacccugaucgacgcccugcugggcgacccccagugcgacggcuuccagaacaagaagugggaccuguucguggagagaagcaaggcccacagcaacugcuaccccuacgacgugcccgacuacgccagccugagaagccugguggccagcagcggcacccuggaguucaacaacgagagcuucaacuggaccggcgugacccagaacggcaccagcagcgccugcaucagaagaagcaacaacagcuucuucagcagacugaacuggcugacccaccugaacuucaaguaccccgcccugaacgugaccaugcccaacaacgagcaguucgacaagcuguacaucuggggcgugcaccaccccggcaccgacaaggaccagaucuuccuguacgcccaggccagcggcagaaucaccgugagcaccaagagaagccagcaggccgugauccccaacaucggcagcagaaccagagugagaaacauccccagcagagugagcaucuacuggaccaucgugaagcccggcgacauccugcugaucaacagcaccggcaaccugaucgcccccagaggcuacuucaagaucagaagcggcaagagcagcaucaugagaagcgacgcccccaucggcaagugcaacagcgccugcaucacccccaacggcagcauccccaacgacaagcccuuccagaacgugaacagaaucaccuacggcgccugccccagauacgugaagcagaacacccugaagcuggccaccggcaugagaaacgugcccgagaagcagaccagaggcaucuucggcgccaucgccggcuucaucgagaacggcugggagggcaugguggacggcugguacggcuucagacaccagaacagcgagggcagaggccaggccgccgaccugaagagcacccaggccgccaucgaccagaucaacggcaagcugaacagacugaucggcaagaccaacgagaaguuccaccagaucgagaaggaguucagcgagguggagggcagaauccaggaccuggagaaguacguggaggacaccaagaucgaccuguggagcuacaacgccgagcugcugguggcccuggagaaccagcacaccaucgaccugaccgacagcgagaugaacaagcuguucgagaagaccaagaagcagcugagagagaacgccgaggacaugggcaacggcugcuucaagaucuaccacaagugcgacaacgccugcaucggcagcaucagaaacggcaccuacgaccacgacguguacagagacgaggcccugaacaacagauuccagaucaagggcguggagcugaagagcggcuacaaggacuggauccuguggaucagcuucgccaucagcugcuuccugcugugcguggcccugcugggcuucaucaugugggccugccagaagggcaacaucagaugcaacaucugcaucuga

SEQ ID NO: 167048 - RNA, 1701 nt, Artificial Sequence
  derived and/or modified CDS sequence (opt4) from hemagglutinin__InfluenzaA__AEK98388
augaagaccaucaucgcccugagcuacauccugugccugguguucgcccagaagcugcccggcaacgacaacagcaccgccacccugugccugggccaccacgccgugcccaacggcaccaucgugaagaccaucaccaacgaccagaucgaggugaccaacgccaccgagcuggugcagagcagcagcaccggcgagaucugcgacagcccccaccagauccuggacggcaagaacugcacccugaucgacgcccugcugggcgacccccagugcgacggccugcagaacaagaagugggaccuguucguggagagaagcaaggccuacagcaacugcuaccccuacgacgugcccgacuacgccagccugagaagccugguggccagcagcggcacccuggaguucaacaacgagagcuucaacuggaccggcgugacccagaacggcaccagcagcgccugcaucagaagaagcaagaacagcuucuucagcagacugaacuggcugacccaccugaacuucaaguaccccgcccugaacgugaccaugcccaacaacgagcaguucgacaagcuguacaucuggggcgugcaccaccccggcaccgacaaggaccagaucuuccuguacgcccaggccagcggcagaaucaccgugagcaccaagagaagccagcagaccgccauccccaacaucggcagcagacccagagugagaaacauccccagcagaaucagcaucuacuggaccaucgugaagcccggcgacauccugcugaucaacagcaccggcaaccugaucgcccccagaggcuacuucaagaucagaagcggcaagagcagcaucaugagaagcgacgcccccaucggcaagugcaacagcgagugcaucacccccaacggcagcauccccaacgacaagcccuuccagaacgugaacagaaucaccuacggcgccugccccagauacgugaagcagaacacccugaagcuggccaccggcaugagaaacgugcccgagaagcagaccagaggcaucuucggcgccaucgccggcuucaucgagaacggcugggagggcaugguggacggcugguacggcuucagacaccagaacagcgagggcagaggccaggccgccgaccugaagagcacccaggccgccaucgaccagaucaacggcaagcugaacagacugaucggcaagaccaacgagaaguuccaccagaucgagaaggaguucagcgagguggagggcagaauccaggaccuggagaaguacguggaggacaccaagaucgaccuguggagcuacaacgccgagcugcugguggcccuggagaaccagcacaccaucgaccugaccgacagcgagaugaacaagcuguucgagaagaccaagaagcagcugagagagaacgccgaggacaugggcaacggcugcuucaagaucuaccacaagugcgacaacgccugcaucggcagcaucagaaacggcaccuacgaccacgacguguacagagacgaggcccugaacaacagauuccagaucaagggcguggagcugaagagcggcuacaaggacuggauccuguggaucagcuucgccaucagcugcuuccugcugugcguggcccugcugggcuucaucaugugggccugccagaagggcaacaucagaugcaacaucugcaucuga

SEQ ID NO: 167049 - RNA, 1701 nt, Artificial Sequence
  derived and/or modified CDS sequence (opt4) from hemagglutinin__InfluenzaA__AEK98390
augaagaccaucaucgcccugagcuacauccugugccugguguucgcccaggagcugcccggcaacgacaacagcaccgccacccugugccugggccaccacgccgugcccaacggcaccaucgugaagaccaucaccaacgaccagaucgaggugaccaacgccaccgagcuggugcagagcagcagcaccggcgagaucugcaacagcccccaccagauccuggacggcgagaacugcacccugaucgacgcccugcugggcgacccccagugcgacggcuuccagaacaagaagugggaccuguucguggagagaagcaaggcccacagcaacugcuaccccuacgacgugcccgacuacgccagccugagaagccugguggccagcagcggcacccuggaguucaacaacgagagcuucaacuggaccggcgugacccagaacggcaccagcagcgccugcaucagaagaagcaacaacagcuucuucagcagacugaacuggcugacccaccugaacuucaaguaccccgcccugaacgugaccaugcccaacaacgagcaguucgacaagcuguacaucuggggcgugcaccaccccggcaccgacaaggaccagaucuuccuguacgcccaggccagcggcagaaucaccgugagcaccaagagaagccagcaggccgugauccccaacaucggcagcagacccagagugagaaacauccccagcagagugagcaucuacuggaccaucgugaagcccggcgacauccugcugaucaacagcaccggcaaccugaucgcccccagaggcuacuucaagaucagaagcggcaagagcagcaucaugagaagcgacgcccccaucggcaagugcaagagcgccugcaucacccccaacggcagcauccccaacgacaagaccuuccagaacgugaacagaaucaccuacggcgccugccccagauacgugaagcagaacacccugaagcuggccaccggcaugagaaacgugcccgagaagcagaccagaggcaucuucggcgccaucgccggcuucaucgagaacggcugggagggcaugguggacggcugguacggcuucagacaccagaacagcgagggcagaggccaggccgccgaccugaagagcacccaggccgccaucgaccagaucaacggcaagcugaacagacugaucggcaagaccaacgagaaguuccaccagaucgagaaggaguucagcgagguggagggcagaauccaggaccuggagaaguacguggaggacaccaagaucgaccuguggagcuacaacgccgagcugcugguggcccuggagaaccagcacaccaucgaccugaccgacagcgagaugaacaagcuguucgagaagaccaagaagcagcugagagagaacgccgaggacaugggcaacggcugcuucaagaucuaccacaagugcgacaacgccugcaucggcagcaucagaaacggcaccuacgaccacgacguguacagagacgaggcccugaacaacagauuccagaucaagggcguggagcugaagagcggcuacaaggacuggauccuguggaucagcuucgccaucagcugcuuccugcugugcguggcccugcugggcuucaucaugugggccugccagaagggcaacaucagaugcaacaucugcaucuga

SEQ ID NO: 167050 - RNA, 1701 nt, Artificial Sequence
  derived and/or modified CDS sequence (opt4) from hemagglutinin__InfluenzaA__AEK98392
augaagaccaucaucgcccugagcuacauccugugccugguguucgcccagaagcugcccggcaacgacaacagcaccgccacccugugccugggccaccacgccgugcccaacggcaccaucgugaagaccaucaccgacgaccagaucgaggugaccaacgccaccgagcuggugcagagcagcagcaccggcgagaucugcaacagcccccaccagauccuggacggcgagaacugcacccugaucgacgcccugcugggcgacccccagugcgacggcuuccagaacaagaagugggaccuguucguggagagaagcaaggcccacagcaacugcuaccccuacgacgugcccgacuacgccagccugagaagccugguggccagcagcggcacccuggaguucaacaacgagaacuucaacuggaccggcgugacccagaacggcaccagcagcgccugcaucagaagaagcaacaacagcuucuucagcagacugaacuggcugacccaccugaacuucaaguaccccgcccugaacgugaccaugcccaacaacgagcaguucgacaagcuguacaucuggggcgugcaccaccccggcaccgacaaggaccagaucuuccuguacgcccaggccagcggcagaaucaccgugagcaccaagagaagccagcaggccgugauccccaacaucggcagcagacugagagugagaaacauccccagcagagugagcaucuacuggaccaucgugaagcccggcgacauccugcugaucaacagcaccggcaaccugaucgcccccagaggcuacuucaagaucagaagcggcaagagcagcaucaugagaagcgacgcccccaucggcaagugcaacagcgccugcaucacccccaacggcagcauccccaacgacaagcccuuccagaacgugaacagaaucaccuacggcgccugccccagauacgugaagcagaacacccugaagcuggccaccggcaugagaaacgugcccgagaagcagaccagaggcaucuucggcgccaucgccggcuucaucgagaacggcugggagggcaugguggacggcugguacggcuucagacaccagaacagcgagggcagaggccaggccgccgaccugaagagcacccaggccgccaucgaccagaucaacggcaagcugaacagacugaucggcaagaccaacgagaaguuccaccagaucgagaaggaguucagcgagguggagggcagaauccaggaccuggagaaguacguggaggacaccaagaucgaccuguggagcuacaacgccgagcugcugguggcccuggagaaccagcacaccaucgaccugaccgacagcgagaugaacaagcuguucgagaagaccaagaagcagcugagagagaacgccgaggacaugggcaacggcugcuucaagaucuaccacaagugcgacaacgccugcaucggcagcaucagaaacggcaccuacgaccacgacguguacagagacgaggcccugaacaacagauuccagaucaagggcguggagcugaagagcggcuacaaggacuggauccuguggaucagcuucgccaucagcugcuuccugcugugcguggcccugcugggcuucaucaugugggccugccagaagggcaacaucagaugcaacaucugcaucuga

SEQ ID NO: 167051 - RNA, 1701 nt, Artificial Sequence
  derived and/or modified CDS sequence (opt4) from hemagglutinin__InfluenzaA__AEK98394
augaagaccaucaucgcccugagcuacauccugugccugguguucgcccagaagcugcccggcaacgacaacagcaccgccacccugugccugggccaccacgccgugcccaacggcaccaucgugaagaccaucaccaacgaccagaucgaggugaccaacgccaccgagcuggugcagagcagcagcaccggcgagaucugcaacagcccccaccagauccuggacggcgagaacugcacccugaucgacgcccugcugggcgacccccagugcgacggcuuccagaacaagaagugggaccuguucguggagagaagcaaggcccacagcaacugcuaccccuacgacgugcccgacuacgccagccugagaagccugguggccagcagcggcacccuggaguucaacaacgagagcuucaacuggaccggcgugacccagaacggcaccagcagcgccugcaucagaagaagcaacaacagcuucuucagcagacugaacuggcugacccaccugaacuucaaguaccccgcccugaacgugaccaugcccaacaacgagcaguucgacaagcuguacaucuggggcgugcaccaccccggcaccgacaaggaccagaucuuccuguacgcccaggccagcggcagaaucaccgugagcaccaagagaagccagcaggccgugauccccaacaucggcagcagacugagagugagaaacauccccagcagagugagcaucuacuggaccaucgugaagcccggcgacauccugcugaucaacagcaccggcaaccugaucgcccccagaggcuacuucaagaucagaagcggcaagagcagcaucaugagaagcgacgcccccaucggcaagugcaacagcgccugcaucacccccaacggcagcauccccaacgacaagcccuuccagaacgugaacagaaucaccuacggcgccugccccagauacgugaagcagaacacccugaagcuggccaccggcaugagaaacgugcccgagaagcagaccagaggcaucuucggcgccaucgccggcuucaucgagaacggcugggagggcaugguggacggcugguacggcuucagacaccagaacagcgagggcagaggccaggccgccgaccugaagagcacccaggccgccaucgaccagaucaacggcaagcugaacagacugaucggcaagaccaacgagaaguuccaccagaucgagaaggaguucagcgagguggagggcagaauccaggaccuggagaaguacguggaggacaccaagaucgaccuguggagcuacaacgccgagcugcugguggcccuggagaaccagcacaccaucgaccugaccgacagcgagaugaacaagcuguucgagaagaccaagaagcagcugagagagaacgccgaggacaugggcaacggcugcuucaagaucuaccacaagugcgacaacgccugcaucggcagcaucagaaacggcaccuacgaccacgacguguacagagacgaggcccugaacaacagauuccagaucaagggcguggagcugaagagcggcuacaaggacuggauccuguggaucagcuucgccaucagcugcuuccugcugugcguggcccugcugggcuucaucaugugggccugccagaagggcaacaucagaugcaacaucugcaucuga

SEQ ID NO: 167052 - RNA, 1701 nt, Artificial Sequence
  derived and/or modified CDS sequence (opt4) from hemagglutinin__InfluenzaA__AEK98396
augaagaccaucaucgcccugagcuacauccugugccugguguucgcccagaagcugcccggcaacgacaacagcaccgccacccugugccugggccaccacgccgugcccaacggcaccaucgugaagaccaucaccaacgaccagaucgaggugaccaacgccaccgagcuggugcagagcagcagcaccggcgagaucugcgacagcccccaccagauccuggacggcgagaacugcacccugaucgacgcccugcugggcgacccccagugcgacggcuuccagaacaagaagugggaccuguucguggagagaagcaaggccuacagcaacugcuaccccuacgacgugcccgacuacgccagccugagaagccugguggccagcagcggcacccuggaguucaacaacgagagcuucaacuggaccggcgugacccagaacggcaccagcagcgccugcaucagaagaagcaacaagagcuucuucagcagacugaacuggcugacccaccugaaguucaaguaccccgcccugaacgugaccaugcccaacaacgagcaguucgacaagcuguacaucuggggcgugcaccaccccggcaccgacaacgaccagaucagccuguacgcccaggccagcggcagaaucaccgugagcaccaagagaagccagcagaccgugauccccaacaucggcagcagacccagagugagaaacauccccagcagaaucagcaucuacuggaccaucgugaagcccggcgacauccugcugaucaacagcaccggcaaccugaucgcccccagaggcuacuucaagaucagaagcggcaagagcagcaucaugagaagcgacgcccccaucggcaagugcaacagcgagugcaucacccccaacggcagcauccccaacgacaagcccuuccagaacgugaacagaaucaccuacggcgccugccccagauacgugaagcagaacacccugaagcuggccaccggcaugagaaacgugcccgagaagcagaccagaggcaucuucggcgccaucgccggcuucaucgagaacggcugggagggcaugguggacggcugguacggcuucagacaccagaacagcgagggcagaggccaggccgccgaccugaagagcacccaggccgccaucgaccagaucaacggcaagcugaacagacugaucggcaagaccaacgagaaguuccaccagaucgagaaggaguucagcgagguggagggcagaauccaggaccuggagaaguacguggaggacaccaagaucgaccuguggagcuacaacgccgagcugcugguggcccuggagaaccagcacaccaucgaccugaccgacagcgagaugaacaagcuguucgagaagaccaagaagcagcugagagagaacgccgaggacaugggcaacggcugcuucaagaucuaccacaagugcgacaacgccugcaucggcagcaucagaaacggcaccuacgaccacgacguguacagagacgaggcccugaacaacagauuccagaucaagggcguggagcugaagagcggcuacaaggacuggauccuguggaucagcuucgccaucagcugcuuccugcugugcaucgcccugcugggcuucaucaugugggccugccagaagggcaacaucagaugcaacaucugcaucuga

SEQ ID NO: 167053 - RNA, 1701 nt, Artificial Sequence
  derived and/or modified CDS sequence (opt4) from hemagglutinin__InfluenzaA__AEK98398
augaagaccaucaucgcccugagcuacauccugugccugguguucgcccagaagcugcccggcaacgacaacagcaccgccacccugugccugggccaccacgccgugcccaacggcaccaucgugaagaccaucaccaacgaccagaucgaggugaccaacgccaccgagcuggugcagagcagcagcaccggcgagaucugcgacagcccccaccagauccuggacggcaagaacugcacccugaucgacgcccugcugggcgacccccagugcgacggccugcagaacaagaagugggaccuguucguggagagaagcaaggccuacagcaacugcuaccccuacgacgugcccgacuacgccagccugagaagccugguggccagcagcggcacccuggaguucaacaacgagagcuucaacuggaccggcgugacccagaacggcaccagcagcgccugcaucagaagaagcaagaacagcuucuucagcagacugaacuggcugacccaccugaacuucaaguaccccgcccugaacgugaccaugcccaacaacgagcaguucgacaagcuguacaucuggggcgugcaccaccccggcaccgacaaggaccagaucuuccuguacgcccaggccagcggcagaaucaccgugagcaccaagagaagccagcagaccgccauccccaacaucggcagcagacccagagugagaaacauccccagcagaaucagcaucuacuggaccaucgugaagcccggcgacauccugcugaucaacagcaccggcaaccugaucgcccccagaggcuacuucaagaucagaagcggcaagagcagcaucaugagaagcgacgcccccaucggcaagugcaacagcgagugcaucacccccaacggcagcauccccaacgacaagcccuuccagaacgugaacagaaucaccuacggcgccugccccagauacgugaagcagaacacccugaagcuggccaccggcaugagaaacauccccgagaagcagaccagaggcaucuucggcgccaucgccggcuucaucgagaacggcugggagggcaugguggacggcugguacggcuucagacaccagaacagcgagggcagaggccaggccgccgaccugaagagcacccaggccgccaucgaccagaucaacggcaagcugaacagacugaucggcaagaccaacgagaaguuccaccagaucgagaaggaguucagcgagguggagggcagaauccaggaccuggagaaguacguggaggacaccaagaucgaccuguggagcuacaacgccgagcugcugguggcccuggagaaccagcacaccaucgaccugaccgacagcgagaugaacaagcuguucgagaagaccaagaagcagcugagagagaacgccgaggacaugggcaacggcugcuucaagaucuaccacaagugcgacaacgccugcaucggcagcaucagaaacggcaccuacgaccacgacguguacagagacgaggcccugaacaacagauuccagaucaagggcguggagcugaagagcggcuacaaggacuggaucaucuggaucagcuucgccaucagcugcuuccugcugugcguggcccugcugggcuucaucaugugggccugccagaagggcaacaucagaugcaacaucugcaucuga

SEQ ID NO: 167054 - RNA, 1701 nt, Artificial Sequence
  derived and/or modified CDS sequence (opt4) from hemagglutinin__InfluenzaA__AEK98400
auggagaccaucaucgcccugagcuacauccugagccugguguucgcccagaagcugcccggcaacgacaacagcaccgccacccugugccugggccaccacgccgugcccaacggcaccaucgugaagaccaucaccaacgaccagaucgaggugaccaacgccaccgagcuggugcagagcagcagcaccggcgagaucugcgacagcccccaccagauccuggacggcgagaacugcacccugaucgacgcccugcugggcgacccccagugcgacggcuuccagaacaagaagugggaccuguucguggagagaagcaaggccuacagcaacugcuaccccuacgacgugcccgacuacgccagccugagaagccugguggccagcagcggcacccuggaguucaacaacgagaacuucaacuggaccggcgugacccagaacggcaccagcagcgccugcaucagaagaagcaacaacagcuucuucagcagacugaacuggcugacccaccugagauucaaguaccccgcccugaacgugaccaugcccaacaacgaggaguucgacaagcuguacaucuggggcgugcaccaccccggcaccgacaacgaccagaucuuccuguacgcccaggccagcggcagaaucaccgugagcaccaagagaagccagcagaccgugauccccaacaucggcagcagacccagagugagaaacauccccagcagaaucagcaucuacuggaccaucgugaagcccggcgacauccugcugaucaacagcaccggcaaccugaucgcccccagaggcuacuucaagaucagaagcggcaagagcagcaucaugagaagcgacgcccccaucggcaagugcagcagcgagugcaucacccccaacggcagcauccccaacgacaagcccuuccagaacgugaacagaaucaccuacggcgccugccccagauacgugaagcagaacacccugaagcuggccaccggcaugagaaacgugcccgagaagcagaccagaggcaucuucggcgccaucgccggcuucaucgagaacggcugggagggcaugguggacggcugguacggcuucagacaccagaacagcgagggcaucggccaggccgccgaccugaagagcacccaggccgccaucgaccagaucaacggcaagcugaacagacugaucggcaagaccaacgagaaguuccaccagaucgagaaggaguucagcgagaucgagggcagaauccaggaccuggagaaguacguggaggacaccaagaucgaccuguggagcuacaacgccgagcugcugguggcccuggagaaccagcacaccaucgaccugaccgacagcgagaugaacaagcuguucgagaagaccaagaagcagcugagagagaacgccgaggacaugggcaacggcugcuucaagaucuaccacaagugcgacaacgccugcaucggcagcaucagaaacggcaccuacgaccacgacguguacagagacgaggcccugaacaacagauuccagaucaagggcguggagcugaagagcggcuacaaggacuggauccuguggaucagcuucgccaucagcugcuuccugcugugcguggcccugcugggcuucaucaugugggccugccagaagggcaacaucagaugcaacaucugcaucuga

SEQ ID NO: 167055 - RNA, 1701 nt, Artificial Sequence
  derived and/or modified CDS sequence (opt4) from hemagglutinin__InfluenzaA__AEK98402
augaagaccaucaucgcccugagcuacauccugugccugggcuucgcccagaagcugcccggcaacgacaacagcaccgccacccugugccugggccaccacgccgugcccaacggcaccaucgugaagaccaucaccaacgaccagaucgaggugaccaacgccaccgagcuggugcagagcagcagcaccggcgagaucugcgacagcccccaccagauccuggacggcaagaacugcacccugaucgacgcccugcugggcgacccccagugcgacggcuuccagaacaagaagugggaccuguucguggagagaagcaaggccuacagcaacugcuaccccuacgacgugcccgacuacgccagccugagaagccugguggccagcagcggcacccuggaguucaacaacgagagcuucaacuggaccggcgugacccagaacggcaccagcagcgccugcaucagaagaagcaagaacagcuucuucagcagacugaacuggcugacccaccugaacuucaaguaccccgcccugaacgugaccaugcccaacaacgagcaguucgacaagcuguacaucuggggcgugcaccaccccggcaccgacaaggaccagaucuuccuguacgcccaggccagcggcagaaucaccgugagcaccaagagaagccagcagaccgccauccccaacaucggcagcagacccagagugagaaacauccccagcagaaucagcaucuacuggaccaucgugaagcccggcgacauccugcugaucaacagcaccggcaaccugaucgcccccagaggcuacuucaagaucagaagcggcaagagcagcaucaugagaagcgacgcccccaucggcaagugcaacagcgagugcaucacccccaacggcagcauccccaacgacaagcccuuccagaacgugaacagaaucaccuacggcgccugccccagauacgugaagcagaacacccugaagcuggccaccggcaugagaaacgugcccgagaagcagaccagaggcaucuucggcgccaucgccggcuucaucgagaacggcugggagggcaugguggacggcugguacggcuucagacaccagaacagcgagggcagaggccaggccgccgaccugaagagcacccaggccgccaucaaccagaucaacggcaagcugaacagacugaucggcaagaccaacgagaaguuccaccagaucgagaaggaguucagcgagguggagggcagaauccaggaccuggagaaguacguggaggacaccaagaucgaccuguggagcuacaacgccgagcugcugguggcccuggagaaccagcacaccaucgaccugaccgacagcgagaugaacaagcuguucgagaagaccaagaagcagcugagagagaacgccgaggacaugggcaacggcugcuucaagaucuaccacaagugcgacaacgccugcaucggcagcaucagaaacggcaccuacgaccacgacguguacagagacgaggcccugaacaacagauuccagaucaagggcguggagcugaagagcggcuacaaggacuggauccuguggaucagcuucgccaucagcugcuuccugcugugcguggcccugcugggcuucaucaugugggccugccagaagggcaacaucagaugcaacaucugcaucuga

SEQ ID NO: 167056 - RNA, 1701 nt, Artificial Sequence
  derived and/or modified CDS sequence (opt4) from hemagglutinin__InfluenzaA__AEK98404
augaagaccaucaucgcccugagcuacauccugagccugguguucgcccagaagcugcccggcaacgacaacagcaccgccacccugugccugggccaccacgccgugcccaacggcaccaucgugaagaccaucaccaacgaccagaucgaggugaccaacgccaccgagcuggugcagagcagcagcaccggcgagaucugcgacagcccccaccagauccuggacggcgagaacugcacccugaucgacgcccugcugggcgacccccagugcgacggcuuccagaacaagaagugggaccuguucguggagagaagcaaggccuacagcaacugcuaccccuacgacgugcccgacuacgccagccugagaagccugguggccagcagcggcacccuggaguucaacaacgagaacuucaacuggaccggcgugacccagaacggcaccagcagcgccugcaucagaagaagcaacaacagcuucuucagcagacugaacuggcugacccaccugagauucaaguaccccgcccugaacgugaccaugcccaacaacgaggaguucgacaagcuguacaucuggggcgugcaccaccccggcaccgacaacgaccagaucuuccuguacgcccaggccagcggcagaaucaccgugagcaccaagagaagccagcagaccgugauccccaacaucggcagcagacccagagugagaaacauccccagcagaaucagcaucuacuggaccaucgugaagcccggcgacauccugcugaucaacagcaccggcaaccugaucgcccccagaggcuacuucaagaugagaagcggcaagagcagcaucaugagaagcgacgcccccaucggcaagugcaacagcgagugcaucacccccaacggcagcauccccaacgacaagcccuuccagaacgugaacagaaucaccuacggcgccugccccagauacgugaagcagaacacccugaagcuggccaccggcaugagaaacgugcccgagaagcagaccagaggcaucuucggcgccaucgccggcuucaucgagaacggcugggagggcaugguggacggcugguacggcuucagacaccagaacagcgagggcaucggccaggccgccgaccugaagagcacccaggccgccaucgaccagaucaacggcaagcugaacagacugaucggcaagaccaacgagaaguuccaccagaucgagaaggaguucagcgagguggagggcagaauccaggaccuggagaaguacguggaggacaccaagaucgaccuguggagcuacaacgccgagcugcugguggcccuggagaaccagcacaccaucgaccugaccgacagcgagaugaacaagcuguucgagaagaccaagaagcagcugagagagaacgccgaggacaugggcaacggcugcuucaagaucuaccacaagugcgacaacgccugcaucggcagcaucagaaacggcaccuacgaccacgacguguacagagacgaggcccugaacaacagauuccagaucaagggcguggagcugaagagcggcuacaaggacuggauccuguggaucagcuucgccaucagcugcuuccugcugugcguggcccugcugggcuucaucaugugggccugccagaagggcaacaucagaugcaacaucugcaucuga

SEQ ID NO: 167057 - RNA, 1701 nt, Artificial Sequence
  derived and/or modified CDS sequence (opt4) from hemagglutinin__InfluenzaA__AEK98406
augaagaccaucaucgcccugagcuacauccugagccugguguucgcccagaagcugcccggcaacgacaacagcaccgccacccugugccugggccaccacgccgugcccaacggcaccaucgugaagaccaucaccaacgaccagaucgaggugaccaacgccaccgagcuggugcagagcagcagcaccggcgagaucugcgacagcccccaccagauccuggacggcgagaacugcacccugaucgacgcccugcugggcgacccccagugcgacggcuuccagaacaagaagugggaccuguucguggagagaagcaaggccuacagcaacugcuaccccuacgacgugcccgacuacgccagccugagaagccugguggccagcagcggcacccuggaguucaacaacgagaacuucaacuggaccggcgugacccagaacggcaccagcagcgccugcaucagaagaagcaacaacagcuucuucagcagacugaacuggcugacccaccugagauucaaguaccccgcccugaacgugaccaugcccaacaacgaggagcuggacaagcuguacaucuggggcgugcaccaccccggcaccgacaacgaccagaucuuccuguacgcccaggccagcggcagaaucaccgugagcaccaagagaagccagcagaccgugauccccaacaucggcagcagacccagagugagaaacauccccagcagaaucagcaucuacuggaccaucgugaagcccggcgacauccugcugaucaacagcaccggcaaccugaucgcccccagaggcuacuucaagaucagaagcggcaagagcagcaucaugagaagcgacgcccccaucggcaagugcaacagcgagugcaucacccccaacggcagcauccccaacgacaagcccuuccagaacgugaacagaaucaccuacggcgccugccccagauacgugaagcagaacacccugaagcuggccaccggcaugagaaacgugcccgagaagcagaccagaggcaucuucggcgccaucgccggcuucaucgagaacggcugggagggcaugguggacggcugguacggcuucagacaccagaacagcgagggcaucggccaggccgccgaccugaagagcacccaggccgccaucgaccagaucaacggcaagcugaacagacugaucggcaagaccaacgagaaguuccaccagaucgagaaggaguucagcgagguggagggcagaauccaggaccuggagaaguacguggaggacaccaagaucgaccuguggagcuacaacgccgagcugcugguggcccuggagaaccagcacaccaucgaccugaccgacagcgagaugaacaagcuguucgagaagaccaagaagcagcugagagagaacgccgaggacaugggcaacggcugcuucaagaucuaccacaagugcgacaacgccugcaucggcagcaucagaaacggcaccuacgaccacgacguguacagagacgaggcccugaacaacagauuccagaucaagggcguggagcugaagagcggcuacaaggacuggauccuguggaucagcuucgccaucagcugcuuccugcugugcguggcccugcugggcuucgugaugugggccugccagaagggcaacaucagaugcaacaucugcaucuga

SEQ ID NO: 167058 - RNA, 1701 nt, Artificial Sequence
  derived and/or modified CDS sequence (opt4) from hemagglutinin__InfluenzaA__AEL11687
augaagaccaucaucgcccugagcuacauccugugccugguguucgcccagaagcugcccggcaacgacaacagcaccgccacccugugccugggccaccacgccgugcccaacggcaccaucgugaagaccaucaccaacgaccagaucgaggugaccaacgccaccgagcuggugcagagcagcagcaccggcggcaucugcgacagcccccaccagauccuggacggcgagaacugcacccugaucgacgcccugcugggcgacccccagugcgacggcuuccagaacaagaagugggaccuguucguggagagaagcaaggccuacagcaacugcuaccccuacgacgugcccgacuacgccagccugagaagccugguggccagcagcggcacccuggaguucaacaacgagagcuucaacuggaccggcgugacccagaacggcaccagcagcagcugcaagagaagaagcaacaacagcuucuucagcagacugaacuggcugacccaccugaaguucaaguaccccgcccugaacgugaccaugcccaacaacgagaaguucgacaagcuguacaucuggggcgugcaccaccccgugaccgacaacgaccagaucagacuguacgcccaggccagcggcagaaucaccgugagcaccaagagaagccagcagaccgugauccccaacaucggcuacagacccagagugagagacauccccagcagaaucagcaucuacuggaccaucgugaagcccggcgacauccugcugaucaacagcaccggcaaccugaucgcccccagaggcuacuucaagaucagaagcggcaagagcagcaucaugagaagcgacgcccccaucggcaagugcaacagcgagugcaucacccccaacggcagcauccccaacgacaagcccuuccagaacgugaacagaaucaccuacggcgccugccccagauacgugaagcagaacacccugaagcuggccaccggcaugagaaacgugcccgagaagcagaccagaggcaucuucggcgccaucgccggcuucaucgagaacggcugggagggcaugguggacggcugguacggcuucagacaccagaacagcgagggcaucggccaggccgccgaccugaagagcacccaggccgccaucaaccagaucaacggcaagcugaacagacugaucggcaagaccaacgagaaguuccaccagaucgagaaggaguucagcgagguggagggcagaauccaggaccuggagaaguacguggaggacaccaagaucgaccuguggagcuacaacgccgagcugcugguggcccuggagaaccagcacaccaucgaccugaccgacagcgagaugaacaagcuguucgagagaaccaagaagcagcugagagagaacgccgaggacaugggcaacggcugcuucaagaucuaccacaagugcgacaacgccugcaucggcagcaucagaaacggcaccuacgaccacgacguguacagagacgaggcccugaacaacagauuccagaucaagggcguggagcugaagagcggcuacaaggacuggauccuguggaucagcuucgccaucagcugcuuccugcugugcguggugcugcugggcuucaucaugugggccugccagaagggcaacaucagaugcaacaucugcaucuga

SEQ ID NO: 167059 - RNA, 1692 nt, Artificial Sequence
  derived and/or modified CDS sequence (opt4) from hemagglutinin__InfluenzaA__AEL31632
auggagaagaucgugcugcugcuggccaucgugagccuggugaagagcgaccagaucugcaucggcuaccacgccaacaacagcaccgagcagguggacaccaucauggagaagaacgugaccgugacccacgcccaggacauccuggagaagacccacaacggcaagcugugcaaccuggacggcgugaagccccugauccugagagacugcagcguggccggcuggcugcugggcaaccccaugugcgacgaguuccugaacgugcccgaguggagcuacaucguggagaagaucaaccccgccaacgaccugugcuaccccggcaacuucaacgacuacgaggagcugaagcaccugcugagcagaaucaaccacuucgagaagauccagaucauccccaagagcagcuggagcgaccacgaggccagcggcgugagcagcgugugccccuaccagggcagaagcagcuucuucagaaacgugguguggcugaccaagaaggacaacgccuaccccaccaucaagagaagcuacaacaacaccaaccaggaggaccugcuggugcuguggggcauccaccaccccaacgacgccgccgagcagaccagacuguaccagaaccccaccaccuacaucagcgugggcaccagcacccugaaccagagacuggugcccaagaucgccaccagaagcaaggugaacggccagagcggcagaauggaguucuucuggaccauccugaagagcaacgacgccaucaacuucgagagcaacggcaacuucaucgcccccgagaacgccuacaagaucgugaagaagggcgacagcaccaucaugaagagcgagcuggaguacggcaacugcaacaccaagugccagacccccaucggcgccaucaacagcagcaugcccuuccacaacauccacccccugaccaucggcgagugccccaaguacgugaagagcaacagacuggugcuggccaccggccugagaaacagcccccagggcgagaccagaggccuguucggcgccaucgccggcuucaucgagggcggcuggcagggcaugguggacggcugguacggcuaccaccacagcaacgagcagggcagcggcuacgccgccgacaaggagagcacccagaaggccaucgacggcgugaccaacaaggugaacagcaucaucgacaagaugaacacccaguucgaggccgugggcagagaguucaacaaccuggagagaagaaucgagaaccugaacaagaagauggaggacggcuuccuggacguguggaccuacaacgccgagcugcuggugcugauggagaacgagagaacccuggacuuccacgacagcaacgugaagaaccuguacgacaaggugagacugcagcugagagacaacgccaaggagcugggcaacggcugcuucgaguucuaccacagaugcgacaacgagugcauggagagcgugagaaacggcaccuacgacuacccccaguacagcgaggaggccagacugaagagagaggagaucagcggcgugaagcuggagagcaucggcaccuaccagauccugagcaucuacagcaccguggccagcagccuggcccuggccaucaugguggccggccuguuccuguggaugugcagcaacggcagccugcagugcagaaucugcaucuga

SEQ ID NO: 167060 - RNA, 1701 nt, Artificial Sequence; identical to SEQ ID NO: 166980
  derived and/or modified CDS sequence (opt4) from hemagglutinin__InfluenzaA__AEL89297

SEQ ID NO: 167061 - RNA, 1701 nt, Artificial Sequence; identical to SEQ ID NO: 166980
  derived and/or modified CDS sequence (opt4) from hemagglutinin__InfluenzaA__AEL89307

SEQ ID NO: 167062 - RNA, 1701 nt, Artificial Sequence; identical to SEQ ID NO: 166980
  derived and/or modified CDS sequence (opt4) from hemagglutinin__InfluenzaA__AEL89317

SEQ ID NO: 167063 - RNA, 1701 nt, Artificial Sequence; identical to SEQ ID NO: 166980
  derived and/or modified CDS sequence (opt4) from hemagglutinin__InfluenzaA__AEL89327

SEQ ID NO: 167064 - RNA, 1701 nt, Artificial Sequence; identical to SEQ ID NO: 166980
  derived and/or modified CDS sequence (opt4) from hemagglutinin__InfluenzaA__AEL89337

SEQ ID NO: 167065 - RNA, 1701 nt, Artificial Sequence; identical to SEQ ID NO: 166980
  derived and/or modified CDS sequence (opt4) from hemagglutinin__InfluenzaA__AEL89347

SEQ ID NO: 167066 - RNA, 1701 nt, Artificial Sequence; identical to SEQ ID NO: 166980
  derived and/or modified CDS sequence (opt4) from hemagglutinin__InfluenzaA__AEL89357

SEQ ID NO: 167067 - RNA, 1701 nt, Artificial Sequence; identical to SEQ ID NO: 166980
  derived and/or modified CDS sequence (opt4) from hemagglutinin__InfluenzaA__AEL89367

SEQ ID NO: 167068 - RNA, 1701 nt, Artificial Sequence; identical to SEQ ID NO: 166980
  derived and/or modified CDS sequence (opt4) from hemagglutinin__InfluenzaA__AEL89391

SEQ ID NO: 167069 - RNA, 1701 nt, Artificial Sequence; identical to SEQ ID NO: 166980
  derived and/or modified CDS sequence (opt4) from hemagglutinin__InfluenzaA__AEL89401

SEQ ID NO: 167070 - RNA, 1701 nt, Artificial Sequence; identical to SEQ ID NO: 166980
  derived and/or modified CDS sequence (opt4) from hemagglutinin__InfluenzaA__AEL89411

SEQ ID NO: 167071 - RNA, 1701 nt, Artificial Sequence; identical to SEQ ID NO: 166980
  derived and/or modified CDS sequence (opt4) from hemagglutinin__InfluenzaA__AEL89421

SEQ ID NO: 167072 - RNA, 1701 nt, Artificial Sequence; identical to SEQ ID NO: 166980
  derived and/or modified CDS sequence (opt4) from hemagglutinin__InfluenzaA__AEL89441

SEQ ID NO: 167073 - RNA, 1701 nt, Artificial Sequence; identical to SEQ ID NO: 166980
  derived and/or modified CDS sequence (opt4) from hemagglutinin__InfluenzaA__AEL89451

SEQ ID NO: 167074 - RNA, 1701 nt, Artificial Sequence; identical to SEQ ID NO: 166980
  derived and/or modified CDS sequence (opt4) from hemagglutinin__InfluenzaA__AEL89461

SEQ ID NO: 167075 - RNA, 1701 nt, Artificial Sequence; identical to SEQ ID NO: 166980
  derived and/or modified CDS sequence (opt4) from hemagglutinin__InfluenzaA__AEL89471

SEQ ID NO: 167076 - RNA, 1701 nt, Artificial Sequence
  derived and/or modified CDS sequence (opt4) from hemagglutinin__InfluenzaA__AEL89481
augaaggugauccugguggugcugcuguacaccuucgccaccgccaacgccgacacccugugcaucggcuaccacgccaacaacagcaccgacaccguggacaccgugcuggagaagaacgugaccgugacccacagcgugaaccugcuggaggacaagcacaacggcaagcugugcaagcugagaggcguggccccccugcaccugggcaagugcaacaucgccggcuggauccugggcaaccccgagugcgagagccugagcaccgccagcagcuggagcuacaucguggagaccagcagcagcgacaacggcaccugcuaccccggcgacuucaucgacuacgaggagcugagagagcagcugagcagcgugagcagcuucgagagauucgagaucuuccccaagaccagcagcuggcccaaccacgacagcaacaagggcgugaccgccgccugcccccacgccggcgccaagagcuucuacaagaaccugaucuggcuggugaagaagggcaacagcuaccccaagcugagcaagagcuacaucaacgacaagggcaaggaggugcuggugcuguggggcauccaccaccccagcaccagcgccgaccagcagagccuguaccagaacgccgacgccuacguguucgugggcaccagcagauacagcaagaaguucaagcccgagaucgccaucagacccaaggugagagaccaggagggcagaaugaacuacuacuggacccugguggagcccggcgacaagaucaccuucgaggccaccggcaaccugguggugcccagauacgccuucgccauggagagaaacgccggcagcggcaucaucaucagcgacacccccgugcacgacugcaacaccaccugccagacccccaagggcgccaucaacaccagccugcccuuccagaacauccaccccaucaccaucggcaagugccccaaguacgugaagagcaccaagcugagacuggccaccggccugagaaacgugcccagcauccagagcagaggccuguucggcgccaucgccggcuucaucgagggcggcuggaccggcaugguggacggcugguacggcuaccaccaccagaacgagcagggcagcggcuacgccgccgaccugaagagcacccagaacgccaucgacaagaucaccaacaaggugaacagcgugaucgagaagaugaacacccaguucaccgccgugggcaaggaguucaaccaccuggagaagagaaucgagaaccugaacaagaagguggacgacggcuuccuggacaucuggaccuacaacgccgagcugcuggugcugcuggagaacgagagaacccuggacuaccacgacagcaacgugaagaaccuguacgagaaggugagaagccagcugaagaacaacgccaaggagaucggcaacggcugcuucgaguucuaccacaagugcgacaacaccugcauggagagcgugaagaacggcaccuacgacuaccccaaguacagcgaggaggccaagcugaacagagaggagaucgacggcgugaagcuggagagcaccagaaucuaccagauccuggccaucuacagcaccguggccagcagccuggugcugguggugagccugggcgccaucagcuucuggaugugcagcaacggcagccugcagugcagaaucugcaucuga

SEQ ID NO: 167077 - RNA, 1701 nt, Artificial Sequence; identical to SEQ ID NO: 165644
  derived and/or modified CDS sequence (opt4) from hemagglutinin__InfluenzaA__AEL89491

SEQ ID NO: 167078 - RNA, 1701 nt, Artificial Sequence
  derived and/or modified CDS sequence (opt4) from hemagglutinin__InfluenzaA__AEL89501
augaaggccauccugguggugcugcuguacaccuucgccaccgccaacgccgacacccugugcaucggcuaccacgccaacaacagcaccgacaccguggacaccgugcuggagaagaacgugaccgugacccacagcgugaaccugcuggaggacaagcacaacggcaagcugugcaagcugagaggcguggccccccugcaccugggcaagugcaacaucgccggcuggauccugggcaaccccgagugcgagagccugagcaccgccagcagcuggagcuacaucguggagaccagcagcagcgacaacggcaccugcuaccccggcgacuucaucgacuacgaggagcugagagagcagcugagcagcgugagcagcuucgagagauucgagaucuuccccaagaccagcagcuggcccgaccacgacagcaacaagggcgugaccgccgccugcccccacgccggcgccaagagcuucuacaagaaccugaucuggcuggugaagaagggcaacagcuaccccaagcugagcaagagcuacaucaacgacgagggcaaggaggugcuggugcuguggggcauccaccaccccagcaccagcgccgaccagcagagccuguaccagaacgccgacgccuacguguucgugggcaccagcagauacagcaagaaguucaagcccgagaucgccaucagacccaaggugagagaccaggagggcagaaugaacuacuacuggacccugguggagcccggcgacaagaucaccuucgaggccaccggcaaccugguggugcccagauacgccuucgccauggagagaaacgccggcagcggcaucaucaucagcgacacccccgugcacgacugcaacaccaccugccagacccccaagggcgccaucaacaccagccugcccuuccagaacauccaccccaucaccaucggcaagugccccaaguacgugaagagcaccaagcugagacuggccaccggccugagaaacgugcccagcauccagagcagaggccuguucggcgccaucgccggcuucaucgagggcggcuggaccggcaugguggacggcugguacggcuaccaccaccagaacgagcagggcagcggcuacgccgccgaccugaagagcacccagaacgccaucgacaagaucaccaacaaggugaacagcgugaucgagaagaugaacacccaguucaccgccgugggcaaggaguucaaccaccuggagaagagaaucgagaaccugaacaagaagguggacgacggcuuccuggacaucuggaccuacaacgccgagcugcuggugcugcuggagaacgagagaacccuggacuaccacgacagcaacgugaagaaccuguacgagaaggugagaagccagcugaagaacaacgccaaggagaucggcaacggcugcuucgaguucuaccacaagugcgacaacaccugcauggagagcgugaagaacggcaccuacgacuaccccaaguacagcgaggaggccaagcugaacagagaggagaucgacggcgugaagcuggagagcaccagaaucuaccagauccuggccaucuacagcaccguggccagcagccuggugcugguggugagccugggcgccaucagcuucuggaugugcagcaacggcagccugcagugcagaaucugcaucuga

SEQ ID NO: 167079 - RNA, 1701 nt, Artificial Sequence; identical to SEQ ID NO: 163893
  derived and/or modified CDS sequence (opt4) from hemagglutinin__InfluenzaA__AEL89511

SEQ ID NO: 167080 - RNA, 1701 nt, Artificial Sequence; identical to SEQ ID NO: 165644
  derived and/or modified CDS sequence (opt4) from hemagglutinin__InfluenzaA__AEL89521

SEQ ID NO: 167081 - RNA, 1701 nt, Artificial Sequence
  derived and/or modified CDS sequence (opt4) from hemagglutinin__InfluenzaA__AEL89531
augaaggccauccugguggugcugcuguacaccuucaccaccgccaacgccgacacccugugcaucggcuaccacgccaacaacagcaccgacaccguggacaccgugcuggagaagaacgugaccgugacccacagcgugaaccugcuggaggacaagcacaacggcaagcugugccagcugagaggcguggccccccugcaccugggcaagugcaacaucgccggcuggauccugggcaaccccgagugcgagagccugagcaccgccagcagcuggagcuacaucguggagaccagcagcagcgacaacggcaccugcuaccccggcgacuucaucgacuacgaggagcugagagagcagcugagcagcgugagcagcuucgagagauucgagauguuccccaagaccagcagcuggcccaaccacgacagcaacaagggcgugaccgccgccugcccccacgccggcgccaagagcuucuacaagaaccugaucuggcuggugaagaagggcaacagcuaccccaagcugagcaagagcuacaucaacgacaagggcaaggaggugcuggugcuguggggcauccaccaccccagcaccagcgccgaccagcagagccuguaccagaacgccgacgccuacguguucgugggcaccagcagauacagcaagaaguucaagcccgagaucgccaucagacccaaggugagagaccaggagggcagaaugaacuacuacuggacccugguggagcccggcgacaagaucaccuucgaggccaccggcaaccugguggugcccagauacgccuucgccauggagagaaacgccggcagcggcaucaucaucagcgacacccccgugcacgacugcaacaccaccugccagacccccaagggcgccaucaacaccagccugcccuuccagaacauccaccccaucaccaucggcaagugccccaaguacgugaagagcaccaagcugagacuggccaccggccugagaaacgugcccagcauccagagcagaggccuguucggcgccaucgccggcuucaucgagggcggcuggaccggcaugguggacggcugguacggcuaccaccaccagaacgagcagggcagcggcuacgccgccgaccugaagagcacccagaacgccaucgacaagaucaccaacaaggugaacagcgugaucgagaagaugaacacccaguucaccgccgugggcaaggaguucaaccaccuggagaagagaaucgagaaccugaacaagaagguggacgacggcuuccuggacaucuggaccuacaacgccgagcugcuggugcugcuggagaacgagagaacccuggacuaccacgacagcaacgugaagaaccuguacgagaaggugagaagccagcugaagaacaacgccaaggagaucggcaacggcugcuucgaguucuaccacaagugcgacaacaccugcauggagagcgugaagaacggcaccuacgacuaccccaaguacagcgaggaggccaagcugaacagagaggagaucgacggcgugaagcuggagagcaccagaaucuaccagauccuggccaucuacagcaccguggccagcagccuggugcugguggugagccugggcgccaucagcuucuggaugugcagcaacggcagccugcagugcagaaucugcaucuga

SEQ ID NO: 167082 - RNA, 1701 nt, Artificial Sequence; identical to SEQ ID NO: 165644
  derived and/or modified CDS sequence (opt4) from hemagglutinin__InfluenzaA__AEL89541

SEQ ID NO: 167083 - RNA, 1701 nt, Artificial Sequence
  derived and/or modified CDS sequence (opt4) from hemagglutinin__InfluenzaA__AEL89551
augaaggccauccugguggugcugcuguacaccuucgccaccgccaacgccgacacccugugcaucggcuaccacgccaacaacagcaccgacaccguggacaccgugcuggagaagaacgugaccgugacccacagcgugaaccugcuggaggacaagcacaacggcaagcugugcaagcugagaggcguggccccccugcaccugggcaagugcaacaucgccggcuggauccugggcaaccccgagugcgagagccugagcaccgccagcagcuggagcuacaucguggagaccagcagcagcgacaacggcaccugcuaccccggcgacuucaucgacuacgaggagcugagagagcagcugagcagcgugagcagcuucgagagauucgagaucuuccccaagaccagcagcuggcccgaccacgacagcaacaagggcgugaccgccgccugcccccacgccggcgccaagagcuucuacaagaaccugaucuggcuggugaagaagggcaacagcuaccccaagcugagcaagagcuacaucaacgacaagggcaaggaggugcuggugcuguggggcauccaccaccccagcaccagcgccgaccagcagagccuguaccagaacgccgacgccuacguguucgugggcaccagcagauacagcaagaaguucaagcccgagaucgccaucagacccaaggugagagaccaggagggcagaaugaacuacuacuggacccugguggagcccggcgacaagaucaccuucgaggccaccggcaaccugguggugcccagauacgccuucgccauggagagaaacgccggcagcggcaucaucaucagcgacacccccgcccacgacugcaacaccaccugccagacccccaagggcgccaucaacaccagccugcccuuccagaacauccaccccaucaccaucggcaagugccccaaguacgugaagagcaccaagcugagacuggccaccggccugagaaacgugcccagcauccagagcagaggccuguucggcgccaucgccggcuucaucgagggcggcuggaccggcaugguggacggcugguacggcuaccaccaccagaacgagcagggcagcggcuacgccgccgaccugaagagcacccagaacgccaucgacaagaucaccaacaaggugaacagcgugaucgagaagaugaacacccaguucaccgccgugggcaaggaguucaaccaccuggagaagagaaucgagaaccugaacaagaagguggacgacggcuuccuggacaucuggaccuacaacgccgagcugcuggugcugcuggagaacgagagaacccuggacuaccacgacagcaacgugaagaaccuguacgagaaggugagaagccagcugaagaacaacgccaaggagaucggcaacggcugcuucgaguucuaccacaagugcgacaacaccugcauggagagcgugaagaacggcaccuacgacuaccccaaguacagcgaggaggccaagcugaacagagaggagaucgacggcgugaagcuggagagcaccagaaucuaccagauccuggccaucuacagcaccguggccagcagccuggugcugguggugagccugggcgccaucagcuucuggaugugcagcaacggcagccugcagugcagaaucugcaucuga

SEQ ID NO: 167084 - RNA, 1701 nt, Artificial Sequence
  derived and/or modified CDS sequence (opt4) from hemagglutinin__InfluenzaA__AEL89561
augaaggccauccugguggugcugcuguacaccuucgccaccgccaacgccgacacccugugcaucggcuaccacgccaacaacagcaccgacaccguggacaccgugcuggagaagaacgugaccgugacccacagcgugaaccugcuggaggacaagcacaacggcaagcugugcaagcugagaggcguggccccccugcaccugggcaagugcaacaucgccggcuggauccugggcaaccccgagugcgagagccugagcaccgccagcagcuggagcuacaucguggagaccagcagcagcggcaacggcaccugcuaccccggcgacuucaucgacuacgaggagcugagagagcagcugagcagcgugagcagcuucgagagauucgagaucuuccccaagaccagcagcuggcccgaccacgacagcaacaagggcgugaccgccgccugcccccacgccggcgccaagagcuucuacaagaaccugaucuggcuggugaagaagggcaacagcuaccccaagcugagcaagagcuacaucaacgacaagggcaaggaggugcuggugcuguggggcauccaccaccccagcaccagcgccgaccagcagagccuguaccagaacgccgacgccuacguguucgugggcaccagcagauacagcaagaaguucaagcccgagaucgccaucagacccaaggugagagaccaggagggcagaaugaacuacuacuggacccugguggagcccggcgacaagaucaccuucgaggccaccggcaaccugguggugcccagauacgccuucgccauggagagaaacgccggcagcggcaucaucaucagcgacacccccgugcacgacugcaacaccaccugccagacccccaagggcgccaucaacaccagccugcccuuccagaacauccaccccaucaccaucggcaagugccccaaguacgugaagagcaccaagcugagacuggccaccggccugagaaacgugcccagcauccagagcagaggccuguucggcgccaucgccggcuucaucgagggcggcuggaccggcaugguggacggcugguacggcuaccaccaccagaacgagcagggcagcggcuacgccgccgaccugaagagcacccagaacgccaucgacaagaucaccaacaaggugaacagcgugaucgagaagaugaacacccaguucaccgccgugggcaaggaguucaaccaccuggagaagagaaucgagaaccugaacaagaagguggacgacggcuuccuggacaucuggaccuacaacgccgagcugcuggugcugcuggagaacgagagaacccuggacuaccacgacagcaacgugaagaaccuguacgagaaggugagaagccagcugaagaacaacgccaaggagaucggcaacggcugcuucgaguucuaccacaagugcgacaacaccugcauggagagcgugaagaacggcaccuacgacuaccccaaguacagcgaggaggccaagcugaacagagaggagaucgacggcgugaagcuggagagcaccgagaucuaccagauccuggccaucuacagcaccguggccagcagccuggugcugguggugagccugggcgccaucagcuucuggaugugcagcaacggcagccugcagugcagaaucugcaucuga

SEQ ID NO: 167085 - RNA, 1701 nt, Artificial Sequence; identical to SEQ ID NO: 165644
  derived and/or modified CDS sequence (opt4) from hemagglutinin__InfluenzaA__AEL89571

SEQ ID NO: 167086 - RNA, 1701 nt, Artificial Sequence
  derived and/or modified CDS sequence (opt4) from hemagglutinin__InfluenzaA__AEL89581
augaaggccauccugguggugcugcuguacaccuucgccaccgccaacgccgacacccugugcaucggcuaccacgccaacaacagcaccgacaccguggacaccgugcuggagaagaacgugaccgugacccacagcgugaaccugcuggaggacaagcacaacggcaagcugugcaagcugagaggcguggccccccugcaccugggcaagugcaacaucgccggcuggauccugggcaaccccgagugcgagagccugagcaccgccagcagcuggagcuacaucguggagaccagcagcagcgacaacggcaccugcuaccccggcgacuucaucgacuacgaggagcugagagagcagcugagcagcgugagcagcuucgagagauucgagauguuccccaagaccagcagcuggcccgaccacgacagcaacaagggcgugaccgccgccugcccccacgccggcgccaagagcuucuacaagaaccugaucuggcuggugaagaagggcaacagcuaccccaagcugagcaagagcuacaucaacgacaagggcaaggaggugcuggugcuguggggcauccaccaccccagcaccagcgccgaccagcagagccuguaccagaacgccgacgccuacguguucgugggcaccagcagauacagcaagaaguucaagcccgagaucgccaucagacccaaggugagagaccaggagggcagaaugaacuacuacuggacccugguggagcccggcgacaagaucaccuucgaggccaccggcaaccugguggugcccagauacgccuucgccauggagagaaacgccggcagcggcaucaucaucagcgacacccccgugcacgacugcaacaccaccugccagacccccaagggcgccaucaacaccagccugcccuuccagaacauccaccccaucaccaucggcaagugccccaaguacgugaagagcaccaagcugagacuggccaccggccugagaaacgugcccagcauccagagcagaggccuguucggcgccaucgccggcuucaucgagggcggcuggaccggcaugguggacggcugguacggcuaccaccaccagaacgagcagggcagcggcuacgccgccgaccugaagagcacccagaacgccaucgacaagaucaccaacaaggugaacagcgugaucgagaagaugaacacccaguucaccgccgugggcaaggaguucaaccaccuggagaagagaaucgagaaccugaacaagaagguggacgacggcuuccuggacaucuggaccuacaacgccgagcugcuggugcugcuggagaacgagagaacccuggacuaccacgacagcaacgugaagaaccuguacgagaaggugagaagccagcugaagaacaacgccaaggagaucggcaacggcugcuucgaguucuaccacaagugcgacaacaccugcauggagagcgugaagaacggcaccuacgacuaccccaaguacagcgaggaggccaagcugaacagagaggagaucgacggcgugaagcuggagagcaccagaaucuaccagauccuggccaucuacagcaccguggccagcagccuggugcugguggugagccugggcgccaucagcuucuggaugugcagcaacggcagccugcagugcagaaucugcaucuga

SEQ ID NO: 167087 - RNA, 1701 nt, Artificial Sequence; identical to SEQ ID NO: 166514
  derived and/or modified CDS sequence (opt4) from hemagglutinin__InfluenzaA__AEL89591

SEQ ID NO: 167088 - RNA, 1701 nt, Artificial Sequence
  derived and/or modified CDS sequence (opt4) from hemagglutinin__InfluenzaA__AEL89601
augaaggccauccugguggugcugcuguacaccuucgccaccgccaacgccgacacccugugcaucggcuaccacgccaacaacagcaccgacaccguggacaccgugcuggagaagaacgugaccgugacccacagcgugaaccugcuggaggacaagcacaacggcaagcugugcaagcugagaggcguggccccccugcaccugggcaagugcaacaucgccggcuggauccugggcaaccccgagugcgagagccugagcaccgccagcagcuggagcuacaucguggagaccagcagcagcgacaacggcaccugcuaccccggcgacuucaucgacuacgaggagcugagagagcagcugagcagcgugagcagcuucgagagauucgagaucuuccccaagaccagcagcuggcccaaccacgacagcaacaagggcgugaccaccgccugcccccacgccggcgccaagagcuucuacaagaaccugaucuggcuggugaagaagggcaacagcuaccccaagcugagcaagagcuacaucaacgacaagggcaaggaggugcuggugcuguggggcauccaccacccccccaccagcgccgaccagcagagccuguaccagaacgccgacgccuacguguucgugggcaccagcagauacagcaagaaguucaagcccgagaucgccaucagacccaaggugagagaccaggagggcagaaugaacuacuacuggacccugguggagcccggcgacaagaucaccuucgaggccaccggcaaccugguggugcccagauacgccuucgccauggagagaaacgccggcagcggcaucaucaucagcgacacccccgugcacgacugcaacaccaccugccagacccccaagggcgccaucaacaccagccugcccuuccagaacauccaccccaucaccaucggcaagugccccaaguacgugaagagcaccaagcugagacuggccaccggccugagaaacgugcccagcauccagagcagaggccuguucggcgccaucgccggcuucaucgagggcggcuggaccggcaugguggacggcugguacggcuaccaccaccagaacgagcagggcagcggcuacgccgccgaccugaagagcacccagaacgccaucgacgagaucaccaacaaggugaacagcgugaucgagaagaugaacacccaguucaccgccgugggcaaggaguucaaccaccuggagaagagaaucgagaaccugaacaagaagguggacgacggcuuccuggacaucuggaccuacaacgccgagcugcuggugcugcuggagaacgagagaacccuggacuaccacgacagcaaggugaagaaccuguacgagaaggugagaagccagcugaagaacaacgccaaggagaucggcaacggcugcuucgaguucuaccacaagugcgacaacaccugcauggagagcgugaagaacggcaccuacgacuaccccaaguacagcgaggaggccaagcugaacagagaggagaucgacggcgugaagcuggagagcaccagaaucuaccagauccuggccaucuacagcaccguggccagcagccuggugcugguggugagccugggcgccaucagcuucuggaugugcagcaacggcagccugcagugcagaaucugcaucuga

SEQ ID NO: 167089 - RNA, 1701 nt, Artificial Sequence; identical to SEQ ID NO: 166514
  derived and/or modified CDS sequence (opt4) from hemagglutinin__InfluenzaA__AEL89611

SEQ ID NO: 167090 - RNA, 1701 nt, Artificial Sequence; identical to SEQ ID NO: 166956
  derived and/or modified CDS sequence (opt4) from hemagglutinin__InfluenzaA__AEL89621

SEQ ID NO: 167091 - RNA, 1701 nt, Artificial Sequence; identical to SEQ ID NO: 165644
  derived and/or modified CDS sequence (opt4) from hemagglutinin__InfluenzaA__AEL89631

SEQ ID NO: 167092 - RNA, 1701 nt, Artificial Sequence; identical to SEQ ID NO: 166980
  derived and/or modified CDS sequence (opt4) from hemagglutinin__InfluenzaA__AEL89641

SEQ ID NO: 167093 - RNA, 1701 nt, Artificial Sequence
  derived and/or modified CDS sequence (opt4) from hemagglutinin__InfluenzaA__AEL89651
augaaggccauccugguggugcugcuguacaccuucgccaccgccaacgccgacacccugugcaucggcuaccacgccaacaacagcaccgacaccguggacaccgugcuggagaagaacgugaccgugacccacagcgugaaccugcuggaggacaagcacaacggcaagcugugcaagcugagaggcguggccccccugcaccugggcaagugcaacaucgccggcuggauccugggcaaccccgagugcgagagccugagcaccgccagcagcuggagcuacaucguggagaccagcagcagcgacaacggcaccugcuaccccggcguguucaucgacuacgaggagcugagagagcagcugagcagcgugagcagcuucgagagauucgagaucuuccccaagaccagcagcuggcccaaccacgacagcaacaagggcgugaccgccgccugcccccacgccggcgccaagagcuucuacaagaaccugaucuggcuggugaagaagggcaacagcuaccccaagcugagcaagagcuacaucaacgacaagggcaaggaggugcuggugcuguggggcauccaccaccccagcaccaccgccgaccagcagagccuguaccagaacgccgacgccuacguguucgugggcaccagcagauacagcaagaaguucaagcccgagaucgccaucagacccaaggugagagaccaggagggcagaaugaacuacuacuggacccugguggagcccggcgacaagaucaccuucgaggccaccggcaaccugguggugcccagauacgccuucgccauggagagaaacgccggcagcggcaucaucaucagcgacacccccgugcacgacugcaacaccaccugccagacccccaagggcgccaucaacaccagccugcccuuccagaacauccaccccaucaccaucggcaagugccccaaguucgugaagagcaccaagcugagacuggccaccggccugagaaacgugcccagcauccagagcagaggccuguucggcgccaucgccggcuucaucgagggcggcuggaccggcaugguggacggcugguacggcuaccaccaccagaacgagcagggcagcggcuacgccgccgaccugaagagcacccagaacgccaucgacaagaucaccaacaaggugaacagcgugaucgagaagaugaacacccaguucaccgccgugggcaaggaguucaaccaccuggagaagagaaucgagaaccugaacaagaagguggacgacggcuuccuggacaucuggaccuacaacgccgagcugcuggugcugcuggagaacgagagaacccuggacuaccacgacagcaacgugaagaaccuguacgagaaggugagaaaccagcugaagaacaacgccaaggagaucggcaacggcugcuucgaguucuaccacaagugcgacaacaccugcauggagagcgugaagaacggcaccuacgacuaccccaaguacagcgaggaggccaagcugaacagagaggagaucgacggcgugaagcuggagagcaccagaaucuaccagauccuggccaucuacagcaccguggccagcagccuggugcugguggugagccugggcgccaucagcuucuggaugugcagcaacggcagccugcagugcagaaucugcaucuga

SEQ ID NO: 167094 - RNA, 1701 nt, Artificial Sequence; identical to SEQ ID NO: 166495
  derived and/or modified CDS sequence (opt4) from hemagglutinin__InfluenzaA__AEL89661

SEQ ID NO: 167095 - RNA, 1701 nt, Artificial Sequence
  derived and/or modified CDS sequence (opt4) from hemagglutinin__InfluenzaA__AEL89671
augaaggccauccugguggugcugcuguacaccuucgccaccgccaacgccgacacccugugcaucggcuaccacgccaacaacagcaccgacaccguggacaccgugcuggagaagaacgugaccgugacccacagcgugaaccugcuggaggacaagcacaacggcaagcugugcaagcugagaggcguggccccccugcaccugggcaagugcaacaucgccggcuggauccugggcaaccccgagugcgagagccugagcaccgccagcagcuggagcuacaucguggagaccagcagcagcgacaacggcaccugcuaccccggcgacuucaucgacuacgaggagcugagagagcagcugagcagcgugagcagcuucgagagauucgagaucuuccccaagaccagcagcuggcccaaccacgacagcaacaagggcgugaccgccgccugcccccacgccggcgccaagagcuucuacaagaaccugaucuggcuggugaagaagggcaacagcuaccccaagcugagcaagagcuacaucaacgacaagggcaaggaggugcuggugcuguggggcauccaccaccccagcaccaccgccgaccagcagagccuguaccagagcgccgacaccuacguguucgugggcaccagcagauacagcaagaaguucaagcccgagaucgccaucagacccaaggugagagaccaggagggcagaaugaacuacuacuggacccugguggagcccggcgacaagaucaccuucgaggccaccggcaaccugguggugcccagauacgccuucgccauggagagaaacgccggcagcggcaucaucaucagcgacacccccgugcacgacugcaacaccaccugccagacccccaagggcgccaucaacaccagccugcccuuccagaacauccaccccaucaccaucggcaagugccccaaguacgugaagagcaccaagcugagacuggccaccggccugagaaacgugcccagcauccagagcagaggccuguucggcgccaucgccggcuucaucgagggcggcuggaccggcaugguggacggcugguacggcuaccaccaccagaacgagcagggcagcggcuacgccgccgaccugaagagcacccagaacgccaucgacaagaucaccaacaaggugaacagcgugaucgagaagaugaacacccaguucaccgccgugggcaaggaguucaaccaccuggagaagagaaucgagaaccugaacaagaagguggacgacggcuuccuggacaucuggaccuacaacgccgagcugcuggugcugcuggagaacgagagaacccuggacuaccacgacagcaacgugaagaaccuguacgagaaggugagaaaccagcugaagaacaacgccaaggagaucggcaacggcugcuucgaguucuaccacaagugcgacaacaccugcauggagagcgugaagaacggcaccuacgacuaccccaaguacagcgaggaggccaagcugaacagagaggagaucgacggcgugaagcuggagagcaccagaaucuaccagauccuggccaucuacagcaccguggccagcagccuggugcugguggugagccugggcgccaucagcuucuggaugugcagcaacggcagccugcagugcagaaucugcaucuga

SEQ ID NO: 167096 - RNA, 1701 nt, Artificial Sequence; identical to SEQ ID NO: 166495
  derived and/or modified CDS sequence (opt4) from hemagglutinin__InfluenzaA__AEL89691

SEQ ID NO: 167097 - RNA, 1701 nt, Artificial Sequence
  derived and/or modified CDS sequence (opt4) from hemagglutinin__InfluenzaA__AEL89701
augaaggccauccugguggugcugcuguacaccuucgccaccgccaacgccgacacccugugcaucggcuaccacgccaacaacagcaccgacaccguggacaccgugcuggagaagaacgugaccgugacccacagcgugaaccugcuggaggacaagcacaacggcaagcugugcaagcugagaggcguggccccccugcaccugggcaagugcaacaucgccggcuggauccugggcaaccccgagugcgagagccugagcaccgccagcagcuggagcuacaucguggagaccagcagcagcgacaacggcaccugcuaccccggcgacuucaucgacuacgaggagcugagagagcagcugagcagcgugagcagcuucgagagauucgagaucuuccccaagaccagcagcuggcccaaccacgacagcaacaagggcgugaccaccgccugcccccacgccggcgccaagagcuucuacaagaaccugaucuggcuggugaagaagggcaacagcuaccccaagcugagcaagagcuacaucaacgacaagggcaaggaggugcuggugcuguggggcauccaccacccccccaccagcgccgaccagcagaaccuguaccagaacgccgacgccuacguguucgugggcaccagcagauacagcaagaaguucaagcccgagaucgccaucagacccaaggugagagaccaggagggcagaaugaacuacuacuggacccugguggagcccggcgacaagaucaccuucgaggccaccggcaaccugguggugcccagauacgccuucgccauggagagaaacgccggcagcggcaucaucaucagcgacacccccgugcacgacugcaacaccaccugccagacccccaagggcgccaucaacaccagccugcccuuccagaacauccaccccaucaccaucggcaagugccccaaguacgugaagagcaccaagcugagacuggccaccggccugagaaacgugcccagcauccagagcagaggccuguucggcgccaucgccggcuucaucgagggcggcuggaccggcaugguggacggcugguacggcuaccaccaccagaacgagcagggcagcggcuacgccgccgaccugaagagcacccagaacgccaucgacggcaucaccaacaaggugaacagcgugaucgagaagaugaacacccaguucaccgccgugggcaaggaguucaaccaccuggagaagagaaucgagaaccugaacaagaagguggacgacggcuuccuggacaucuggaccuacaacgccgagcugcuggugcugcuggagaacgagagaacccuggacuaccacgacagcaacgugaagaaccuguacgagaaggugagaagccagcugaagaacaacgccaaggagaucggcaacggcugcuucgaguucuaccacaagugcgacaacaccugcauggagagcgugaagaacggcaccuacgacuaccccaaguacagcgaggaggccaagcugaacagagaggagaucgacggcgugaagcuggagagcaccaugaucuaccagauccuggccaucuacagcaccguggccagcagccuggugcugguggugagccugggcgccaucagcuucuggaugugcagcaacggcagccugcagugcagaaucugcaucuga

SEQ ID NO: 167098 - RNA, 1701 nt, Artificial Sequence; identical to SEQ ID NO: 167097
  derived and/or modified CDS sequence (opt4) from hemagglutinin__InfluenzaA__AEL89711

SEQ ID NO: 167099 - RNA, 1701 nt, Artificial Sequence; identical to SEQ ID NO: 166495
  derived and/or modified CDS sequence (opt4) from hemagglutinin__InfluenzaA__AEL89721

SEQ ID NO: 167100 - RNA, 1701 nt, Artificial Sequence
  derived and/or modified CDS sequence (opt4) from hemagglutinin__InfluenzaA__AEL89741
augaaggccauccugguggugcugcuguacaccuucgccaccaccaacgccgacacccugugcaucggcuaccacgccaacaacagcaccgacaccguggacaccgugcuggagaagaacgugaccgugacccacagcgugaaccugcuggaggacaagcacaacggcaagcugugcaagcugagaggcguggccccccugcaccugggcaagugcaacaucgccggcuggauccugggcaaccccgagugcgagagccugagcaccgccagcagcuggagcuacaucguggagaccagcagcagcgacaacggcaccugcuaccccggcgacuucaucgacuacgaggagcugagagagcagcugagcagcgugagcagcuucgagagauucgagaucuuccccaagaccagcagcuggcccaaccacgacagcaacaagggcgugaccgccgccugcccccacgccggcgccaagagcuucuacaagaaccugaucuggcuggugaagaagggcaacagcuaccccaagcugagcaagagcuacaucaacgacaagggcaaggaggugcuggugcuguggggcauccaccaccccagcaccaccgccgaccagcagagccuguaccagaacgccgacaccuacguguucgugggcaccagcagauacagcaagaaguucaagcccgagaucgccaucagacccaaggugagagaccaggagggcagaaugaacuacuacuggacccugguggagcccggcgacaagaucaccuucgaggccaccggcaaccugguggugcccagauacgccuucgccauggagagaaacgccggcagcggcaucaucaucagcgacacccccgugcacgacugcaacaccaccugccagacccccaagggcgccaucaacaccagccugcccuuccagaacauccaccccaucaccaucggcaagugccccaaguacgugaagagcaccaagcugagacuggccaccggccugagaaacgugcccagcauccagagcagaggccuguucggcgccaucgccggcuucaucgagggcggcuggaccggcaugguggacggcugguacggcuaccaccaccagaacgagcagggcagcggcuacgccgccgaccugaagagcacccagaacgccaucgacaagaucaccaacaaggugaacagcgugaucgagaagaugaacacccaguucaccgccgugggcaaggaguucaaccaccuggagaagagaaucgagaaccugaacaagaagguggacgacggcuuccuggacaucuggaccuacaacgccgagcugcuggugcugcuggagaacgagagaacccuggacuaccacgacagcaacgugaagaaccuguacgagaaggugagaaaccagcugaagaacaacgccaaggagaucggcaacggcugcuucgaguucuaccacaagugcgacaacaccugcauggagagcgugaagaacggcaccuacgacuaccccaaguacagcgaggaggccaagcugaacagagaggagaucgacggcgugaagcuggagagcaccagaaucuaccagauccuggccaucuacagcaccguggccagcagccuggugcugguggugagccugggcgccaucagcuucuggaugugcagcaacggcagccugcagugcagaaucugcaucuga

SEQ ID NO: 167101 - RNA, 1701 nt, Artificial Sequence; identical to SEQ ID NO: 165644
  derived and/or modified CDS sequence (opt4) from hemagglutinin__InfluenzaA__AEL89751

SEQ ID NO: 167102 - RNA, 1701 nt, Artificial Sequence
  derived and/or modified CDS sequence (opt4) from hemagglutinin__InfluenzaA__AEL89761
augaaggccauccugguggugcugcuguacaccuucgccaccgccaacgccgacacccugugcaucggcuaccacgccaacaacagcaccgacaccguggacaccgugcuggagaagaacgugaccgugacccacagcgugaaccugcuggaggacaagcacaacggcaagcugugcaagcugagaggcguggccccccugcaccugggcaagugcaacaucgccggcuggauccugggcaaccccgagugcgagagccugagcaccgccagcagcuggagcuacaucguggagaccagcagcagcgacaacggcaccugcuaccccggcgacuucaucgacuacgaggagcugagagagcagcugagcagcgugagcagcuucgagagauucgagaucuuccccaagaccagcagcuggcccaaccacgacagcaacaagggcgugaccaccgccugcccccacgccggcgccaagagcuucuacaagaaccugaucuggcuggugaagaagggcaacagcuaccccaagcugagcaagagcuacaucaacgacaagggcaaggaggugcuggugcuguggggcauccaccacccccccaccagcgccgaccagcagagccuguaccagaacgccgacgccuacguguucgugggcaccagcagauacagcaagaaguucaagcccgagaucgccaucagacccaaggugagagaccaggagggcagaaugaacuacuacuggacccugguggagcccggcgacaagaucaccuucgaggccaccggcaaccugguggugcccagauacgccuucgccauggagagaaacgccggcagcggcaucaucaucagcgacacccccgugcacgacugcaacaccaccugccagacccccaagggcgccaucaacaccagccugcccuuccagaacauccaccccaucaccaucggcaagugccccaaguacgugaagagcaccaagcugagacuggccaccggccugagaaacgugcccagcauccagagcagaggccuguucggcgccaucgccggcuucaucgagggcggcuggaccggcaugguggacggcugguacggcuaccaccaccagaacgagcagggcagcggcuacgccgccgaccugaagagcacccagaacgccaucgacggcaucaccaacaaggugaacagcgugaucgagaagaugaacacccaguucaccgccgugggcaaggaguucaaccaccuggagaagagaaucgagaaccugaacaagaagguggacgacggcuuccuggacaucuggaccuacaacgccgagcugcuggugcugcuggagaacgagagaacccuggacuaccacgacagcaacgugaagaaccuguacgagaaggugagaagccagcugaagaacaacgccaaggagaucggcaacggcugcuucgaguucuaccacaagugcgacaacaccugcauggagagcgugaagaacggcaccuacgacuaccccaaguacagcgaggaggccaagcugaacagagaggagaucgacggcgugaagcuggagagcaccaugaucuaccagauccuggccaucuacagcaccguggccagcagccuggugcugguggugagccugggcgccaucagcuucuggaugugcagcaacggcagccugcagugcagaaucugcaucuga

SEQ ID NO: 167103 - RNA, 1701 nt, Artificial Sequence; identical to SEQ ID NO: 166980
  derived and/or modified CDS sequence (opt4) from hemagglutinin__InfluenzaA__AEL89771

SEQ ID NO: 167104 - RNA, 1701 nt, Artificial Sequence; identical to SEQ ID NO: 167102
  derived and/or modified CDS sequence (opt4) from hemagglutinin__InfluenzaA__AEL89781

SEQ ID NO: 167105 - RNA, 1701 nt, Artificial Sequence; identical to SEQ ID NO: 166495
  derived and/or modified CDS sequence (opt4) from hemagglutinin__InfluenzaA__AEL89791

SEQ ID NO: 167106 - RNA, 1701 nt, Artificial Sequence
  derived and/or modified CDS sequence (opt4) from hemagglutinin__InfluenzaA__AEL89801
augaaggccauccugguggugcugcuguacaccuucgccaccgccaacgccgacacccugugcaucggcuaccacgccaacaacagcaccgacaccguggacaccgugcuggagaagaacgugaccgugacccacagcgugaaccugcuggaggacaagcacaacggcaagcugugcaagcugagaggcguggccccccugcaccugggcaagugcaacaucgccggcuggauccugggcaaccccgagugcgagagccugagcaccgccagcagcuggagcuacaucguggagaccagcagcagcgacaacggcaccugcuaccccggcguguucaucgacuacgaggagcugagagagcagcugagcagcgugagcagcuucgagagauucgagaucuuccccaagaccagcagcuggcccaaccacgacagcaacaagggcgugaccgccgccugcccccacgccggcgccaagagcuucuacaagaaccugaucuggcuggugaagaagggcaacagcuaccccaagcugagcaagagcuacaucaacgacaagggcaaggaggugcuggugcuguggggcauccaccaccccagcaccaccgccgaccagcagagccuguaccagaacgccgacgccuacguguucgugggcaccagcagauacagcaagaaguucaagcccgagaucgccgugagacccaaggugagagaccaggagggcagaaugaacuacuacuggacccugguggagcccggcgacaagaucaccuucgaggccaccggcaaccugguggugcccagauacgccuucgccauggagagaaacgccggcagcggcaucaucaucagcgacacccccgugcacgacugcaacaccaccugccagacccccaagggcgccaucaacaccagccugcccuuccagaacauccaccccaucaccaucggcaagugccccaaguacgugaagagcaccaagcugagacuggccaccggccugagaaacgugcccagcauccagagcagaggccuguucggcgccaucgccggcuucaucgagggcggcuggaccggcaugguggacggcugguacggcuaccaccaccagaacgagcagggcagcggcuacgccgccgaccugaagagcacccagaacgccaucgacaagaucaccaacaaggugaacagcgugaucgagaagaugaacacccaguucaccgccgugggcaaggaguucaaccaccuggagaagagaaucgagaaccugaacaagaagguggacgacggcuuccuggacaucuggaccuacaacgccgagcugcuggugcugcuggagaacgagagaacccuggacuaccacgacagcaacgugaagaaccuguacgagaaggugagaaaccagcugaagaacaacgccaaggagaucggcaacggcugcuucgaguucuaccacaagugcgacaacaccugcauggagagcgugaagaacggcaccuacgacuaccccaaguacagcgaggaggccaagcugaacagagaggagaucgacggcgugaagcuggagagcaccagaaucuaccagauccuggccaucuacagcaccguggccagcagccugauccugguggugagccugggcgccaucagcuucuggaugugcagcaacggcagccugcagugcagaaucugcaucuga

SEQ ID NO: 167107 - RNA, 1701 nt, Artificial Sequence
  derived and/or modified CDS sequence (opt4) from hemagglutinin__InfluenzaA__AEL89812
augaaggccauccugguggugcugcuguacaccuucgccaccgccaacgccgacacccugugcaucggcuaccacgccaacaacagcaccgacaccguggacaccgugcuggagaagaacgugaccgugacccacagcgugaaccugcuggaggacaagcacaacggcaagcugugcaagcugagaggcguggccccccugcaccugggcaagugcaacaucgccggcuggauccugggcaaccccgagugcgagagccugagcaccgccagcagcuggagcuacaucguggagaccagcagcagcgacaacggcaccugcuaccccggcgacuucaucgacuacgaggagcugagagagcagcugagcagcgugagcagcuucgagagauucgagaucuuccccaagaccagcagcuggcccaaccacgacagcaacaagggcgugaccaccgccugcccccacgccggcgccaagagcuucuacaagaaccugaucuggcuggugaagaagggcaacagcuaccccaagcugagcaagagcuacaucaacgacaagggcaaggaggugcuggugcuguggggcauccaccacccccccaccagcgccgaccagcagagccuguaccagaacgccgacgccuacguguucgugggcaccagcagauacagcaagaaguucaagcccgagaucgccaucagacccaaggugagagaccaggagggcagaaugaacuacuacuggacccugguggagcccggcgacaagaucaccuucgaggccaccggcaaccugguggugcccagauacgccuucgccauggagagaaacgccggcagcggcaucaucaucagcgacacccccgugcacgacugcaacgccaccugccagacccccaagggcgugaucaacaccagccugcccuuccagaacauccaccccaucaccaucggcaagugccccaaguacgugaagagcaccaagcugagacuggccaccggccugagaaacgugcccagcauccagagcagaggccuguucggcgccaucgccggcuucaucgagggcggcuggaccggcaugguggacggcugguacggcuaccaccaccagaacgagcagggcagcggcuacgccgccgaccugaagagcacccagaacgccaucgacggcaucaccaacaaggugaacagcgugaucgagaagaugaacacccaguucaccgccgugggcaaggaguucaaccaccuggagaagagaaucgagaaccugaacaagaagguggacgacggcuuccuggacaucuggaccuacaacgccgagcugcuggugcugcuggagaacgagagaacccuggacuaccacgacagcaacgugaagaaccuguacgagaaggugagaagccagcugaagaacaacgccaaggagaucggcaacggcugcuucgaguucuaccacaagugcgacaacaccugcauggagagcgugaagaacggcaccuacgacuaccccaaguacagcgaggaggccaagcugaacagagaggagaucgacggcgugaagcuggagagcaccaugaucuaccagauccuggccaucuacagcaccguggccagcagccuggugcugguggugagccugggcgccaucagcuucuggaugugcagcaacggcagccugcagugcagaaucugcaucuga

SEQ ID NO: 167108 - RNA, 1701 nt, Artificial Sequence; identical to SEQ ID NO: 166495
  derived and/or modified CDS sequence (opt4) from hemagglutinin__InfluenzaA__AEL89832

SEQ ID NO: 167109 - RNA, 1701 nt, Artificial Sequence
  derived and/or modified CDS sequence (opt4) from hemagglutinin__InfluenzaA__AEL89842
augaaggccauccugguggugcugcuguacacccuggccaccgccaacgccgacacccugugcaucggcuaccacgccaacaacagcaccgacaccguggacaccgugcuggagaagaacgugaccgugacccacagcgugaaccugcuggaggacaagcacgacggcaagcugugcaagcugagaggcguggccccccugcaccugggcaagugcaacaucgccggcuggauccugggcaaccccgagugcgagagccugagcaccgccagcagcuggagcuacaucguggagaccagcagcagcgacaacggcaccugcuaccccggcgacuucaucgacuacgaggagcugagagagcagcugagcagcgugagcagcuucgagagauucgagaucuuccccaagaccagcagcuggcccaaccacgacagcaacaagggcgugaccgccgccugcccccacgccggcgccaagagcuucuacaagaaccugaucuggcuggugaagaagggcaacagcuaccccaagcugagcaagagcuacaucaacgacaagggcaaggaggugcuggugcuguggggcauccaccaccccagcaccagcgccgaccagcagagccuguaccagaacgccgacgccuacguguucgugggcaccagcagauacagcaagaaguucaagcccgagaucgccaucagacccaaggugagagaccaggagggcagaaugaacuacuacuggacccugguggagcccggcgacaagaucaccuucgaggccaccggcaaccugguggugcccagauacgccuucgccauggagagaaacgccggcagcggcaucaucaucagcgacacccccgugcacgacugcaacgccaccugccagacccccaagggcgccaucaacaccagccugcccuuccagaacgugcaccccaucaccaucggcaagugccccaaguacgugaagagcaccaagcugagacuggccaccggccugagaaacgugcccagcauccagagcagaggccuguucggcgccaucgccggcuucaucgagggcggcuggaccggcaugguggacggcugguacggcuaccaccaccagaacgagcagggcagcggcuacgccgccgaccugaagagcacccagaacgccaucgacaagaucaccaacaaggugaacagcgugaucgagaagaugaacacccaguucaccgccgugggcaaggaguucaaccaccuggagaagagaaucgagaaccugaacaagaagguggacgacggcuuccuggacaucuggaccuacaacgccgagcugcuggugcugcuggagaacgagagaacccuggacuaccacgacagcaacgugaagaaccuguacgagaaggugagaagccagcugaagaacaacgccaaggagaucggcaacggcugcuucgaguucuaccacaagugcgacaacaccugcauggagagcgugaagaacggcaccuacgacuaccccaaguacagcgaggaggccaagcugaacagagaggagaucgacggcgugaagcuggagagcaccagaaucuaccagauccuggccaucuacagcaccguggccagcagccuggugcugguggugagccugggcgccaucagcuucuggaugugcagcaacggcagccugcagugcagaaucugcaucuga

SEQ ID NO: 167110 - RNA, 1701 nt, Artificial Sequence
  derived and/or modified CDS sequence (opt4) from hemagglutinin__InfluenzaA__AEL89852
augaaggccauccugguggugcugcuguacaccuucgccaccgccaacgccgacacccugugcaucggcuaccacgccaacaacagcaccgacaccguggacaccgugcuggagaagaacgugaccgugacccacagcgugaaccugcuggaggacaagcacaacggcaagcugugcaagcugagaggcguggccccccugcaccugggcaagugcaacaucgccggcuggauccugggcaaccccgagugcgagagccugagcaccgccagcagcuggagcuacaucguggagaccagcagcagcgacaacggcaccugcuaccccggcgacuucaucaacuacgaggagcugagagagcagcugagcagcgugagcagcuucgagagauucgagaucuuccccaagaccagcagcuggcccaaccacgacagcaacaagggcgugaccgccgccugcccccacgccggcgccaagagcuucuacaagaaccugaucuggcuggugaagaagggcaacagcuaccccaagcugagcaagagcuacaucaacgacaagggcaaggaggugcuggugcuguggggcauccaccaccccagcaccagcgccgaccagcagagccuguaccagaacgccgacgccuacguguucgugggcaccagcaaguacagcaagaaguucaagcccgagaucgccgugagacccaaggugagagaccaggagggcagaaugaacuacuacuggacccugguggagcccggcgacaagaucaccuucgaggccaccggcaaccugcuggugcccagauacgccuucgccauggagagaaacgccggcagcggcaucaucaucagcgacacccccgugcacgacugcaacaccaccugccagacccccaagggcgccaucaacaccagccugcccuuccagaacauccaccccaucaccaucggcaagugccccaaguacgugaagagcaccaagcugagacuggccaccggccugagaaacgugcccagcauccagagcagaggccuguucggcgccaucgccggcuucaucgagggcggcuggaccggcaugguggacggcugguacggcuaccaccaccagaacgagcagggcagcggcuacgccgccgaccugaagagcacccagaacgccaucgacaagaucaccaacaaggugaacagcgugaucgagaagaugaacacccaguucaccgccgugggcaaggaguucaaccaccuggagaagagaaucgagaaccugaacaagaagguggacgacggcuuccuggacaucuggaccuacaacgccgagcugcuggugcugcuggagaacgagagaacccuggacuaccacgacagcaacgugaagaaccuguacgagaaggugagaagccagcugaagaacaacgccaaggagaucggcaacggcugcuucgaguucuaccacaagugcgacaacaccugcauggagagcgugaagaacggcaccuacgacuaccccaaguacagcgaggaggccaagcugaacagagaggagaucgacggcgugaagcuggagagcaccagaaucuaccagauccuggccaucuacagcaccguggccagcagccuggugcugguggugagccugggcgccaucagcuucuggaugugcagcaacggcagccugcagugcagaaucugcaucuga

SEQ ID NO: 167111 - RNA, 1701 nt, Artificial Sequence; identical to SEQ ID NO: 166514
  derived and/or modified CDS sequence (opt4) from hemagglutinin__InfluenzaA__AEL93568

SEQ ID NO: 167112 - RNA, 1701 nt, Artificial Sequence; identical to SEQ ID NO: 166495
  derived and/or modified CDS sequence (opt4) from hemagglutinin__InfluenzaA__AEL93578

SEQ ID NO: 167113 - RNA, 1701 nt, Artificial Sequence
  derived and/or modified CDS sequence (opt4) from hemagglutinin__InfluenzaA__AEL93598
augaaggccauccugguggugcugcuguacaccuucgccaccgccaacgccgacacccugugcaucggcuaccacgccaacaacagcaccgacaccguggacaccgugcuggagaagaacgugaccgugacccacagcgugaaccugcuggaggacaagcacaacggcaagcugugcaagcugagaggcguggccccccugcaccugggcaagugcaacaucgccggcuggauccugggcaaccccgagugcgagagccugagcaccgccagcagcuggagcuacaucguggagaccagcagcagcgacaacggcaccugcuaccccggcguguucaucgacuacgaggagcugagagagcagcugagcagcgugagcagcuucgagagauucgagaucuuccccaagaccagcagcuggcccaaccacgacagcaacaagggcgugaccgccgccugcccccacgccggcgccaagagcuucuacaagaaccugaucuggcuggugaagaagggcaacagcuaccccaagcugagcaagagcuacaucaacgacaagggcaaggaggugcuggugcuguggggcauccaccaccccagcaccaccgccgaccagcagagccuguaccagaacgccgacgccuacguguucgugggcaccagcagauacagcaagaaguucaagcccgagaucgccaucagacccaaggugagagaccaggagggcagaaugaacuacuacuggacccugguggagcccggcgacaagaucaccuucgaggccaccggcaaccugguggugcccagauacgccuucgccauggagagaaacgccggcagcggcaucaucaucagcgacacccccgugcacgacugcaacaccaccugccagacccccaagggcgccaucaacaccagccugcccuuccagaacauccaccccaucaccaucggcaagugccccaaguacgugaagagcaccaagcugagacuggccaccggccugagaaacgugcccagcauccagagcagaggccuguucggcgccaucgccggcuucaucgagggcggcuggaccggcaugguggacggcugguacggcuaccaccaccagaacgagcagggcagcggcuacgccgccgaccugaagagcacccagaacgccaucgacaagaucaccaacaaggugaacagcgugaucgagaagaugaacacccaguucaccgccgugggcaaggaguucaaccaccuggagaagagaaucgagaaccugaacaagaagguggacgacggcuuccuggacaucuggaccuacaacgccgagcugcuggugcugcuggagaacgagagaacccuggacuaccacgacagcaacgugaagaaccuguacgagaaggugagaaaccagcugaagaacaacgccaaggagaucggcaacggcugcuucgaguucuaccacaagugcgacaacaccugcauggagagcgugaagaacggcaccuacgacuaccccaaguacagcgaggaggccaagcugaacagagaggagaucgacggcgugaagcuggagagcaccagaaucuaccagauccuggccaucuacagcaccguggccagcagccuggugcugguggugagccugggcgccaucagcuucuggaugugcagcaacggcagccugcagugcagaaucugcaucuga

SEQ ID NO: 167114 - RNA, 1701 nt, Artificial Sequence
  derived and/or modified CDS sequence (opt4) from hemagglutinin__InfluenzaA__AEL93618
augaaggccauccugguggugaugcuguacaccuucgccaccgccaacgccgacacccugugcaucggcuaccacgccaacaacagcaccgacaccguggacaccgugcuggagaagaacgugaccgugacccacagcgugaaccugcuggaggacaagcacaacggcaagcugugcaagcugagaggcguggccccccugcaccugggcaagugcaacaucgccggcuggauccugggcaaccccgagugcgagagccugagcaccgccagcagcuggagcuacaucguggagaccagcagcagcgacaacggcaccugcuaccccggcgacuucaucgacuacgaggagcugagagagcagcugagcagcgugagcagcuucgagagauucgagaucuuccccaagaccagcagcuggcccaaccacgacagcaacaagggcgugaccgccgccugcccccacgccggcgccaagagcuucuacaagaaccugaucuggcuggugaagaagggcaacagcuaccccaagcugagcaagagcuacaucaacgacaagggcaaggaggugcuggugcuguggggcauccaccaccccagcaccaccgccgaccagcagagccuguaccagaacgccgacaccuacguguucgugggcaccagcagauacagcaagaaguucaagcccgagaucgccaucagacccaaggugagagaccaggagggcagaaugaacuacuacuggacccugguggagcccggcgacaagaucaccuucgaggccaccggcaaccugguggugcccagauacgccuucgccauggagagaaacgccggcagcggcaucaucaucagcgacacccccgugcacgacugcaacaccaccugccagacccccaagggcgccaucaacaccagccugcccuuccagaacauccaccccaucaccaucggcaagugccccaaguacgugaagagcaccaagcugagacuggccaccggccugagaaacgugcccagcauccagagcagaggccuguucggcgccaucgccggcuucaucgagggcggcuggaccggcaugguggacggcugguacggcuaccaccaccagaacgagcagggcagcggcuacgccgccgaccugaagagcacccagaacgccaucgacaagaucaccaacaaggugaacagcgugaucgagaagaugaacacccaguucaccgccgugggcaaggaguucaaccaccuggagaagagaaucgagaaccugaacaagaagguggacgacggcuuccuggacaucuggaccuacaacgccgagcugcuggugcugcuggagaacgagagaacccuggacuaccacgacagcaacgugaagaaccuguacgagaaggugagaaaccagcugaagaacaacgccaaggagaucggcaacggcugcuucgaguucuaccacaagugcgacaacaccugcauggagagcgugaagaacggcaccuacgacuaccccaaguacagcgaggaggccaagcugaacagagaggagaucgacggcgugaagcuggagagcaccagaaucuaccagauccuggccaucuacagcaccguggccagcagccuggugcugguggugagccugggcgccaucagcuucuggaugugcagcaacggcagccugcagugcagaaucugcaucuga

SEQ ID NO: 167115 - RNA, 1701 nt, Artificial Sequence; identical to SEQ ID NO: 166495
  derived and/or modified CDS sequence (opt4) from hemagglutinin__InfluenzaA__AEL93628

SEQ ID NO: 167116 - RNA, 1701 nt, Artificial Sequence; identical to SEQ ID NO: 166930
  derived and/or modified CDS sequence (opt4) from hemagglutinin__InfluenzaA__AEL93638

SEQ ID NO: 167117 - RNA, 1701 nt, Artificial Sequence
  derived and/or modified CDS sequence (opt4) from hemagglutinin__InfluenzaA__AEL94870
augaaggccauccugguggugcugcuguacaccuucgccaccgccaacgccgacacccugugcaucggcuaccacgccaacaacagcaccgacaccguggacaccgugcuggagaagaacgugaccgugacccacagcgugaaccugcuggaggacaagcacaacggcaagcugugcaagcugagaggcguggccccccugcaccugggcaagugcaacaucgccggcuggauccugggcaaccccgagugcgagagccugagcaccgccagcagcuggagcuacaucguggagaccagcagcagcgacaacggcaccugcuaccccggcgacuucaucgacuacgaggagcugagagagcagcugagcagcgugagcagcuucgagagauucgagaucuuccccaagaccagcagcuggcccgaccacgacagcaacaagggcgugaccgccgccugcccccacgccggcgccaagagcuucuacaagaaccugaucuggcuggugaagaagggcaacagcuaccccaagcugagcaagagcuacaucaacgacaagggcaaggaggugcuggugcuguggggcauccaccaccccagcaccagcgccgaccagcagagccuguaccagaacgccgacgccuacguguucgugggcaccagcagauacagcaagaaguucaagcccgagaucgccaucagacccaaggugagagaccaggagggcagaaugaacuacuacuggacccugguggagcccggcgacaagaucaccuucgaggccaccggcaaccugguggugcccagauacgccuucgccauggagagaaacgccggcagcggcaucaucaucagcgacacccccgcccacgacugcaacaccaccugccagacccccaagggcgccaucaacaccagccugcccuuccagaacauccaccccaucaccaucggcaagugccccaaguacgugaagagcaccaagcugagacuggccaccggccugagaaacgugcccagcauccagagcagaggccuguucggcgccaucgccggcuucaucgagggcggcuggaccggcaugguggacggcugguacggcuaccaccaccagaacgagcagggcagcggcuacgccgccgaccugaagagcacccagaacgccaucgacaagaucaccaacaaggugaacagcgugaucaagaagaugaacacccaguucaccgccgugggcaaggaguucaaccaccuggagaagagaaucgagaaccugaacaagaagguggacgacggcuuccuggacaucuggaccuacaacgccgagcugcuggugcugcuggagaacgagagaacccuggacuaccacgacagcaacgugaagaaccuguacgagaaggugagaagccagcugaagaacaacgccaaggagaucggcaacggcugcuucgaguucuaccacaagugcgacaacaccugcauggagagcgugaagaacggcaccuacgacuaccccaaguacagcgaggaggccaagcugaacagagaggagaucgacggcgugaagcuggagagcaccagaaucuaccagauccuggccaucuacagcaccguggccagcagccuggugcugguggugagccugggcgccaucagcuucuggaugugcagcaacggcagccugcagugcagaaucugcaucuga

SEQ ID NO: 167118 - RNA, 1701 nt, Artificial Sequence
  derived and/or modified CDS sequence (opt4) from hemagglutinin__InfluenzaA__AEL95426
augaaggccauccugguggugcugcuguacaccuucgccaccgccaacgccgacacccugugcaucggcuaccacgccaacaacagcaccgacaccguggacaccgugcuggagaagaacgugaccgugacccacagcgugaaccugcuggaggacaagcacaacggcaagcugugcaagcugagaggcguggccccccugcaccugggcaagugcaacaucgccggcuggauccugggcaaccccgagugcgagagccugagcaccgccagcagcuggagcuacaucguggagaccagcagcagcgacaacggcaccugcuaccccggcgacuucaucgacuacgaggagcugagagagcagcugagcagcgugagcagcuucgagagauucgagaucuuccccaagaccagcagcuggcccaaccacgacagcaacaagggcgugaccgccgccugcccccacgccggcgccaagagcuucuacaagaaccugaucuggcuggugaagaagggcaacagcuaccccaagcugagcaagagcuacaucaacgacaagggcaaggaggugcuggugcuguggggcauccaccaccccagcaccaccgccgaccagcagagccuguaccagaacgccgacaccuacguguucgugggcaccagcagauacagcaagaaguucaagcccgagaucgccaccagacccaaggugagagaccaggagggcagaaugaacuacuacuggacccugguggagcccggcgacaagaucaccuucgaggccaccggcaaccugguggugcccagauacgccuucgccauggagagaaacgccggcagcggcaucaucaucagcgacacccccgugcacgacugcaacaccaccugccagacccccaagggcgccaucaacaccagccugcccuuccagaacauccaccccaucaccaucggcaagugccccaaguacgugaagagcaccaagcugagacuggccaccggccugagaaacgugcccagcauccagagcagaggccuguucggcgccaucgccggcuucaucgagggcggcuggaccggcaugguggacggcugguacggcuaccaccaccagaacgagcagggcagcggcuacgccgccgaccugaagagcacccagaacgccaucgacaagaucaccaacaaggugaacagcgugaucgagaagaugaacacccaguucaccgccgugggcaaggaguucaaccaccuggagaagagaaucgagaaccugaacaagaagguggacgacggcuuccuggacaucuggaccuacaacgccgagcugcuggugcugcuggagaacgagagaacccuggacuaccacgacagcaacgugaagaaccuguacgagaaggugagaaaccagcugaagaacaacgccaaggagaucggcaacggcugcuucgaguucuaccacaagugcgacaacaccugcauggagagcgugaagaacggcaccuacgacuaccccaaguacagcgaggaggccaagcugaacagagaggagaucgacggcgugaagcuggagagcaccagaaucuaccagauccuggccaucuacagcaccguggccagcagccuggugcugguggugagccugggcgccaucagcuucuggaugugcagcaacggcagccugcagugcagaaucugcaucuga

SEQ ID NO: 167119 - RNA, 1701 nt, Artificial Sequence
  derived and/or modified CDS sequence (opt4) from hemagglutinin__InfluenzaA__AEL97631
augaaggccauccugguggugcugcuguacaccuucgccaccgccaacgccgacacccugugcaucggcuaccacgccaacaacagcaccgacaccguggacaccgugcuggagaagaacgugaccgugacccacagcgugaacauccuggaggacaagcacaacggcaagcugugcaagcugagaggcguggccccccugcaccugggcaagugcaacaucgccggcuggauccugggcaaccccgagugcgagagccugagcaccgccagcagcuggagcuacaucguggagaccagcagcagcgacaacggcaccugcuaccccggcgacuucaucgacuacgaggagcugagagagcagcugagcagcgugagcagcuucaagagauucgagaucuuccccaagaccagcagcuggcccaaccacgacagcaacaagggcgugaccgccgccugcccccacgccggcgccaagagcuucuacaagaaccugaucuggcuggugaagaagggcaacagcuaccccaagcugagcaagagcuacaucaacgacaagggcaaggaggugcuggugcuguggggcauccaccaccccagcaccagcgccgaccagcagagccuguaccagaacgccgacgccuacguguucgugggcaccagcagauacagcaagaaguucaagcccgagaucgccaucagacccaaggugagagaccaggagggcagaaugaacuacuacuggacccugguggagcccggcgacaagaucaccuucgaggccaccggcaaccugguggugcccagauacgccuucgccauggagagaaacgccggcagcggcaucaucaucagcgacacccccgugcacgacugcaacaccaccugccagacccccaagggcgccaucaacaccagccugcccuuccagaacauccaccccaccaccaucggcaagugccccaaguacgugaagagcaccaagcugagacuggccaccggccugagaaacgugcccagcauccagagcagaggccuguucggcgccaucgccggcuucaucgagggcggcuggaccggcaugguggacggcugguacggcuaccaccaccagaacgagcagggcagcggcuacgccgccgaccugaagagcacccagaacgccaucgacgagaucaccaacaaggugaacagcgugaucgagaagaugaacacccaguucaccgccgugggcaaggaguucaaccaccuggagaagagaaucgagaaccugaacaagaagguggacgacggcuuccuggacaucuggaccuacaacgccgagcugcuggugcugcuggagaacgagagaacccuggacuaccacgacagcaacgugaagaaccuguacgagaaggugagaagccagcugaagaacaacgccaaggagaucggcaacggcugcuucgaguucuaccacaagugcgacaacaccugcauggagagcgugaagaacggcaccuacgacuaccccaaguacagcgaggaggccaagcugaacagagaggagaucgacggcgugaagcuggagagcaccagaaucuaccagauccuggccaucuacagcaccguggccagcagccuggugcugguggugagccugggcgccaucagcuucuggaugugcagcaacggcagccugcagugcagaaucugcaucuga

SEQ ID NO: 167120 - RNA, 1701 nt, Artificial Sequence
  derived and/or modified CDS sequence (opt4) from hemagglutinin__InfluenzaA__AEL99664
augaaggccauccugguggugcugcuguacaccuucgccaccgccaacgccgacacccugugcaucggcuaccacgccaacaacagcaccgacaccguggacaccauccuggagaagaacgugaccgugacccacagcgugaaccugcuggaggacaagcacaacggcaagcugugcaagcugagaggcguggccccccugcaccugggcaagugcaacaucgccggcuggauccugggcaaccccgagugcgagagccugagcaccgccagcagcuggagcuacaucguggagaccagcagcagcgacaacggcaccugcuaccccggcgacuucaucgacuacgaggagcugagagagcagcugagcagcgugagcagcuucaagagauucgagaucuuccccaagaccagcagcuggcccaaccacgacagcaacaagggcgugaccgccgccugcccccacgccggcgccaagagcuucuacaagaaccugaucuggcuggugaagaagggcaacagcuaccccaagcugagcaagagcuacaucaacgacaagggcaaggaggugcuggugcuguggggcauccaccaccccagcaccagcgccgaccagcagagccuguaccagaacgccgacgccuacguguucgugggcaccagcagauacagcaagaaguucaagcccgagaucgccaucagacccaaggugagagaccaggagggcagaaugaacuacuacuggacccugguggagcccggcgacaagaucaccuucgaggccaccggcaaccugguggugcccagauacgccuucgccauggagagaaacgccggcagcggcaucaucaucagcgacaccagcgugcacgacugcaacaccaccugccagacccccaagggcgccaucaacaccagccugcccuuccagaacauccaccccaucaccaucggcaagugccccaaguacgugaagagcaccaagcugagacuggccaccggccugagaaacgugcccagcauccagagcagaggccuguucggcgccaucgccggcuucaucgagggcggcuggaccggcaugguggacggcugguacggcuaccaccaccagaacgagcagggcagcggcuacgccgccgaccugaagagcacccagaacgccaucgacgagaucaccaacaaggugaacagcgugaucgagaagaugaacacccaguucaccgccgugggcaaggaguucaaccaccuggagaagagaaucgagaaccugaacaagaagguggacgacggcuuccuggacaucuggaccuacaacgccgagcugcuggugcugcuggagaacgagagaacccuggacuaccacgacagcaacgugaagaaccuguacgagaaggugagaagccagcugaagaacaacgccaaggagaucggcaacggcugcuucgaguucuaccacaagugcgacaacaccugcauggagagcgugaagaacggcaccuacgacuaccccaaguacagcgaggaggccaagcugaacagagaggagaucgacggcgugaagcuggagagcaccagaaucuaccagauccuggccaucuacagcaccguggccagcagccuggugcugguggugagccugggcgccaucagcuucuggaugugcagcaacggcagccugcagugcagaaucugcaucuga

SEQ ID NO: 167121 - RNA, 1701 nt, Artificial Sequence
  derived and/or modified CDS sequence (opt4) from hemagglutinin__InfluenzaA__AEL99674
augaaggccauccugguggugcugcuguacaccuucgccaccgccaacgccgacacccugugcaucggcuaccacgccaacaacagcaccgacaccguggacaccgugcuggagaagaacgugaccgugacccacagcgugaaccugcuggaggacaagcacaacggcaagcugugcaagcugagaggcguggccccccugcaccugggcaagugcaacaucgccggcuggauccugggcaaccccgagugcgagagccugagcaccgccagcagcuggagcuacaucguggagaccagcagcagcgacaacggcaccugcuaccccggcgacuucaucgacuacgaggagcugagagagcagcugagcagcgugagcagcuucgagagauucgagaucuuccccaagaccagcagcuggcccaaccacgacagcaacaagggcgugaccgccgccugcccccacgccggcgccaagagcuucuacaagaaccugaucuggcuggugaagaagggcaacagcuaccccaagcugagcaagagcuacaucaacgacaagggcaaggaggugcuggugcuguggggcauccaccaccccagcaccagcgccgaccagcagagccuguaccagaacgccgacgccuacguguucgugggcaccagcagauacagcaagaaguucaagcccgagaucgccaucagacccaaggugagagaccaggagggcagaaugaacuacuacuggacccugguggagcccggcgacaagaucaucuucgaggccaccggcaaccugguggugcccagauacgccuucgccauggagagaaacgccggcagcggcaucaucaucagcgacacccccgugcacgacugcaacaccaccugccagacccccaagggcgccaucaacaccagccugcccuuccagaacauccaccccaucaccaucggcaagugccccaaguacgugaagagcaccaagcugagacuggccaccggccugagaaacgugcccagcauccagagcagaggccuguucggcgccaucgccggcuucaucgagggcggcuggaccggcaugguggacggcugguacggcuaccaccaccagaacgagcagggcagcggcuacgccgccgaccugaagagcacccagaacgccaucgacgagaucaccaacaaggugaacagcgugaucgagaagaugaacacccaguucaccgccgugggcaaggaguucaaccaccuggagaagagaaucgagaaccugaacaagaagguggacgacggcuuccuggacaucuggaccuacaacgccgagcugcuggugcugcuggagaacgagagaacccuggacuaccacgacagcaacgugaagaaccuguacgagaaggugagaagccagcugaagaacaacgccaaggagaucggcaacggcugcuucgaguucuaccacaagugcgacaacaccugcauggagagcgugaagaacggcaccuacgacuaccccaaguacagcgaggaggccaagcugaacagagaggagaucgacggcgugaagcuggagagcaccagaaucuaccagauccuggccaucuacagcaccguggccagcagccuggugcugguggugagccugggcgccaucagcuucuggaugugcagcaacggcagccugcagugcagaaucugcaucuga

SEQ ID NO: 167122 - RNA, 1689 nt, Artificial Sequence; identical to SEQ ID NO: 166331
  derived and/or modified CDS sequence (opt4) from hemagglutinin__InfluenzaA__AEM53455

SEQ ID NO: 167123 - RNA, 1689 nt, Artificial Sequence; identical to SEQ ID NO: 161680
  derived and/or modified CDS sequence (opt4) from hemagglutinin__InfluenzaA__AEM53468

SEQ ID NO: 167124 - RNA, 1698 nt, Artificial Sequence; identical to SEQ ID NO: 162175
  derived and/or modified CDS sequence (opt4) from hemagglutinin__InfluenzaA__AEM60037

SEQ ID NO: 167125 - RNA, 1698 nt, Artificial Sequence
  derived and/or modified CDS sequence (opt4) from hemagglutinin__InfluenzaA__AEM60058
augaaggugaagcugcuggugcugcugugcaccuucaccgccaccuacgccgacaccaucugcaucggcuaccacgccaacaacagcaccgacaccguggacaccgugcuggagaagaacgugaccgugacccacagcgugaaccugcuggaggagagccacaacggcaagcugugccugcugaagggcaucgccccccugcagcugggcaacugcagcguggccggcuggauccugggcaaccccgagugcgagcugcugaucagcaaggagagcuggagcuacaucguggagacccccaaccccgagaacggcaccugcuaccccggcuacuucgccgacuacgaggagcugagagagcagcugagcagcgugagcagcuucgagagauucgagaucuuccccaaggagagcagcuggcccaaccacaccgugaccggcgugagcgccagcugcagccacaacggcgagagcagcuucuacagaaaccugcuguggcugaccggcaagaacggccuguaccccaaccugagcaagagcuacgccaacaacaaggagaaggacgugcuggugcuguggggcgugcaccacccccccaacaucggcgaccagagagcccuguaccacaccgagaacgccuacgugagcguggugagcagccacuacagcagaagauucacccccgagaucgccaagagacccaaggugagagaccaggagggcagaaucaacuacuacuggacccugcuggagcccggcgacaccaucaucuucgaggccaacggcaaccugaucgcccccagauucgccuucgcccugggcagaggcuucggcagcggcaucaucaccagcaacgcccccauggacaagugcgacgccaagugccagaccccccagggcgccaucaacagcagccugcccuuccagaacgugcaccccgugaccaucggcgagugccccaaguacgugagaagcaccaagcugagaauggugaccggccugagaaacauccccagcauccagagcagaggccuguucggcgccaucgccggcuucaucgagggcggcuggaccggcaugguggacggcugguacggcuaccaccaccagaacgagcagggcagcggcuacgccgccgaccagaagagcacccagaacgccaucaacggcaucaccaacaaggugaacagcgugaucgagaagaugaacacccaguucaccgccgugggcaaggaguucaacaagcuggagagaagaauggagaaccugaacaagaagguggacgacggcuuccuggacaucuggaccuacaacgccgagcugcuggugcugcuggagaacgagagaacccuggacuuccacgacagcaacgugaagaaccuguacgagaaggugaagagccagcugaagaacaacgccaaggagaucggcaacggcugcuucgaguucuaccacaagugcaacgacgagugcauggagagcgugaagaacggcaccuacgacuaccccaaguacagcgaggagagcaagcugaacagagagaagaucgacggcgugaagcuggagagcaugggcguguaccagauccuggccaucuacagcaccguggccagcagccuggugcugcuggugagccugggcgccaucagcuucuggaugugcagcaacggcagccugcagugcagaaucugcaucuga

SEQ ID NO: 167126 - RNA, 1701 nt, Artificial Sequence
  derived and/or modified CDS sequence (opt4) from hemagglutinin__InfluenzaA__AEM60069
augaagaccaucaucgcccugagcuacaucuucugccugguguucgcccagaagcugcccggcaacgacaacagcaccgccacccugugccugggccaccacgccgugcccaacggcacccuggugaagaccaucaccaacgaccagaucgaggugaccaacgccaccgagcuggugcagagcagcagcaccggcagaaucugcgacagcccccacagaauccuggacggcaagaacugcacccugaucgacgcccugcugggcgacccccacugcgacggcuuccagaacgagaagugggaccuguucguggagagaagcaaggccuacagcaacugcuaccccuacgacgugcccgacuacgccagccugagaagccugguggccagcagcggcacccuggaguucaucaacgaggacuucaacuggaccggcgugacccagagcggcggcagcuacgccugcaagagaggcagcgugaagagcuucuucagcagacugaacuggcugcacgagagcgaguacaaguaccccgcccugaacgugaccaugcccaacaacggcaaguucgacaagcuguacaucuggggcgugcaccaccccagcaccgacagagagcagaccaaccuguacgugagagccagcggcagagugaccgugagcaccaagagaagccagcagaccgugauccccaacaucggcagcagacccugggugagaggccugagcagcagaaucagcaucuacuggaccaucgugaagcccggcgacauccugcugaucaacagcaccggcaaccugaucgcccccagaggcuacuucaagaucagaaccggcaagagcagcaucaugagaagcgacgcccccaucggcaccugcagcagcgagugcaucacccccaacggcagcauccccaacgacaagcccuuccagaacgugaacaagaucaccuacggcgccugccccagauacgugaagcagaacacccugaagcuggccaccggcaugagaaacgugcccgagaagcagaccagaggcaucuucggcgccaucgccggcuucaucgagaacggcugggagggcaugguggacggcugguacggcuucagacaccagaacagcgagggcaccggccaggccgccgaccugaagagcacccaggccgccaucgaccagaucaacggcaagcugaacagacugaucgagaagaccaacgagaaguuccaccagaucgagaaggaguucagcgagguggagggcagaauccaggaccuggagaaguacguggaggacaccaagaucgaccuguggagcuacaacgccgagcugcugguggcccuggagaaccagcacaccaucgaccugaccgacagcgagaugaacaagcuguucgagaagaccagaaagcagcugagagagaacgccgaggacaugggcaacggcugcuucaagaucuaccacaagugcgacaacgccugcaucggcagcaucagaaacggcaccuacgaccacgacguguacagagacgaggcccugaacaacagauuccagaucaagggcguggagcugaagagcggcuacaaggacuggauccuguggaucagcuucgccaucagcugcuuccugcugugcguggugcugcugggcuucaucaugugggccugccagaagggcaacaucagaugcaacaucugcaucuga

SEQ ID NO: 167127 - RNA, 1701 nt, Artificial Sequence
  derived and/or modified CDS sequence (opt4) from hemagglutinin__InfluenzaA__AEM92308
augaaggccauccugguggugcugcuguacaccuucgccaccgccaacgccgacacccugugcaucggcuaccacgccaacaacagcaccgacaccguggacaccgugcuggagaagaacgugaccgugacccacagcgugaaccugcuggaggacaagcacaacggcaagcugugcaagcugagaggcguggccccccugcaccugggcaagugcaacaucgccggcuggauccugggcaaccccgagugcgagagccugagcaccgccagcagcuggagcuacaucguggagaccagcagcagcgacaacggcaccugcuaccccggcgacuucaucgacuacgaggagcugagagagcagcugagcagcgugagcagcuucgagagauucgagaucuuccccaagaccagcagcuggcccaaccacgacagcaacaagggcgugaccgccgccugcccccacgccggcgccaagagcuucuacaagaaccugaucuggcuggugaagaagagaaacagcuaccccaagcugagcaagagcuacaucaacgacaagggcaaggaggugcuggugcuguggggcauccaccaccccagcaccagcgccgaccagcagagccuguaccagaacgccgacgccuacguguucgugggcagcagcagauacagcaagaaguucaagcccgagaucgccaucagacccaaggugagagaccaggagggcagaaugaacuacuacuggacccugguggagcccggcgacaagaucaccuucgaggccaccgagaaccugguggugcccagauacgccuucgccauggagagaaacgccggcagcggcaucaucaucagcgacacccccgugcacgacugcaacaccaccugccagacccccaagggcgccaucaacaccagccugcccuuccagaacauccaccccaucaccaucggcaagugccccaaguacgugaagagcaccaagcugagacuggccaccggccugagaaacgugcccagcauccagagcagaggccuguucggcgccaucgccggcuucaucgagggcggcuggaccggcaugguggacggcugguacggcuaccaccaccagaacgagcagggcagcggcuacgccgccgaccugaagagcacccagaacgccaucgacgagaucaccaacaaggugaacagcgugaucgagaagaugaacacccaguucaccgccgugggcaaggaguucaaccaccuggagaagagaaucgagaaccugaacaagaagguggacgacggcuuccuggacaucuggaccuacaacgccgagcugcuggugcugcuggagaacgagagaacccuggacuaccacgacagcaacgugaagaaccuguacgagaaggugagaagccagcugaagaacaacgccaaggaggugggcaacggcugcuucgaguucuaccacaagugcgacaacaccugcauggagagcgugaagaacggcaccuacgacuaccccaaguacagcgaggaggccaagcugaacagagaggagaucgacggcgugaagcuggagagcaccagaaucuaccagauccuggccaucuacagcaccgccgccagcagccuggugcugguggugagccugggcgccaucagcuucuggaugugcagcaacggcagccugcagugcagaaucugcaucuga

SEQ ID NO: 167128 - RNA, 1701 nt, Artificial Sequence
  derived and/or modified CDS sequence (opt4) from hemagglutinin__InfluenzaA__AEM92318
augaaggccauccugguggugcugcuguacaccuucgccaccgccaacgccgacacccugugcaucggcuaccacgccaacaacagcaccgacaccguggacaccgugcuggagaagaacgugaccgugacccacagcguggaccugcuggaggacaagcacaacggcaagcugugcaagcugagaggcguggccccccugcaccugggcaagugcaacaucgccggcuggauccugggcaaccccgagugcgagagccugagcaccgccagcagcuggagcuacaucguggagaccagcagcagcgacaacggcaccugcuaccccggcgacuucaucgacuacgaggagcugagagagcagcugagcagcgugagcagcuucgagagauucgagaucuuccccaagaccagcagcuggcccaaccacgacagcaacaagggcgugaccgccgccugcccccacgccggcgagaagagcuucuacaagaaccugaucuggcuggugaagaagggcaacagcuaccccaagcugaacaagagcuacaucaacgacaagggcaaggaggugcuggugcuguggggcauccaccaccccagcaccagcgccgaccagcagagccuguaccagaacgccgacgccuacguguucgugggcaccagcagauacagcaagaaguucaagcccgagaucgccaucagacccaaggugagagaccaggagggcagaaugaacuacuacuggacccugguggagcccggcgacaagaucaccuucgaggccaccggcaaccugguggugcccagauacgccuucgccauggagagaaacgccggcagcggcaucaucaucagcgacacccccauccacgacugcaacaccaccugccagacccccaagggcgccaucaacaccagccugcccuuccagaacauccaccccaucaccaucggcaagugccccaaguacgugaagagcaccaagcugagacuggccaccggccugagaaacgugcccagcauccagagcagaggccuguucggcgccaucgccggcuucaucgagggcggcuggaccggcaugguggacggcugguacggcuaccaccaccagaacgagcagggcagcggcuacgccgccgaccugaagagcacccagaacgccaucgacgagaucaccaacaaggugaacagcgugaucgagaagaugaacacccaguucaccgccgugggcaaggaguucaaccaccuggagaagagaaucgagaaccugaacaagaagguggacgacggcuuccuggacaucuggaccuacaacgccgagcugcuggugcugcuggagaacgagagaacccuggacuaccacgacagcaacgugaagaaccuguacgagaaggugagaaaccagcugaagaacaacgccaaggagaucggcaacggcugcuucgaguucuaccacaagugcgacaacaccugcauggagagcgugaagaacggcaccuacgacuaccccaaguacagcgaggaggccaagcugaacagagaggagaucgacggcgugaagcuggagagcaccagaaucuaccagauccuggccaucuacagcaccguggccagcagccuggugcugguggugagccugggcgccaucagcuucuggaugugcagcaacggcagccugcagugcagaaucugcaucuga

SEQ ID NO: 167129 - RNA, 1701 nt, Artificial Sequence
  derived and/or modified CDS sequence (opt4) from hemagglutinin__InfluenzaA__AEM92328
augaaggccauccugguggugcugcuguacaccuucgccaccgccaacgccgacacccugugcaucggcuaccacgccaacaacagcaccgacaccguggacaccgugcuggagaagaacgugaccgugacccacagcgugaaccugcuggaggacaagcacaacggcaagcugugcaagcugagaggcguggccccccugcaccugggcaagugcaacaucgccggcuggauccugggcaaccccgagugcgagagccugagcaccgccagcagcuggagcuacaucguggagaccagcagcagcgacaacggcaccugcuaccccggcgacuucaucgacuacgaggagcugagagagcagcugagcagcgugagcagcuucgagagauucgagaucuuccccaagaccagcagcuggcccaaccacgacagcaacaagggcgugaccgccgccugcccccacgccggcgccaagagcuucuacaagaaccugaucuggcuggugaagaagggcaacagcuaccccaagcugaacaucagcuacaucaacgacaagggcaaggaggugcuggugcuguggggcauccaccaccccagcaccaccgccgaccagcagagccuguaccagaacgccgacgccuacguguucgugggcaccagcagauacagcaagaaguucaagcccgagaucgccaucagacccaaggugagagaccaggagggcagaaugaacuacuacuggacccugguggagcccggcgacaagaucaccuucgaggccaccggcaaccugguggugcccagauacgccuucgccauggagagaaacgccggcagcggcaucaucaucagcgacacccccgugcacgacugcaacaccaccugccagacccccaagggcgccaucaacaccagccugcccuuccagaacauccaccccaucaccaucggcaagugccccaaguacgugaagagcaccaagcugagacuggccaccggccugagaaacgugcccagcauccagagcagaggccuguucggcgccaucgccggcuucaucgagggcggcuggaccggcaugguggacggcugguacggcuaccaccaccagaacgagcagggcagcggcuacgccgccgaccugaagagcacccagaacgccaucgacaagaucaccaacaaggugaacagcgugaucgagaagaugaacacccaguucaccgccgugggcaaggaguucaaccaccuggagaagagaaucgagaaccugaacaagaagguggacgacggcuuccuggacaucuggaccuacaacgccgagcugcuggugcugcuggagaacgagagaacccuggacuaccacgacagcaacgugaagaaccuguacgagaaggugagaaaccagcugaagaacaacgccaaggagaucggcaacggcugcuucgaguucuaccacaagugcgacaacaccugcauggagagcgugaagaacggcaccuacgacuaccccaaguacagcgaggaggccaagcugaacagagaggagaucgacggcgugaagcuggagagcaccagaaucuaccagauccuggccaucuacagcaccguggccagcagccuggugcugguggugagccugggcgccaucagcuucuggaugugcagcaacggcagccugcagugcagaaucugcaucuga

SEQ ID NO: 167130 - RNA, 1701 nt, Artificial Sequence
  derived and/or modified CDS sequence (opt4) from hemagglutinin__InfluenzaA__AEM92348
augaaggccauccugguggugcugcuguacaccuucgccaccgccaacgccgacacccugugcaucggcuaccacgccaacaacagcaccgacaccguggacaccgugcuggagaagaacgugaccgugacccacagcguggaccugcuggaggacaagcacaacggcaagcugugcaagcugagaggcguggccccccugcaccugggcaagugcaacaucgccggcuggauccugggcaaccccgagugcgagagccugagcaccgccagcagcuggagcuacaucguggagaccagcagcagcgacaacggcaccugcuaccccggcgacuucaucgacuacgaggagcugagagagcagcugagcagcgugagcagcuucgagagauucgagaucuuccccaagaccagcagcuggcccaaccacgacagcaacaagggcgugaccgccgccugcccccacgccggcgagaagagcuucuacaagaaccugaucuggcuggugaagaagggcaacagcuaccccaagcugaacaagagcuacaucaacgacaagggcaaggaggugcuggugcuguggggcauccaccaccccagcaccagcgccgaccagcagagccuguaccagaacgccgacgccuacguguucgugggcaccagcagauacagcaagaaguucaagcccgagaucgccaucagacccaaggugagagaccaggagggcagaaugaacuacuacuggacccugguggagcccggcgacaagaucaccuucgaggccaccggcaaccugguggugcccagauacgccuucgccauggagagaaacgccggcagcggcaucaucaucagcgacacccccauccacgacugcaacaccaccugccagacccccaagggcgccaucaacaccagccugcccuuccagaacauccaccccaucaccaucggcaagugccccaaguacgugaagagcaccaagcugagacuggccaccggccugagaaacgugcccagcauccagagcagaggccuguucggcgccaucgccggcuucaucgagggcggcuggaccggcaugguggacggcugguacggcuaccaccaccagaacgagcagggcagcggcuacgccgccgaccugaagagcacccagaacgccaucgacgagaucaccaacaaggugaacagcgugaucgagaagaugaacacccaguucaccgccgugggcaaggaguucaaccaccuggagaagagaaucgagaaccugaacaagaagguggacgacggcuuccuggacaucuggaccuacaacgccgagcugcuggugcugcuggagaacgagagaacccuggacuaccacgacagcaacgugaagaaccuguacgagaaggugaagagccagcugaagaacaacgccaaggagaucggcaacggcugcuucgaguucuaccacaagugcgacaacaccugcauggagagcgugaagaacggcaccuacgacuaccccaaguacagcgaggaggccaagcugaacagagagaagaucgacggcgugaagcuggagagcaccagaaucuaccagauccuggccaucuacagcaccguggccagcagccuggugcugguggugagccugggcgccaucagcuucuggaugugcagcaacggcagccugcagugcagaaucugcaucuga

SEQ ID NO: 167131 - RNA, 1701 nt, Artificial Sequence
  derived and/or modified CDS sequence (opt4) from hemagglutinin__InfluenzaA__AEM92358
augaaggccauccugguggugcugcuguacaccuucgccaccgccaacgccgacacccugugcaucggcuaccacgccaacaacagcaccgacaccguggacaccgugcuggagaagaacgugaccgugacccacagcgugaaccugcuggaggacaagcacaacggcaagcugugcaagcugagaggcguggccccccugcaccugggcaagugcaacaucgccggcuggauccugggcaaccccgagugcgagagccugagcaccgccagcagcuggagcuacaucguggagaccagcagcagcgacaacggcaccugcuaccccggcgacuucaucaacuacgaggagcugagagagcagcugagcagcgugagcagcuucgagagauucgagaucuuccccaagaccagcagcuggcccaaccacgacagcaacaagggcgugaccgccgccugcccccacgccggcgccaagagcuucuacaagaaccugaucuggcuggugaaggagggcaacagcuaccccaagcugagcaagagcuacaucaacgacaagggcaaggaggugcuggugcuguggggcauccaccaccccagcaccaccaccgaccagcagagccuguaccagaacgccgacgccuacguguucgugggcaccagcagauacagcaagaaguucaagcccgagaucgccaucagacccaagaugagagaccaggagggcagaaugaacuacuacuggacccugguggagcccggcgacaagaucaccuucgaggccaccggcaaccugguggugcccagauacgccuucgccauggagagaaacgccggcagcggcaucaucaucagcgacacccccgugcacgacugcaacaccaccugccagacccccaagggcgccaucaacaccagccugcccuuccagaacauccaccccaucaccaucggcaagugccccaaguacgugaagagcaccaagcugagacuggccaccggccugagaaacgugcccagcauccagagcagaggccuguucggcgccaucgccggcuucaucgagggcggcuggaccggcaugguggacggcugguacggcuaccaccaccagaacgagcagggcagcggcuacgccgccgaccugaagagcacccagaacgccaucgacaagaucaccaacaaggugaacagcgugaucgagaagaugaacacccaguucaccgccgugggcaaggaguucaaccaccuggagaagagaaucgagaaccugaacaagaagguggacgacggcuuccuggacaucuggaccuacaacgccgagcugcuggugcugcuggagaacgagagaacccuggacuaccacgacagcaacgugaagaaccuguacgagaaggugagaaaccagcugaagaacaacgccaaggagaucggcaacggcugcuucgaguucuaccacaagugcgacaacaccugcauggagagcgugaagaacggcaccuacgacuaccccaaguacagcgaggaggccaagcugaacagagaggagaucgacggcgugaagcuggagagcaccagaaucuaccagauccuggccaucuacagcaccguggccagcagccuggugcugguggugagccugggcgccaucagcuucuggaugugcagcaacggcagccugcagugcagaaucugcaucuga

SEQ ID NO: 167132 - RNA, 1701 nt, Artificial Sequence
  derived and/or modified CDS sequence (opt4) from hemagglutinin__InfluenzaA__AEM92368
augaaggccauccugguggugcugcuguacaccuucgccaccgccaacgccgacacccugugcaucggcuaccacgccaacaacagcaccgacaccguggacaccgugcuggagaagaacgugaccgugacccacagcgugaaccugcuggaggacaagcacaacggcaagcugugcaagcugagaggcguggccccccugcaccugggcaagugcaacaucgccggcuggauccugggcaaccccgagugcgagagccugagcaccgccagcagcuggagcuacaucguggagaccagcagcagcgacaacggcaccugcuaccccggcgacuucaucgacuacgaggagcugagagagcagcugagcagcgugagcagcuucgagagauucgagaucuuccccaagaccagcagcuggcccaaccacgacagcaacaagggcgugaccgccgccugcccccacgccggcgccaagagcuucuacaagaaccugaucuggcuggugaagaagggcaacagcuaccccaagcugaacaagagcuacaucaacgacaagggcaaggaggugcuggugcuguggggcauccaccaccccagcaccaccgccgaccagcagagccuguaccagaacgccgacgccuacguguucgugggcaccagcagauacagcaagaaguucaagcccgagaucgccaucagacccaaggugagagaccaggagggcagaaugaacuacuacuggacccugguggagcccggcgacaagaucaccuucgaggccaccggcaaccugguggugcccagauacgccuucgccauggagagaaacgccggcagcggcaucaucaucagcgacacccccgugcacgacugcaacaccaccugccagacccccaagggcgccaucaacaccagccugcccuuccagaacauccaccccaucaccaucggcaagugccccaaguacgugaagagcaccaagcugagacuggccaccggccugagaaacgugcccagcauccagagcagaggccuguucggcgccaucgccggcuucaucgagggcggcuggaccggcaugguggacggcugguacggcuaccaccaccagaacgagcagggcagcggcuacgccgccgaccugaagagcacccagaacgccaucgacaagaucaccaacaaggugaacagcgugaucgagaagaugaacacccaguucaccgccgugggcaaggaguucaaccaccuggagaagagaaucgagaaccugaacaagaagguggacgacggcuuccuggacaucuggaccuacaacgccgagcugcuggugcugcuggagaacgagagaacccuggacuaccacgacagcaacgugaagaaccuguacgagaaggugagaaaccagcugaagaacaacgccaaggagaucggcaacggcugcuucgaguucuaccacaagugcgacaacaccugcauggagagcgugaagaacggcaccuacgacuaccccaaguacagcgaggaggccaagcugaacagagaggagaucgacggcgugaagcuggagagcaccagaaucuaccagauccuggccaucuacagcaccguggccagcagccuggugcugguggugagccugggcgccaucagcuucuggaugugcagcaacggcagccugcagugcagaaucugcaucuga

SEQ ID NO: 167133 - RNA, 1701 nt, Artificial Sequence
  derived and/or modified CDS sequence (opt4) from hemagglutinin__InfluenzaA__AEM92378
augaaggccauccugguggugcugcuguacaccuucgccaccgccaacgccgacacccugugcaucggcuaccacgccaacaacagcaccgacaccguggacaccgugcuggagaagaacgugaccgugacccacagcgugaaccugcuggaggacaagcacaacggcaagcugugcaagcugagaggcguggccccccugcaccugggcaagugcaacaucgccggcuggauccugggcaaccccgagugcgagagccugagcaccgccagcagcuggagcuacaucguggagaccagcagcagcgacaacggcaccugcuaccccggcgacuucaucgacuacgaggagcugagagagcagcugaacagcgugagcagcuucgagagauucgagaucuuccccaagaccagcagcuggcccaaccacgacagcaacaagggcgugaccgccgccugcccccacgccggcgccaagagcuucuacaagaaccugaucuggcuggugaagaagggcaacagcuaccccaagcugaacaagagcuacaucaacgacaagggcaaggaggugcuggugcuguggggcauccaccaccccagcaccaccgccgaccagcagagccuguaccagaacgccgacgccuacguguucgugggcaccagcagauacagcaagaaguucaagcccgagaucgccaucagacccaaggugagagaccaggagggcagaaugaacuacuacuggacccugguggagcccggcgacaagaucaccuucgaggccaccggcaaccugguggugcccagauacgccuucgccauggagagaaacgccggcagcggcaucaucaucagcgacacccccgugcacgacugcaacaccaccugccagacccccaagggcgccaucaacaccagccugcccuuccagaacauccaccccaucaccaucggcaagugccccaaguacgugaagagcaccaagcugagacuggccaccggccugagaaacgugcccagcauccagagcagaggccuguucggcgccaucgccggcuucaucgagggcggcuggaccggcaugguggacggcugguacggcuaccaccaccagaacgagcagggcagcggcuacgccgccgaccugaagagcacccagaacgccaucgacaagaucaccaacaaggugaacagcgugaucgagaagaugaacacccaguucaccgccgugggcaaggaguucaaccaccuggagaagagaaucgagaaccugaacaagaagguggacgacggcuuccuggacaucuggaccuacaacgccgagcugcuggugcugcuggagaacgagagaacccuggacuaccacgacagcaacgugaagaaccuguacgagaaggugagaaaccagcugaagaacaacgccaaggagaucggcaacggcugcuucgaguucuaccacaagugcgacaacaccugcauggagagcgugaagaacggcaccuacgacuaccccaaguacagcgaggaggccaagcugaacagagaggagaucgacggcgugaagcuggagagcaccagaaucuaccagauccuggccaucuacagcaccguggccagcagccuggugcugguggugagccugggcgccaucagcuucuggaugugcagcaacggcagccugcagugcagaaucugcaucuga

SEQ ID NO: 167134 - RNA, 1701 nt, Artificial Sequence
  derived and/or modified CDS sequence (opt4) from hemagglutinin__InfluenzaA__AEM92407
augaaggccauccugguggugcugcuguacaccuucgccaccgccaacgccgacacccugugcaucggcuaccacgccaacaacagcaccgacaccguggacaccgugcuggagaagaacgugaccgugacccacagcgugaaccugcuggaggacaagcacaacggcaagcugugcaagcugagaggcguggccccccugcaccugggcaagugcaacaucgccggcuggauccugggcaaccccgagugcgagagccugagcaccgccaacagcuggagcuacaucguggagaccagcagcagcgacaacggcaccugcuaccccggcgacuucaucgacuacgaggagcugagagagcagcugagcagcgugagcagcuucgagagauucgagaucuuccccaagaccaacagcuggcccaaccacgacagcaacaagggcgugaccgccgccugcccccacgccggcgccaagagcuucuacaagaaccugaucuggcuggugaagaagggcaacagcuaccccaagcugagcaagagcuacaucaacgacaagggcaaggaggugcuggugcuguggggcauccaccaccccagcaccagcaccgaccagcagagccuguaccagaacgccgacgccuacguguucgugggcaccagcagauacagcaagaaguucaagcccgagaucgccaucagacccaaggugagaaaccaggagggcagaaugaacuacuacuggacccugguggagcccggcgacaagaucaccuucgaggccaccggcaaccugguggugcccagauacgccuucaccaucgagagaaacgccggcagcggcaucaucaucagcgacacccccauccacgacugcaacaccaccugccagacccccaagggcgccaucaacaccagccugcccuuccagaacauccaccccaucaccaucggcaagugccccaaguacgugaagagcaccaagcugagacuggccaccggccugagaaacgugcccagcauccagagcagaggccuguucggcgccaucgccggcuucaucgagggcggcuggaccggcaugguggacggcugguacggcuaccaccaccagaacgagcagggcagcggcuacgccgccgaccugaagagcacccagaacgccaucgacgagaucaccaacaaggugaacagcgugaucgagaagaugaacacccaguucaccgccgugggcaaggaguucaaccaccuggagaagagaaucgagaaccugaacaagaagguggacgacggcuuccuggacaucuggacccacaacgccgagcugcuggugcugcuggagaacgagagaacccuggacuaccacgacagcaacgugaagaaccuguacgagaaggugagaagccagcugaagaacaacgccaaggagaucggcaacggcugcuucgaguucuaccacaagugcgacaacaccugcauggagagcgugaagaacggcaccuacgacuaccccaaguacagcgaggaggccaagcugaacagagaggagaucgacggcgugaagcuggagagcaccagaaucuaccagauccuggccaucuacagcaccguggccagcagccuggugcugguggugagccugggcgccaucagcuucuggaugugcagcaugggcagccugcagugcagaaucugcaucuga

SEQ ID NO: 167135 - RNA, 1701 nt, Artificial Sequence
  derived and/or modified CDS sequence (opt4) from hemagglutinin__InfluenzaA__AEM92417
augaaggccauccugguggugcugcuguacaccuucgccaccgccaacgccgacacccugugcaucggcuaccacgccaacaacagcaccgacaccguggacaccgugcuggagaagaacgugaccgugacccacagcgugaacauccuggaggacaagcacaacggcaagcugugcaagcugagaggcguggccccccugcaccugggcaagugcaacaucgccggcuggauccugggcaaccccgagugcgagagccugagcaccgccagcagcuggagcuacaucguggagaccagcagcagcgacaacggcaccugcuaccccggcgacuucaucgacuacgaggagcugagagagcagcugagcagcgugagcagcuucgagagauucgagaucuuccccaaggccagcagcuggcccaaccacgacagcaacaagggcgugaccgccgccugcccccacgccggcgccaagagcuucuacaagaaccugaucuggcuggugaagaaggagaacagcuaccccaagcugagcaagagcuacaucaacgacaagggcaaggaggugcuggugcuguggggcauccaccaccccagcaccagcgccgaccagcagagccuguaccagaacgccgacgccuacguguucgugggcagcagcagauacagcaagaaguucaagcccgagaucgccaucagacccaaggugagagaccaggagggcagaaugaacuacuacuggacccugguggagcccggcgacaagaucaccuucgaggccaccggcaaccugguggugcccagauacgccuucgccauggagagaaacgccggcagcggcaucaucaucagcgacacccccgugcacgacugcaacaccaccugccagacccccaagggcgccaucaacaccagccugcccuuccagaacauccaccccaucaccaucggcaagugccccaaguacgugaagagcaccaagcugagacuggccaccggccugagaaacgugcccagcauccagagcagaggccuguucggcgccaucgccggcuucaucgagggcggcuggaccggcaugguggacggcugguacggcuaccaccaccagaacgagcagggcagcggcuacgccgccgaccugaagagcacccagaacgccaucgacgagaucaccaacaaggugaacagcgugaucgagaagaugaacacccaguucaccgccgugggcaaggaguucaaccaccuggagaagagaaucgagaaccugaacaagaagguggacgacggcuuccuggacaucuggaccuacaacgccgagcugcuggugcugcuggagaacgagagaacccuggacuaccacgacagcaacgugaagaaccuguacgagaaggugagaagccagcugaagaacaacgccaaggagaucggcaacggcugcuucgaguucuaccacaagugcgacaacaccugcauggagagcgugaagaacggcaccuacgacuaccccaaguacagcgaggaggccaagcugaacagagaggagaucgacggcgugaagcuggagagcaccagaaucuaccagauccuggccaucuacagcaccguggccagcagccuggugcugguggugagccugggcgccaucagcuucuggaugugcagcaacggcagccugcagugcagaaucugcaucuga

SEQ ID NO: 167136 - RNA, 1701 nt, Artificial Sequence
  derived and/or modified CDS sequence (opt4) from hemagglutinin__InfluenzaA__AEM92428
augaaggccauccugguggugcugcuguacaccuucgccaccgccaacgccgacacccugugcaucggcuaccacgccaacaacagcaccgacaccguggacaccgugcuggagaagaacgugaccgugacccacagcgugaaccugcuggaggacaagcacaacggcaagcugugcaagcugagaggcguggccccccugcaccugggcaagugcaacaucgccggcuggauccugggcaaccccgagugcgagagccugagcaccgccagcagcuggagcuacaucguggagaccagcagcagcgacaacggcaccugcuaccccggcgacuucaucgacuacgaggagcugagagagcagcugagcagcgugagcagcuucgagagauucgagaucuuccccaagaccagcagcuggcccaaccacgacagcaacaagggcgugaccgccgccugcccccacgccggcgccaagagcuucuacaagaaccugaucuggcuggugaagaagggcaacagcuaccccaagcugagcaagagcuacaucaacgacaagggcaaggaggugcuggugcuguggggcauccaccaccccagcaccagcgccgaccagcagagccuguaccagaacgccgacgccuacguguucgugggcaccagcagauacagcaagaaguucaagcccgagaucgccaucagacccaaggugagagaccaggagggcagaaugaacuacuacuggacccugguggagcccggcgacaagaucaccuucgaggccaccggcaaccugguggugcccagauacgccuucgccauggagagaaacgccggcagcggcaucaucaucagcgacacccccgugcacgacugcaacaccaccugccagacccccaagggcgccaucaacaccagccugcccuuccagaacauccaccccaucaccaucggcaagugccccaaguacgugaagagcaccaagcugagacuggccaccggccugagaaacgugcccagcauccagagcagaggccuguucggcgccaucgccggcuucaucgagggcggcuggaccggcaugguggacggcugguacggcuaccaccaccagaacgagcagggcagcggcuacgccgccgaccugaagagcacccagaacgccaucgacgagaucaccaacaaggugaacagcgugaucgagaagaugaacacccaguucaccgccgugggcaaggaguucaaccaccuggagaagagaaucgagaaccugaacaagaagguggacgacggcuuccuggacaucuggaccuacaacgccgagcugcuggugcugcuggagaacgagagaacccuggacuaccacgacagcaacgugaagaaccuguacgagaaggugagaagccagcugaagaacaacgccaaggagaucggcaacggcugcuucgaguucuaccacaagugcgacaacaugugcauggagagcgugaagaacggcaccuacgacuaccccaaguacagcgaggaggccaagcugaacagagaggagaucgacggcgugaagcuggagagcaccagaaucuaccagauccuggccaucuacagcaccguggccagcagccuggugcugguggugagccugggcgccaucagcuucuggaugugcagcaacggcagccugcagugcagaaucugcaucuga

SEQ ID NO: 167137 - RNA, 1701 nt, Artificial Sequence
  derived and/or modified CDS sequence (opt4) from hemagglutinin__InfluenzaA__AEM92438
augaaggccauccugguggugcugcuguacaccuucgccaccgccaacgccgacacccugugcaucggcuaccacgccaacaacagcaccgacaccguggacaccgugcuggagaagaacgugaccgugacccacagcgugaaccugcuggaggacaagcacaacggcaagcugugcaagcugagaggcguggccccccugcaccugggcaagugcaacaucgccggcuggauccugggcaaccccgagugcgagagccugagcaccgccagcagcuggagcuacaucguggagaccagcagcagcgacaacggcaccugcuaccccggcgacuucaucgacuacgaggagcugagagagcagcugagcagcgugagcagcuucgagagauucgagaucuuccccaagaccagcagcuggcccaaccacgacagcaacaagggcgugaccgccgccugcccccacgccggcgccaagggcuucuacaagaaccugaucuggcuggugaagaagggcaacagcuaccccaagcugagcaagagcuacaucaacgacaagggcaaggaggugcuggugcuguggggcauccaccaccccagcaccaccgccgaccagcagagccuguaccagaacgccgacaccuacguguucgugggcaccagcagauacagcaagaaguucaagcccgagaucgccaucagacccaaggugagagaccaggagggcagaaugaacuacuacuggacccugguggagcccggcgacaagaucaccuucgaggccaccggcaaccugguggugcccagauacgccuucgccauggagagaaacgccggcagcggcaucaucaucagcgacacccccgugcacgacugcaacaccaccugccagacccccaagggcgccaucaacaccagccugcccuuccagaacauccaccccaucaccaucggcaagugccccaaguacgugaagagcaccaagcugagacuggccaccggccugagaaacgugcccagcauccagagcagaggccuguucggcgccaucgccggcuucaucgagggcggcuggaccggcaugguggacggcugguacggcuaccaccaccagaacgagcagggcagcggcuacgccgccgaccugaagagcacccagaacgccaucgacaagaucaccaacaaggugaacagcgugaucgagaagaugaacacccaguucaccgccgugggcaaggaguucaaccaccuggagaagagaaucgagaaccugaacaagaagguggacgacggcuuccuggacaucuggaccuacaacgccgagcugcuggugcugcuggagaacgagagaacccuggacuaccacgacagcaacgugaagaaccuguacgagaagaucagaaaccagcugaagaacaacgccaaggagaucggcaacggcugcuucgaguucuaccacaagugcgacaacaccugcauggagagcgugaagaacggcaccuacgacuaccccaaguacagcgaggaggccaagcugaacagagaggagaucgacggcgugaagcuggagagcaccagaaucuaccagauccuggccaucuacagcaccguggccagcagccuggugcugguggugagccugggcgccaucagcuucuggaugugcagcaacggcagccugcagugcagaaucugcaucuga

SEQ ID NO: 167138 - RNA, 1701 nt, Artificial Sequence; identical to SEQ ID NO: 166869
  derived and/or modified CDS sequence (opt4) from hemagglutinin__InfluenzaA__AEM92448

SEQ ID NO: 167139 - RNA, 1701 nt, Artificial Sequence; identical to SEQ ID NO: 166869
  derived and/or modified CDS sequence (opt4) from hemagglutinin__InfluenzaA__AEM92458

SEQ ID NO: 167140 - RNA, 1701 nt, Artificial Sequence
  derived and/or modified CDS sequence (opt4) from hemagglutinin__InfluenzaA__AEM92468
augaaggccauccugguggugcugcuguacaccuucgccaccgccaacgccgacacccugugcaucggcuaccacgccaacaacagcaccgacaccguggacaccgugcuggagaagaacgugaccgugacccacagcgugaaccugcuggaggacaagcacaacggcaagcugugcaagcugagaggcguggccccccugcaccugggcaagugcaacaucgccggcuggauccugggcaaccccgagugcgagagccugagcaccgccagcagcuggagcuacaucguggagaccagcagcagcgacaacggcaccugcuaccccggcgacuucaucaacuacgaggagcugagagagcagcugagcagcgugagcagcuucgagagauucgagaucuuccccaagaccagcagcuggcccaaccacgacagcaacaagggcgugaccgccgccugcccccacgccggcgccaagagcuucuacaagaaccugaucuggcuggugaagaagggcaacagcuaccccaagcugagcaagagcuacaucaacgacaagggcaaggaggugcuggugcuguggggcauccaccaccccagcaccagcgccgaccagcagagccuguaccagaacgccgacgccuacguguucgugggcaccagcaaguacagcaaggaguucaagcccgagaucgccgugagacccaaggugagagaccaggagggcagaaugaacuacuacuggacccugguggagcccggcgacaagaucaccuucgaggccaccggcaaccugcuggugcccagauacgccuucgccauggagagaaacgccggcagcggcaucaucaucagcgacacccccgugcacgacugcaacaccaucugccagacccccaagggcgccaucaacaccagccugcccuuccagaacauccaccccaucaccaucggcaagugccccaaguacgugaagagcaccaagcugagacuggccaccggccugagaaacgugcccagcauccagagcagaggccuguucggcgccaucgccggcuucaucgagggcggcuggaccggcaugguggacggcugguacggcuaccaccaccagaacgagcagggcagcggcuacgccgccgaccugaagagcacccagaacgccaucgacaagaucaccaacaaggugaacagcgugaucgagaagaugaacacccaguucaccgccgugggcaaggaguucaaccaccuggagaagagaaucgagaaccugaacaagaagguggacgacggcuuccuggacaucuggaccuacaacgccgagcugcuggugcugcuggagaacgagagaacccuggacuaccacgacagcaacgugaagaaccuguacgagaaggugagaagccagcugaagaacaacgccaaggagaucggcaacggcugcuucgaguucuaccacaagugcgacaacaccugcauggagagcgugaagaacggcaccuacgacuaccccaaguacagcgaggaggccaagcugaacagagaggagaucgacggcgugaagcuggagagcaccagaaucuaccagauccuggccaucuacagcaccguggccagcagccuggugcugguggugagccugggcgccaucagcuucuggaugugcagcaacggcagccugcagugcagaaucugcaucuga

SEQ ID NO: 167141 - RNA, 1701 nt, Artificial Sequence
  derived and/or modified CDS sequence (opt4) from hemagglutinin__InfluenzaA__AEM92478
augaaggccauccugguggugcugcuguacaccuucgccaccgccaacgccgacacccugugcaucggcuaccacgccaacaacagcaccgacaccguggacaccgugcuggagaagaacgugaccgugacccacagcgugaaccugcuggaggacaagcacaacggcaagcugugcaagcugagaggcguggccccccugcaccugggcaagugcaacaucgccggcuggauccugggcaaccccgagugcgagagccugagcaccgccagcagcuggagcuacaucguggagaccagcagcagcgacaacggcaccugcuaccccggcgacuucaucaacuacgaggagcugagagagcagcugagcagcgugagcagcuucgagagauucgagaucuuccccaagaccagcagcuggcccaaccacgacagcaacaagggcgugaccgccgccugcccccacgccggcgccaagagcuucuacaagaaccugaucuggcuggugaagaagggcaacagcuaccccaagcugagcaagagcuacaucaacgacaagggcaaggaggugcuggugcuguggggcauccaccaccccagcaccagcgccgaccagcagagccuguaccagaacgccgacgccuacguguucgugggcaccagcaaguacagcaagaaguucaagcccgagaucgccgugagacccaaggugagagaccaggagggcagaaugaacuacuacuggacccugguggagcccggcgacaagaucaccuucgaggccaccggcaaccugcuggugcccagauacgccuucgccauggagagaaacgccggcagcggcaucaucaucagcgacacccccgugcacgacugcaacaccaucugccagacccccaagggcgccaucaacaccagccugcccuuccagaacauccaccccaucaccaucggcaagugccccaaguacgugaagagcaccaagcugagacuggccaccggccugagaaacgugcccagcauccagagcagaggccuguucggcgccaucgccggcuucaucgagggcggcuggaccggcaugguggacggcugguacggcuaccaccaccagaacgagcagggcagcggcuacgccgccgaccugaagagcacccagaacgccaucgacaagaucaccaacaaggugaacagcgugaucgagaagaugaacacccaguucaccgccgugggcaaggaguucaaccaccuggagaagagaaucgagaaccugaacaagaagguggacgacggcuuccuggacaucuggaccuacaacgccgagcugcuggugcugcuggagaacgagagaacccuggacuaccacgacagcaacgugaagaaccuguacgagaaggugagaagccagcugaagaacaacgccaaggagaucggcaacggcugcuucgaguucuaccacaagugcgacaacaccugcauggagagcgugaagaacggcaccuacgacuaccccaaguacagcgaggaggccaagcugaacagagaggagaucgacggcgugaagcuggagagcaccagaaucuaccagauccuggccaucuacagcaccguggccagcagccuggugcugguggugagccugggcgccaucagcuucuggaugugcagcaacggcagccugcagugcagaaucugcaucuga

SEQ ID NO: 167142 - RNA, 1701 nt, Artificial Sequence
  derived and/or modified CDS sequence (opt4) from hemagglutinin__InfluenzaA__AEM92498
augaaggccauccugguggugcugcuguacaccuucgccaccgccaacgccgacacccugugcaucggcuaccacgccaacaacagcaccgacaccguggacaccgugcuggagaagaacgugaccgugacccacagcgugaaccugcuggaggacaagcacaacggcaagcugugcaagcugagaggcguggccccccugcaccugggcaagugcaacaucgccggcuggauccugggcaaccccgagugcgagagccugagcaccgccaacagcuggagcuacaucguggagaccagcagcagcgacaacggcaccugcuaccccggcgacuucaucgacuacgaggagcugagagagcagcugagcagcgugagcagcuucgagagauucgagaucuuccccaagaccaacagcuggcccaaccacgacagcaacaagggcgugaccgccgccugcccccacgccggcgccaagagcuucuacaagaaccugaucuggcuggugaagaagggcaacagcuaccccaagcugagcaagagcuacaucaacgacaagggcaaggaggugcuggugcuguggggcauccaccaccccagcaccagcgccgaccagcagagccuguaccagaacgccgacgccuacguguucgugggcaccagcagauacagcaagaaguucaagcccgagaucgccaucagacccaaggugagagaccaggagggcagaaugaacuacuacuggacccugguggagcccggcgacaagaucaccuucgaggccaccggcaaccugguggugcccagauacgccuucgccauggagagaaacgccggcagcggcaucaucaucagcgacacccccgcccacgacugcaacaccaccugccagacccccaagggcgccaucaacaccagccugcccuuccagaacauccaccccaucaccaucggcaagugccccaaguacgugaagagcaccaagcugagacuggccaccggccugagaaacgugcccagcauccagagcagaggccuguucggcgccaucgccggcuucaucgagggcggcuggaccggcaugguggacggcugguacggcuaccaccaccagaacgagcagggcagcggcuacgccgccgaccugaagagcacccagaacgccaucgacaagaucaccaacaaggugaacagcgugaucgagaagaugaacacccaguucaccgccgugggcaaggaguucaaccaccuggagaagagaaucgagaaccugaacaagaagguggacgacggcuuccuggacaucuggaccuacaacgccgagcugcuggugcugcuggagaacgagagaacccuggacuaccacgacagcaacgugaagaaccuguacgagaaggugagaagccagcugaagaacaacgccaaggagaucggcaacggcugcuucgaguucuaccacaagugcgacaacaccugcauggagagcgugaagaacggcaccuacgacuaccccaaguacagcgaggaggccaagcugaacagagaggagaucgacggcgugaagcuggagagcaccagaaucuaccagauccuggccaucuacagcaccguggccagcagccuggugcugguggugagccugggcgccaucagcuucuggaugugcagcaacggcagccugcagugcagaaucugcaucuga

SEQ ID NO: 167143 - RNA, 1701 nt, Artificial Sequence
  derived and/or modified CDS sequence (opt4) from hemagglutinin__InfluenzaA__AEM92518
augaaggccauccugguggugcugcuguacaccuucgccaccgccaacgccgacacccugugcaucggcuaccacgccaacaacagcaccgacaccguggacaccgugcuggagaagaacgugaccgugacccacagcgugaaccugcuggaggacaagcacaacggcaagcugugcaagcugagaggcguggccccccugcaccugggcaagugcaacaucgccggcuggauccugggcaaccccgagugcgagagccugagcaccgccagcagcuggagcuacaucguggagaccagcagcagcgacaacggcaccugcuaccccggcgacuucaucgacuacgaggagcugagagagcagcugagcagcgugagcagcuucgagagauucgagaucuuccccaagaccagcagcuggcccaaccacgacagcaacaagggcgugaccaccgccugcccccacgccggcgccaagagcuucuacaagaaccugaucuggcuggugaagaagggcaacagcuaccccaagcugagcaagagcuacaucaacgacaagagaaaggaggugcuggugcuguggggcauccaccacccccccaccagcgccgaccagcagagccuguaccagaacgccgacgccuacguguucgugggcaccagcagauacagcaagaaguucaagcccgagaucgccaucagacccaaggugagagaccaggagggcagaaugaacuacuacuggacccugguggagcccggcgacaagaucaccuucgaggccaccggcaaccugguggugcccagauacgccuucgccauggagagaaacgccggcagcggcaucaucaucagcgacacccccgugcacgacugcaacgccaccugccagacccccaagggcgccaucaacaccagccugcccuuccagaacauccaccccaucaccaucggcaagugccccaaguacgugaagagcaccaagcugagacuggccaccggccugagaaacgugcccagcauccagagcagaggccuguucggcgccaucgccggcuucaucgagggcggcuggaccggcaugguggacggcugguacggcuaccaccaccagaacgagcagggcagcggcuacgccgccgaccugaagagcacccagaacgccaucgacgagaucaccaacaaggugaacagcgugaucgagaagaugaacacccaguucaccgccgugggcaaggaguucaaccaccuggagaagagaaucgagaaccugaacaagaagguggacgacggcuuccuggacaucuggaccuacaacgccgagcugcuggugcugcuggagaacgagagaacccuggacuaccacgacagcaaggugaagaaccuguacgagaaggugagaagccagcugaagaacaacgccaaggagaucggcaacggcugcuucgaguucuaccacaagugcgacaacaccugcauggagagcgugaagaacggcaccuacgacuaccccaaguacagcgaggaggccaagcugaacagagaggagaucgacggcgugaagcuggagagcaccagaaucuaccagauccuggccaucuacagcaccguggccagcagccuggugcugguggugagccugggcgccaucagcuucuggaugugcagcaacggcagccugcagugcagaaucugcaucuga

SEQ ID NO: 167144 - RNA, 1701 nt, Artificial Sequence
  derived and/or modified CDS sequence (opt4) from hemagglutinin__InfluenzaA__AEM92528
augaaggccauccugguggugcugcuguacaccuucgccaccgccaacgccgacacccugugcaucggcuaccacgccaacaacagcaccgacaccguggacaccgugcuggagaagaacgugaccgugacccacagcgugaaccugcuggaggacaagcacaacggcaagcugugcaagcugagaggcguggccccccugcaccugggcaagugcaacaucgccggcuggauccugggcaaccccgagugcgagagccugagcaccgccagcagcuggagcuacaucguggagaccagcagcagcgacaacggcaccugcuaccccggcgacuucaucgacuacgaggagcugagagagcagcugagcagcgugagcagcuucgagagauucgagaucuuccccaagaccagcagcuggcccaaccacgacagcaacaagggcgugaccgccgccugcccccacgccggcgccaagagcuucuacaagaaccugaucuggcuggugaagaagggcaacagcuaccccaagcugaacaagagcuacaucaacgacaagggcaaggaggugcuggugcuguggggcauccaccaccccagcaccagcgccgaccagcagagccuguaccagaacgccgacgccuacguguucgugggcaccagcagauacagcaagaaguucaagcccgagaucgccaucagacccaaggugagagaccaggagggcagaaugaacuacuacuggacccugguggagcccggcgacaagaucaccuucgaggccaccggcaaccugguggugcccagauacgccuucgccauggagagaaacgccggcagcggcaucaucaucagcgacacccccgugcacgacugcaacaccaccugccagacccccaagggcgccaucaacaccagccugcccuuccagaacauccaccccaucaccaucggcaagugccccaaguacgugaagagcaccaagcugagacuggccaccggccugagaaacgugcccagcauccagagcagaggccuguucggcgccaucgccggcuucaucgagggcggcuggaccggcaugguggacggcugguacggcuaccaccaccagaacgagcagggcagcggcuacgccgccgaccugaagagcacccagaacgccaucgacaagaucaccaacaaggugaacagcgugaucgagaagaugaacacccaguucaccgccgugggcaaggccuucaaccaccuggagaagagaaucgagaaccugaacaagaagguggacgacggcuuccuggacaucuggaccuacaacgccgagcugcuggugcugcuggagaacgagagaacccuggacuaccacgacagcaacgugaagaaccuguacgagaaggugagaaaccagcugaagaacaacgccaaggagaucggcaacggcugcuucgaguucuaccacaagugcgacaacaccugcauggagagcgugaagaacggcaccuacgacuaccccaaguacagcgaggaggccaagcugaacagagaggagaucgacggcgugaagcuggagagcaccagaaucuaccagauccuggccaucuacagcaccguggccagcagccuggugcugguggugagccugggcgccaucagcuucuggaugugcagcaacggcagccugcagugcagaaucugcaucuga

SEQ ID NO: 167145 - RNA, 1701 nt, Artificial Sequence
  derived and/or modified CDS sequence (opt4) from hemagglutinin__InfluenzaA__AEM92548
augaaggccauccugguggugcugcuguacaccuucgccaccgccaccgccgacacccugugcaucggcuaccacgccaacaacagcaccgacaccguggacaccgugcuggagaagaacgugaccgugacccacagcgugaaccugcuggaggacaagcacaacggcaagcugugcaagcugagaggcguggccccccugcaccugggcaagugcaacaucgccggcuggauccugggcaaccccgagugcgagagccugagcaccgccagcagcuggagcuacaucguggagaccagcagcagcgacaacggcaccugcuaccccggcgacuucaucaacuacgaggagcugagagagcagcugagcagcgugagcagcuucgagagauucgagaucuuccccaagaccagcagcuggcccaaccacgacagcaacaagggcgugaccgccgccugcccccacgccggcgccaagagcuucuacaagaaccugaucuggcuggugaagaagggcaacagcuaccccaagcugagcaagagcuacaucaacgacaagggcaaggaggugcuggugcuguggggcauccaccaccccagcaccagcgccgaccagcagagccuguaccagaacgccgacgccuacguguucgugggcaccagcagauacagcaagaaguucaagcccgagaucgccaucagacccaaggugagagaccaggagggcagaaugaacuacuacuggacccugguggagcccggcgacaagaucaccuucgaggccaccggcaaccugguggugcccagauacgccuucgccauggagagaaacgccggcagcggcaucaucaucagcgacacccccgugcacgacugcaacaccaccugccagacccccaagggcgccaucaacaccagccugcccuuccagaacauccaccccaucaccaucggcaagugccccaaguacgugaagagcaccaagcugagacuggccaccggccugagaaacgugcccagcauccagagcagaggccuguucggcgccaucgccggcuucaucgagggcggcuggaccggcaugguggacggcugguacggcuaccaccaccagaacgagcagggcagcggcuacgccgccgaccugaagagcacccagaacgccaucgacaagaucaccaacaaggugaacagcgugaucgagaagaugaacacccaguucaccgccgugggcaaggaguucaaccaccuggagaagagaaucgagaaccugaacaagaagguggacgacggcuuccuggacaucuggaccuacaacgccgagcugcuggugcugcuggagaacgagagaacccuggacuaccacgacagcaacgugaagaaccuguacgagaaggugagaaaccagcugaagaacaacgccaaggagaucggcaacggcugcuucgaguucuaccacaagugcgacaacaccugcauggagagcgugaagaacggcaccuacgacuaccccaaguacagcgaggaggccaagcugaacagagaggagaucgacggcgugaagcuggagagcaccagaaucuaccagauccuggccaucuacagcaccguggccagcagccuggugcugguggugagccugggcgccaucagcuucuggaugugcagcaacggcagccugcagugcagaaucugcaucuga

SEQ ID NO: 167146 - RNA, 1701 nt, Artificial Sequence
  derived and/or modified CDS sequence (opt4) from hemagglutinin__InfluenzaA__AEM92558
augaaggccauccugguggugcugcuguacaccuucgccaccgccaacgccgacacccugugcaucggcuaccacgccaacaacagcaccgacaccguggacaccgugcuggagaagaacgugaccgugacccacagcgugaaccugcuggaggacaagcacaacggcaagcugugcaagcugagaggcguggccccccugcaccugggcaagugcagcaucgccggcuggauccugggcaaccccgagugcgagagccugagcaccgccagcagcuggagcuacaucguggagaccagcagcagcgacaacggcaccugcuaccccggcgacuucaucaacuacgaggagcugagagagcagcugagcagcgugagcagcuucgagagauucgagaucuuccccaagaccagcagcuggcccaaccacgacagcaacaagggcgugaccgccgccugcccccacgccggcgccaagagcuucuacaagaaccugaucuggcuggugaagaagggcaacagcuaccccaagcugagcaagagcuacaucaacgacaagggcaaggaggugcuggugcuguggggcauccaccaccccagcaccaccgccgaccagcagagccuguaccagaacgccgacgccuacguguucgugggcaccagcagauacagcaagaaguucaagcccgagaucgccaucagacccaaggugagagaccaggagggcagaaugaacuacuacuggacccugguggagcccggcgacaagaucaccuucgaggccaccggcaaccugguggugcccagauacgccuucgccauggagagaaacgccggcagcggcaucaucaucagcgacacccccgugcacgacugcaacaccaccugccagacccccaagggcgccaucaacaccagccugcccuuccagaacauccaccccaucaccaucggcaagugccccaaguacgugaagagcaccaagcugagacuggccaccggccugagaaacgugcccagcauccagagcagaggccuguucggcgccaucgccggcuucaucgagggcggcuggaccggcaugguggacggcugguacggcuaccaccaccagaacgagcagggcagcggcuacgccgccgaccugaagagcacccagaacgccaucgacaagaucaccaacaaggugaacagcgugaucgagaagaugaacacccaguucaccgccgugggcaaggaguucaaccaccuggagaagagaaucgagaaccugaacaagaagguggacgacggcuuccuggacaucuggaccuacaacgccgagcugcuggugcugcuggagaacgagagaacccuggacuaccacgacagcaacgugaagaaccuguacgagaaggugagaaaccagcugaagaacaacgccaaggagaucggcaacggcugcuucgaguucuaccacaagugcgacaacaccugcauggagagcgugaagaacggcaccuacgacuaccccaaguacagcgaggaggccaagcugaacagagaggagaucgacggcgugaagcuggagagcaccagaaucuaccagauccuggccaucuacagcaccguggccagcagccuggugcugguggugagccugggcgccaucagcuucuggaugugcagcaacggcagccugcagugcagaaucugcaucuga

SEQ ID NO: 167147 - RNA, 1701 nt, Artificial Sequence; identical to SEQ ID NO: 167146
  derived and/or modified CDS sequence (opt4) from hemagglutinin__InfluenzaA__AEM92568

SEQ ID NO: 167148 - RNA, 1701 nt, Artificial Sequence
  derived and/or modified CDS sequence (opt4) from hemagglutinin__InfluenzaA__AEM92578
augaaggccauccugguggugcugcuguacaccuucgccaccgccaacgccgacacccugugcaucggcuaccacgccaacaacagcaccgacaccguggacaccgugcuggagaagaacgugaccgugacccacagcgugaaccugcuggaggacaagcacaacggcaagcugugcaagcugagaggcguggccccccugcaccugggcaagugcaacaucgccggcuggauccugggcaaccccgagugcgagagccugagcaccgccagcagcuggagcuacaucguggagaccagcaucagcgacaacggcaccugcuaccccggcgacuucaucaacuacgaggagcugagagagcagcugagcagcgugagcagcuucgagagauucgagaucuuccccaagaccagcagcuggcccaaccacgacagcaacaagggcgugaccgccgccugcccccacgccggcgccaagagcuucuacaagaaccugaucuggcuggugaagaagggcaacagcuaccccaagcugagcaagagcuacaucaacgacaagggcaaggaggugcuggugcuguggggcauccaccaccccagcaccagcgccgaccagcagagccuguaccagaacgccgacgccuacguguucgugggcaccagcagauacagcaagaaguucaagcccgagaucgccaucagacccaaggugagagaccaggagggcagaaugaacuacuacuggacccugguggagcccggcgacaagaucaccuucgaggccaccggcaaccugguggugcccagauacgccuucgccauggagagaaacgccggcagcggcaucaucaucagcgacacccccgugcacgacugcaacaccaccugccagacccccaagggcgccaucaacaccagccugcccuuccagaacauccaccccaucaccaucggcaagugccccaaguacgugaagagcaccaagcugagacuggccaccggccugagaaacgugcccagcauccagagcagaggccuguucggcgccaucgccggcuucaucgagggcggcuggaccggcaugguggacggcugguacggcuaccaccaccagaacgagcagggcagcggcuacgccgccgaccugaagagcacccagaacgccaucgacaagaucaccaacaaggugaacagcgugaucgagaagaugaacacccaguucaccgccgugggcaaggaguucaaccaccuggagaagagaaucgagaaccugaacaagaagguggacgacggcuuccuggacaucuggaccuacaacgccgagcugcuggugcugcuggagaacgagagaacccuggacuaccacgacagcaacgugaagaaccuguacgagaaggugagaaaccagcugaagaacaacgccaaggagaucggcaacggcugcuucgaguucuaccacaagugcgacaacaccugcauggagagcgugaagaacggcaccuacgacuaccccaaguacagcgaggaggccaagcugaacagagaggagaucgacggcgugaagcuggagagcaccagaaucuaccagauccuggccaucuacagcaccguggccagcagccuggugcugguggugagccugggcgccaucagcuucuggaugugcagcaacggcagccugcagugcagaaucugcaucuga

SEQ ID NO: 167149 - RNA, 1701 nt, Artificial Sequence
  derived and/or modified CDS sequence (opt4) from hemagglutinin__InfluenzaA__AEM92608
augaaggccauccugguggugcugcuguacaccuucgccaccgccaacgccgacacccugugcaucggcuaccacgccaacaacagcaccgacaccguggacaccgugcuggagaagaacgugaccgugacccacagcgugaaccugcuggaggacaagcacaacggcaagcugugcaagcugagaggcguggccccccugcaccugggcaagugcaacaucgccggcuggauccugggcaaccccgagugcgagagccugagcaccgccagcagcuggagcuacaucguggagaccagcagcagcgacaacggcaccugcuaccccggcgacuucaucgacuacgaggagcugagagagcagcugagcagcgugagcagcuucgagagauucgagaucuuccccaagaccagcagcuggcccaaccacgacagcaacaagggcgugaccgccgccugcccccacgccggcgccaagagcuucuacaagaaccugaucuggcuggugaagaagggcaacagcuaccccaagcugagcaagagcuacaucaacgacaagggcaaggaggugcuggugcuguggggcauccaccaccccagcaccaccgccgaccagcagagccuguaccagaacgccgacgccuacguguucgugggcaccagcagauacagcaagaaguucaagcccgagaucgccaucagacccaaggugagagaccaggagggcagaaugaacuacuacuggacccugguggagcccggcgacaagaucaccuucgaggccaccggcaaccugguggugcccagauacgccuucgccauggagagaaacgccggcagcggcaucaucaucagcgacacccccgugcacgacugcaacaccaccugccagacccccaagggcgccaucaacaccagccugcccuuccagaacauccaccccaucaccaucggcaagugccccaaguacgugaagagcaccaagcugagacuggccaccggccugagaaacgugcccagcauccagagcagaggccuguucggcgccaucgccggcuucaucgagggcggcuggaccggcaugguggacggcugguacggcuaccaccaccagaacgagcagggcagcggcuacgccgccgaccugaagagcacccagaacgccaucgacaagaucaccaacaaggugaacagcgugaucgagaagaugaacacccaguucaccgccgugggcaaggaguucaaccaccuggagaagagaaucgagaaccugaacaagaagguggacgacggcuuccuggacaucuggaccuacaacgccgagcugcuggugcugcuggagaacgagagaacccuggacuaccacgacagcaacgugaagaaccuguacgagaaggugagaaaccagcugaagaacaacgccaaggagaucggcaacggcugcuucgaguucuaccacaagugcgacaacaccugcauggagagcgugaagaacggcaccuacgacuaccccaaguacagcgaggaggccaagcugaacagagaggagaucgacggcgugaagcuggagagcaccagaaucuaccagauccuggccaucuacagcaccguggccagcagccuggugcugguggugagccugggcgccaucagcuucuggaugugcagcaacggcagccugcagugcagaaucugcaucuga

SEQ ID NO: 167150 - RNA, 1701 nt, Artificial Sequence
  derived and/or modified CDS sequence (opt4) from hemagglutinin__InfluenzaA__AEM92618
augaaggccauccugguggugcugcuguacaccuucgccaccgccaacgccgacacccugugcaucggcuaccacgccaacaacagcaccgacaccguggacaccgugcuggagaagaacgugaccgugacccacagcgugaaccugcuggaggacaagcacaacggcaagcugugcaagcugagaggcguggccccccugcaccugggcaagugcaacaucgccggcuggauccugggcaaccccgagugcgagagccugagcaccgccaacagcuggagcuacaucguggagaccagcagcagcgacaacggcaccugcuaccccggcgacuucaucgacuacgaggagcugagagagcagcugagcagcgugagcagcuucgagagauucgagaucuuccccaagaccaacagcuggcccaaccacgacagcaacaagggcgugaccgccgccugcccccacgccggcgccaagagcuucuacaagaaccugaucuggcuggugaagaccggcaacagcuaccccaagcugagcaagagcuacaucaacgacaagggcaaggaggugcuggugcuguggggcauccaccaccccagcaccagcgccgaccagcagagccuguaccagaacgccgacgccuacguguucgugggcaccagcagauacagcagaaaguucaagcccgagaucgccaucagacccaaggugagagaccaggagggcagaaugaacuacuacuggacccugguggagcccggcgacaagaucaccuucgaggccaccggcaaccugguggugcccagauacgccuucgccauggagagaaacgccggcagcggcaucaucaucagcgacacccccgcccacgacugcaacaccaccugccagacccccaagggcgccaucaacaccagccugcccuuccagaacauccaccccaucaccaucggcaagugccccaaguacgugaagagcaccaagcugagacuggccaccggccugagaaacgugcccagcauccagagcagaggccuguucggcgccaucgccggcuucaucgagggcggcuggaccggcaugguggacggcugguacggcuaccaccaccagaacgagcagggcagcggcuacgccgccgaccugaagagcacccagaacgccaucgacaagaucaccaacaaggugaacagcgugaucgagaagaugaacacccaguucaccgccgugggcaaggaguucaaccaccuggagaagagaaucgagaaccugaacaagaagguggacgacggcuuccuggacaucuggaccuacaacgccgagcugcuggugcugcuggagaacgagagaacccuggacuaccacgacagcaacgugaagaaccuguacgagaaggugagaagccagcugaagaacaacgccaaggagaucggcaacggcugcuucgaguucuaccacaagugcgacaacaccugcauggagagcgugaagaacggcaccuacgacuaccccaaguacagcgaggaggccaagcugaacagagaggagaucgacggcgugaagcuggagagcaccagaaucuaccagauccuggccaucuacagcaccguggccagcagccuggugcugguggugagccugggcgccaucagcuucuggaugugcagcaacggcagccugcagugcagaaucugcaucuga

SEQ ID NO: 167151 - RNA, 1701 nt, Artificial Sequence
  derived and/or modified CDS sequence (opt4) from hemagglutinin__InfluenzaA__AEM92638
augaaggccauccugguggugcugcuguacaccuucgccaccgccaacgccgacacccugugcaucggcuaccacgccaacaacagcaccgacaccguggacaccgugcuggagaagaacgugaccgugacccacagcgugaacauccuggaggacaagcacaacggcaagcugugcaagcugagaggcguggccccccugcaccugggcaagugcaacaucgccggcuggauccugggcaaccccgagugcgagagccugagcaccgccagcagcuggagcuacaucguggagaccagcagcagcgacaacggcaccugcuaccccggcgacuucaucgacuacgaggagcugagagagcagcugagcagcgugagcagcuucgagagauucgagaucuuccccaagaccagcagcuggcccaaccacgacaccaacaagggcgugaccgccgccugcccccacgccggcgccaagagcuucuacaagaaccugaucuggcuggugaagaagggcaacagcuaccccaagcugagcaagagcuacaucaacgacaagggcaaggaggugcuggugcuguggggcauccaccaccccagcaccagcgccgaccagcagagccuguaccagaacgccgacgccuacguguucgugggcagcagcagauacagcaagaaguucaagcccgagaucgccaucagacccaaggugagagaccaggagggcagaaugaacuacuacuggacccugguggagcccggcgacaagaucaccuucgaggccaccggcaaccugguggugcccagauacgccuucgccauggagaagaacgccggcagcggcaucaucaucagcgacacccccgugcacgacugcaacaccaccugccagacccccaagggcgccaucaacaccagccugcccuuccagaacauccaccccaucaccaucggcaagugccccaaguacgugaagagcaccaagcugagacuggccaccggccugagaaacgugcccagcauccagagcagaggccuguucggcgccaucgccggcuucaucgagggcggcuggaccggcaugguggacggcugguacggcuaccaccaccagaacgagcagggcagcggcuacgccgccgaccugaagagcacccagaacgccaucgacgagaucaccaacaaggugaacagcgugaucgagaagaugaacacccaguucaccgccgugggcaaggaguucaaccaccuggagaagagaaucgagaaccugaacaagaagguggacgacggcuuccuggacaucuggaccuacaacgccgagcugcuggugcugcuggagaacgagagaacccuggacuaccacgacagcaacgugaagaaccuguacgagaaggugagaagccagcugaagaacaacgccaaggaggugggcaacggcugcuucgaguucuaccacaagugcgacaacaccugcauggagagcgugaagaacggcaccuacgacuaccccaaguacagcgaggaggccaagcugaacagagaggagaucgacggcgugaagcuggagagcaccagaaucuaccagauccuggccaucuacagcaccgccgccagcagccuggugcugguggugagccugggcgccaucagcuucuggaugugcagcaacggcagccugcagugcagaaucugcaucuga

SEQ ID NO: 167152 - RNA, 1701 nt, Artificial Sequence
  derived and/or modified CDS sequence (opt4) from hemagglutinin__InfluenzaA__AEM92648
augaaggccauccugguggugcugcuguacaccuucgccaccgccaacgccgacacccugugcaucggcuaccacgccaacaacagcaccgacaccguggacaccgugcuggagaagaacgugaccgugacccacagcgugaacauccuggaggacaagcacaacggcaagcugugcaagcugagaggcguggccccccugcaccugggcaagugcaacaucgccggcuggauccugggcaaccccgagugcgagagccugagcaccgccagcagcuggagcuacaucguggagaccagcagcagcgacaacggcaccugcuaccccggcgacuucaucgacuacgaggagcugagagagcagcugagcagcgugagcagcuucgagagauucgagaucuuccccaagaccagcagcuggcccaaccacgacaccaacaagggcgugaccgccgccugcccccacgccggcgccaagagcuucuacaagaaccugaucuggcuggugaaggagggcaacagcuaccccaagcugagcaagagcuacaucaacgacaagggcaaggaggugcuggugcuguggggcauccaccaccccagcaccagcgccgaccagcagagccuguaccagaacgccgacgccuacguguucgugggcagcagcagauacagcaagaaguucaagcccgagaucgccaucagacccaaggugagagaccaggagggcagaaugaacuacuacuggacccugguggagcccggcgacaagaucaccuucgaggccaccggcaaccugguggugcccagauacgccuucgccauggagaagaacgccggcagcggcaucaucaucagcgacacccccgugcacgacugcaacaccaccugccagacccccaagggcgccaucaacaccagccugcccuuccagaacauccaccccaucaccaucggcaagugccccaaguacgugaagagcaccaagcugagacuggccaccggccugagaaacgugcccagcauccagagcagaggccuguucggcgccaucgccggcuucaucgagggcggcuggaccggcaugguggacggcugguacggcuaccaccaccagaacgagcagggcagcggcuacgccgccgaccugaagagcacccagaacgccaucgacgagaucaccaacaaggugaacagcgugaucgagaagaugaacacccaguucaccgccgugggcaaggaguucaaccaccuggagaagagaaucgagaaccugaacaagaagguggacgacggcuuccuggacaucuggaccuacaacgccgagcugcuggugcugcuggagaacgagagaacccuggacuaccacgacagcaacgugaagaaccuguacgagaaggugagaagccagcugaagaacaacgccaaggaggugggcaacggcugcuucgaguucuaccacaagugcgacaacaccugcauggagagcgugaagaacggcaccuacgacuaccccaaguacagcgaggaggccaagcugaacagagaggagaucgacggcgugaagcuggagagcaccagaaucuaccagauccuggccaucuacagcaccgccgccagcagccuggugcugguggugagccugggcgccaucagcuucuggaugugcagcaacggcagccugcagugcagaaucugcaucuga

SEQ ID NO: 167153 - RNA, 1701 nt, Artificial Sequence; identical to SEQ ID NO: 165593
  derived and/or modified CDS sequence (opt4) from hemagglutinin__InfluenzaA__AEM98407

SEQ ID NO: 167154 - RNA, 1701 nt, Artificial Sequence; identical to SEQ ID NO: 165593
  derived and/or modified CDS sequence (opt4) from hemagglutinin__InfluenzaA__AEM98418

SEQ ID NO: 167155 - RNA, 1701 nt, Artificial Sequence; identical to SEQ ID NO: 165593
  derived and/or modified CDS sequence (opt4) from hemagglutinin__InfluenzaA__AEM98429

SEQ ID NO: 167156 - RNA, 1701 nt, Artificial Sequence
  derived and/or modified CDS sequence (opt4) from hemagglutinin__InfluenzaA__AEN55398
augaaggccauccugguggugcugcuguacaccuucgccaccgccaacgccgacacccugugcaucggcuaccacgccaacaacagcaccgacaccguggacaccgugcuggagaagaacgugaccgugacccacagcgugaaccugcuggaggacaagcacaacggcaagcugugcaagcugagaggcguggccccccugcaccugggcaagugcaacaucgccggcuggauccugggcaaccccgagugcgagagccugagcaccgccagcagcuggagcuacaucguggagaccagcagcagcgacaacggcaccugcuaccccggcaacuucaucgacuacgaggagcugagagagcagcugagcagcgugagcagcuucgagagauucgagaucuuccccaagaccagcagcuggcccgaccacgacagcaacaagggcgugaccgccgccugcccccacgccggcgccaagagcuucuacaagaaccugaucuggcuggugaagaagggcaacagcuaccccaagcugagcaagagcuacaucaacgacaagggcaaggaggugcuggugcuguggggcauccaccaccccagcaccagcgccgaccagcagagccuguaccagaacgccgacgccuacguguucgugggcaccagcagauacagcaagaaguucaagcccgagaucgccaucagacccaaggugagagaccaggagggcagaaugaacuacuacuggacccugguggagcccggcgacaagaucaccuucgaggccaccggcaaccugguggcccccagauacgccuucgccauggagagaaacgccggcagcggcaucaucaucagcgacacccccgugcacgacugcaacaccaccugccagacccccaagggcgccaucaacaccagccugcccuuccagaacauccaccccaucaccaucggcaagugccccaaguacgugaagagcaccaagcugagacuggugaccggccugagaaacgugcccagcauccagagcagaggccuguucggcgccaucgccggcuucaucgagggcggcuggaccggcaugguggacggcugguacggcuaccaccaccagaacgagcagggcagcggcuacgccgccgaccugaagagcacccagaacgccaucgacaagaucaccaacaaggugaacagcgugaucgagaagaugaacacccaguucaccgccgugggcaaggaguucaaccaccuggagaagagaaucgagaaccugaacaagaagguggacgacggcuuccuggacaucuggaccuacaacgccgagcugcuggugcugcuggagaacgagagaacccuggacuaccacgacagcaacgugaagaaccuguacgagaaggugagaagccagcugaagaacaacgccaaggagaucggcaacggcugcuucgaguucuaccacaagugcgacaacaccugcauggagagcgugaagaacggcaccuacgacuaccccaaguacagcgaggaggccaagcugaacagagaggagaucgacggcgugaagcuggagagcaccagaaucuaccagauccuggccaucuacagcaccguggccagcagccuggugcugguggugagccugggcgccaucagcuucuggaugugcagcaacggcagccugcagugcagaaucugcaucuga

SEQ ID NO: 167157 - RNA, 1701 nt, Artificial Sequence; identical to SEQ ID NO: 166980
  derived and/or modified CDS sequence (opt4) from hemagglutinin__InfluenzaA__AEN55408

SEQ ID NO: 167158 - RNA, 1701 nt, Artificial Sequence; identical to SEQ ID NO: 166495
  derived and/or modified CDS sequence (opt4) from hemagglutinin__InfluenzaA__AEN55418

SEQ ID NO: 167159 - RNA, 1701 nt, Artificial Sequence; identical to SEQ ID NO: 165644
  derived and/or modified CDS sequence (opt4) from hemagglutinin__InfluenzaA__AEN55463

SEQ ID NO: 167160 - RNA, 1701 nt, Artificial Sequence
  derived and/or modified CDS sequence (opt4) from hemagglutinin__InfluenzaA__AEN55473
augaaggccauccugguggugcugcuguacaccuucgccaccgccaacgccgacacccugugcaucggcuaccacgccaacaacagcaccgacaccguggacaccgugcuggagaagaacgugaccgugacccacagcgugaaccugcuggaggacaagcacaacggcaagcugugcaagcugagaggcguggccccccugcaccugggcaagugcaacaucgccggcuggauccugggcaaccccgagugcgagagccugagcaccgccagcagcuggagcuacaucguggagaccagcagcagcgacaacggcaccugcuaccccggcgacuucaucgacuacgaggagcugagagagcagcugagcagcgugagcagcuucgagagauucgagaucuuccccaagaccagcagcuggcccaaccacgacagcaacaagggcgugaccgccgccugcccccacgccggcgccaagagcuucuacaagaaccugaucuggcuggugaagaagggcaacagcuaccccaagcugagcaagagcuacaucaacgacaagggcaaggaggugcuggugcuguggggcauccaccaccccagcaccaccaccgaccagcagagccuguaccagaccgccgacaccuacguguucgugggcaccagcagauacagcaagaaguucaagcccgagaucgccaucagacccaaggugagagaccaggagggcagaaugaacuacuacuggacccugguggagcccggcgacaagaucaccuucgaggccaccggcaaccugguggugcccagauacgccuucgccauggagagaaacgccggcagcggcaucaucaucagcgacacccccgugcacgacugcaacaccaccugccagacccccaagggcgccaucaacaccagccugcccuuccagaacauccaccccaucaccaucggcaagugccccaaguacgugaagagcaccaagcugagacuggccaccggccugagaaacgugcccagcauccagagcagaggccuguucggcgccaucgccggcuucaucgagggcggcuggaccggcaugguggacggcugguacggcuaccaccaccagaacgagcagggcagcggcuacgccgccgaccugaagagcacccagaacgccaucgacaagaucaccaacaaggugaacagcgugaucgagaagaugaacacccaguucaccgccgugggcaaggaguucaaccaccuggagaagagaaucgagaaccugaacaagaagguggacgacggcuuccuggacaucuggaccuacaacgccgagcugcuggugcugcuggagaacgagagaacccuggacuaccacgacagcaacgugaagaaccuguacgagaaggugagaaaccagcugaagaccaacgccaaggagaucggcaacggcugcuucgaguucuaccacaagugcgacaacaccugcauggagagcgugaagaacggcaccuacgacuaccccaaguacagcgaggaggccaagcugaacagagaggagaucgacggcgugaagcuggagagcaccagaaucuaccagauccuggccaucuacagcaccguggccagcagccuggugcugguggugagccugggcgccaucagcuucuggaugugcagcaacggcagccugcagugcagaaucugcaucuga

SEQ ID NO: 167161 - RNA, 1701 nt, Artificial Sequence; identical to SEQ ID NO: 166495
  derived and/or modified CDS sequence (opt4) from hemagglutinin__InfluenzaA__AEN55483

SEQ ID NO: 167162 - RNA, 1701 nt, Artificial Sequence; identical to SEQ ID NO: 167102
  derived and/or modified CDS sequence (opt4) from hemagglutinin__InfluenzaA__AEN55493

SEQ ID NO: 167163 - RNA, 1701 nt, Artificial Sequence; identical to SEQ ID NO: 166495
  derived and/or modified CDS sequence (opt4) from hemagglutinin__InfluenzaA__AEN55503

SEQ ID NO: 167164 - RNA, 1701 nt, Artificial Sequence
  derived and/or modified CDS sequence (opt4) from hemagglutinin__InfluenzaA__AEN55513
augaaggccauccugguggugcugcuguacaccuucgccaccgccaacgccgacacccugugcaucggcuaccacgccaacaacagcaccgacaccguggacaccgugcuggagaagaacgugaccgugacccacagcgugaaccugcuggaggacaagcacaacggcaagcugugcaagcugagaggcguggccccccugcaccugggcaagugcaacaucgccggcuggauccugggcaaccccgagugcgagagccugagcaccgccagcagcuggagcuacaucguggagaccagcagcagcgacaacggcaccugcuaccccggcgacuucaucgacuacgaggagcugagagagcagcugagcagcgugagcagcuucgagagauucgagaucuuccccaagaccagcagcuggcccaaccacgacagcaacaagggcgugaccgccgccugcccccacgccggcgccaagagcuucuacaagaaccugaucuggcuggugaagaagggcaacagcuaccccaagcugagcaagagcuacaucaacgacaagggcaaggaggugcuggugcuguggggcauccaccaccccagcaccaccgccgaccagcagaaccuguaccagaacgccgacaccuacguguucgugggcaccagcagauacagcaagaaguucaagcccgagaucgccaucagacccaaggugagagaccaggagggcagaaugaacuacuacuggacccugguggagcccggcgacaagaucaccuucgaggccaccggcaaccugguggugcccagauacgccuucgccauggagagaaacgccggcagcggcaucaucaucagcgacacccccgugcacgacugcaacaccaccugccagacccccaagggcgccaucaacaccagccugcccuuccagaacauccaccccaucaccaucggcaagugccccaaguacgugaagagcaccaagcugagacuggccaccggccugagaaacgugcccagcauccagagcagaggccuguucggcgccaucgccggcuucaucgagggcggcuggaccggcaugguggacggcugguacggcuaccaccaccagaacgagcagggcagcggcuacgccgccgaccugaagagcacccagaacgccaucgacaagaucaccaacaaggugaacagcgugaucgagaagaugaacacccaguucaccgccgugggcaaggaguucaaccaccuggagaagagaaucgagaaccugaacaagaagguggacgacggcuuccuggacaucuggaccuacaacgccgagcugcuggugcugcuggagaacgagagaacccuggacuaccacgacagcaacgugaagaaccuguacgagaaggugagaaaccagcugaagaacaacgccaaggagaucggcaacggcugcuucgaguucuaccacaagugcgacaacaccugcauggagagcgugaagaacggcaccuacgacuaccccaaguacagcgaggaggccaagcugaacagagaggagaucgacggcgugaagcuggagagcaccagaaucuaccagauccuggccaucuacagcaccguggccagcagccuggugcugguggugagccugggcgccaucagcuucuggaugugcagcaacggcagccugcagugcagaaucugcaucuga

SEQ ID NO: 167165 - RNA, 1701 nt, Artificial Sequence; identical to SEQ ID NO: 166495
  derived and/or modified CDS sequence (opt4) from hemagglutinin__InfluenzaA__AEN55523

SEQ ID NO: 167166 - RNA, 1701 nt, Artificial Sequence; identical to SEQ ID NO: 165284
  derived and/or modified CDS sequence (opt4) from hemagglutinin__InfluenzaA__AEN68904

SEQ ID NO: 167167 - RNA, 1701 nt, Artificial Sequence; identical to SEQ ID NO: 162729
  derived and/or modified CDS sequence (opt4) from hemagglutinin__InfluenzaA__AEN68905

SEQ ID NO: 167168 - RNA, 1701 nt, Artificial Sequence; identical to SEQ ID NO: 162729
  derived and/or modified CDS sequence (opt4) from hemagglutinin__InfluenzaA__AEN68906

SEQ ID NO: 167169 - RNA, 1701 nt, Artificial Sequence; identical to SEQ ID NO: 163831
  derived and/or modified CDS sequence (opt4) from hemagglutinin__InfluenzaA__AEN68907

SEQ ID NO: 167170 - RNA, 1701 nt, Artificial Sequence; identical to SEQ ID NO: 162729
  derived and/or modified CDS sequence (opt4) from hemagglutinin__InfluenzaA__AEN68908

SEQ ID NO: 167171 - RNA, 1701 nt, Artificial Sequence
  derived and/or modified CDS sequence (opt4) from hemagglutinin__InfluenzaA__AEN68909
augaaggccauccugguggugcugcuguacaccuucgccaccgccaacgccgacacccugugcgugggcuaccacgccaacaacagcaccgacaccguggacaccgugcuggagaagaacgugaccgugacccacagcgugaaccugcuggaggacaagcacaacggcaagcugugcaagcugagaggcguggccccccugcaccugggcaagugcaacaucgccggcuggauccugggcaaccccgagugcgagagccugagcaccgccagcagcuggagcuacaucguggagaccagcagcagcgacaacggcaccugcuaccccggcgacuucaucgacuacgaggagcugagagagcagcugagcagcgugagcagcuucgagagauucgagaucuuccccaagaccagcagcuggcccaaccacgacagcaacaagggcgugaccgccgccugcccccacgccggcgccaagagcuucuacaagaaccugaucuggcuggugaagaagggcaacagcuaccccaagcugagcaagagcuacaucaacgacaagggcaaggaggugcuggugcuguggggcauccaccaccccagcaccagcgccgaccagcagagccuguaccagaacgccgacgccuacguguucgugggcaccagcagauacagcaagaaguucaagcccgagaucgccaucagacccaaggugagagaccaggagggcagaaugaacuacuacuggacccugguggagcccggcgacaagaucaccuucgaggccaccggcaaccugguggugcccagauacgccuucgccauggagagaaacgccggcagcggcaucaucaucagcgacacccccgugcacgacugcaacaccaccugccagacccccaagggcgccaucaacaccagccugcccuuccagaacauccaccccaucaccaucggcaagugccccaaguacgugaagagcaccaagcugagacuggccaccggccugagaaacgugcccagcauccagagcagaggccuguucggcgccaucgccggcuucaucgagggcggcuggaccggcaugguggacggcugguacggcuaccaccaccagaacgagcagggcagcggcuacgccgccgaccugaagagcacccagaacgccaucgacgagaucaccaacaaggugaacagcgugaucgagaagaugaacacccaguucaccgccgugggcaaggaguucaaccaccuggagaagagaaucgagaaccugaacaagaagguggacgacggcuuccuggacaucuggaccuacaacgccgagcugcuggugcugcuggagaacgagagaacccuggacuaccacgacagcaacgugaagaaccuguacgagaaggugagaagccagcugaagaacaacgccaaggagaucggcaacggcugcuucgaguucuaccacaagugcgacaacaccugcauggagagcgugaagaacggcaccuacgacuaccccaaguacagcgaggaggccaagcugaacagagaggagaucgacggcgugaagcuggagagcaccagaaucuaccagauccuggccaucuacagcaccguggccagcagccuggugcugguggugagccugggcgccaucagcuucuggaugugcagcaacggcagccugcagugcagaaucugcaucuga

SEQ ID NO: 167172 - RNA, 1701 nt, Artificial Sequence
  derived and/or modified CDS sequence (opt4) from hemagglutinin__InfluenzaA__AEN68910
augaaggccauccugguggugcugcuguacaccuucgccaccgccaacgccgacacccugugcgugggcuaccacgccaacaacagcaccgacaccguggacaccgugcuggagaagaacgugaccgugacccacagcgugaaccugcuggaggacaagcacaacggcaagcugugcaagcugagaggcguggccccccugcaccugggcaagugcaacaucgccggcuggauccugggcaaccccgagugcgagagccugagcaccgccagcagcuggagcuacaucguggagaccagcagcagcgacaacggcaccugcuaccccggcgacuucaucgacuacgaggagcugagagagcagcugagcagcgugagcagcuucgagagauucgagaucuuccccaagaccagcagcuggcccaaccacgacagcaacaagggcgugaccgccgccugcccccacgccggcgccaagagcuucuacaagaaccugaucuggcuggugaagaagggcaacagcuaccccaagcugagcaagagcuacaucaacgacaagggcaaggaggugcuggugcuguggggcauccaccaccccagcaccagcgccgaccagcagagccuguaccagaacgccgacgccuacguguucgugggcaccagcagauacagcaagaaguucaagcccgagaucgccaucagacccaaggugagagaccaggagggcagaaugaacuacuacuggacccugguggagcccggcgacaagaucaccuucgaggccaccggcaaccugguggugcccagauacgccuucgccauggagagaaacgccggcagcggcaucaucaucagcgacacccccgugcacgacugcaacaccaccugccagacccccaagggcgccaucaacaccagccugcccuuccagaacauccaccccaucaccaucggcaagugccccaaguacgugaagggcaccaagcugagacuggccaccggccugagaaacgugcccagcauccagagcagaggccuguucggcgccaucgccggcuucaucgagggcggcuggaccggcaugguggacggcugguacggcuaccaccaccagaacgagcagggcagcggcuacgccgccgaccugaagagcacccagaacgccaucgacgagaucaccaacaaggugaacagcgugaucgagaagaugaacacccaguucaccgccgugggcaaggaguucaaccaccuggagaagagaaucgagaaccugaacaagaagguggacgacggcuuccuggacaucuggaccuacaacgccgagcugcuggugcugcuggagaacgagagaacccuggacuaccacgacagcaacgugaagaaccuguacgagaaggugagaagccagcugaagaacaacgccaaggagaucggcaacggcugcuucgaguucuaccacaagugcgacaacaccugcauggagagcgugaagaacggcaccuacgacuaccccaaguacagcgaggaggccaagcugaacagagaggagaucgacggcgugaagcuggagagcaccagaaucuaccagauccuggccaucuacagcaccguggccagcagccuggugcugguggugagccugggcgccaucagcuucuggaugugcagcaacggcagccugcagugcagaaucugcaucuga

SEQ ID NO: 167173 - RNA, 1701 nt, Artificial Sequence; identical to SEQ ID NO: 164845
  derived and/or modified CDS sequence (opt4) from hemagglutinin__InfluenzaA__AEN68911

SEQ ID NO: 167174 - RNA, 1701 nt, Artificial Sequence; identical to SEQ ID NO: 162729
  derived and/or modified CDS sequence (opt4) from hemagglutinin__InfluenzaA__AEN68912

SEQ ID NO: 167175 - RNA, 1701 nt, Artificial Sequence; identical to SEQ ID NO: 162820
  derived and/or modified CDS sequence (opt4) from hemagglutinin__InfluenzaA__AEN68913

SEQ ID NO: 167176 - RNA, 1701 nt, Artificial Sequence; identical to SEQ ID NO: 165395
  derived and/or modified CDS sequence (opt4) from hemagglutinin__InfluenzaA__AEN68914

SEQ ID NO: 167177 - RNA, 1701 nt, Artificial Sequence; identical to SEQ ID NO: 162729
  derived and/or modified CDS sequence (opt4) from hemagglutinin__InfluenzaA__AEN68915

SEQ ID NO: 167178 - RNA, 1701 nt, Artificial Sequence; identical to SEQ ID NO: 162729
  derived and/or modified CDS sequence (opt4) from hemagglutinin__InfluenzaA__AEN68916

SEQ ID NO: 167179 - RNA, 1701 nt, Artificial Sequence
  derived and/or modified CDS sequence (opt4) from hemagglutinin__InfluenzaA__AEN68917
augaaggccauccugggcgugcugcuguacaccuucgccaccgccaacgccgacacccugugcaucggcuaccacgccaacaacagcaccgacaccguggacaccgugcuggagaagaacgugaccgugacccacagcgugaaccugcuggaggacaagcacaacggcaagcugugcaagcugagaggcguggccccccugcaccugggcaagugcaacaucgccggcuggauccugggcaaccccgagugcgagagccugagcaccgccagcagcuggagcuacaucguggagaccagcagcagcgacaacggcaccugcuaccccggcgacuucaucgacuacgaggagcugagagagcagcugagcagcgugagcagcuucgagagauucgagaucuuccccaagaccagcagcuggcccaaccacgacagcaacaagggcgugaccgccgccugcccccacgccggcgccaagagcuucuacaagaaccugaucuggcuggugaagaagggcaacagcuaccccaagcugagcaagagcuacaucaacgacaagggcaaggaggugcuggugcuguggggcauccaccaccccagcaccagcgccgaccagcagagccuguaccagaacgccgacgccuacguguucgugggcaccagcagauacagcaagaaguucaagcccgagaucgccaucagacccaaggugagagaccaggagggcagaaugaacuacuacuggacccugguggagcccggcgacaagaucaccuucgaggccaccggcaaccugguggugcccagauacgccuucgccauggagagaaacgccggcagcggcaucaucaucagcgacacccccgugcacgacugcaacaccaccugccagacccccaagggcgccaucaacaccagccugcccuuccagaacauccaccccgugaccaucggcaagugccccaaguacgugaagagcaccaagcugagacuggccaccggccugagaaacgugcccagcauccagagcagaggccuguucggcgccaucgccggcuucaucgagggcggcuggaccggcaugguggacggcugguacggcuaccaccaccagaacgagcagggcagcggcuacgccgccgaccugaagagcacccagaacgccaucgacaagaucaccaacaaggugaacagcgugaucgagaagaugaacacccaguucaccgccgugggcaaggaguucaaccaccuggagaagagaaucgagaaccugaacaagaagguggacgacggcuuccuggacaucuggaccuacaacgccgagcugcuggugcugcuggagaacgagagaacccuggacuaccacgacagcaacgugaagaaccuguacgagaaggugagaagccagcugaagaacaacgccaaggagaucggcaacggcugcuucgaguucuaccacaagugcgacaacaccugcauggagagcgugaagaacggcaccuacgacuaccccaaguacagcgaggaggccaagcugaacagagaggagaucgacggcgugaagcuggagagcaccagaaucuaccagauccuggccaucuacagcaccguggccagcagccuggugcugguggugagccugggcgccaucagcuucuggaugugcagcaacggcagccugcagugcagaaucugcaucuga

SEQ ID NO: 167180 - RNA, 1701 nt, Artificial Sequence
  derived and/or modified CDS sequence (opt4) from hemagglutinin__InfluenzaA__AEN68918
augaaggccauccugguggugcugcuguacaccuucgccaccgccaacgccgacacccugugcaucggcuaccacgccaacaacagcaccgacaccguggacaccgugcuggagaagaacgugaccgugacccacagcgugaaccugcuggaggacaagaacaacggcaagcugugcaagcugagaggcguggccccccugcaccugggcaagugcaacaucgccggcuggauccugggcaaccccgagugcgagagccugagcaccgccagcagcuggagcuacaucguggagaccagcagcagcgacaacggcaccugcuaccccggcgacuucaucgacuacgaggagcugagagagcagcugagcagcgugagcagcuucgagagauucgagauguuccccaagaccagcagcuggcccaaccacgacagcaacaagggcgugaccgccgccugcccccacgccggcgccaagagcuucuacaagaaccugaucuggcuggugaagaagggcaacagcuaccccaagcugagcaagagcuacaucaacgacaagggcaaggaggugcuggugcuguggggcauccaccaccccagcaccagcgccgaccagcagagccuguaccagaacgccgacgccuacguguucgugggcaccagcagauacagcaagaaguucaagcccgagaucgccaucagacccaaggugagagaccaggagggcagaaugaacuacuacuggacccugguggagcccggcgacaagaucaccuucgaggccaccggcaaccugguggugcccagauacgccuucgccauggagagaaacgccggcagcggcaucaucaucagcgacacccccgugcacgacugcaacaccaccugccagacccccaagggcgccaucaacaccagccugcccuuccagaacauccaccccaucaccaucggcaagugccccaaguacgugaagagcaccaagcugagacuggccaccggccugagaaacgugcccagcauccagagcagaggccuguucggcgccaucgccggcuucaucgagggcggcuggaccggcaugguggacggcugguacggcuaccaccaccagaacgagcagggcagcggcuacgccgccgaccugaagagcacccagaacgccaucgacgagaucaccaacaaggugaacagcgugaucgagaagaugaacacccaguucaccgccgugggcaaggaguucaaccaccuggagaagagaaucgagaaccugaacaagaagguggacgacggcuuccuggacaucuggaccuacaacgccgagcugcuggugcugcuggagaacgagagaacccuggacuaccacgacagcaacgugaagaaccuguacgagaaggugagaagccagcugaagaacaacgccaaggaggugggcaacggcugcuucgaguucuaccacaagugcgacaacaccugcauggagagcgugaagaacggcaccuacgacuaccccaaguacagcgaggaggccaagcugaacagagaggagaucgacggcgugaagcuggagagcaccagaaucuaccagauccuggccaucuacagcaccguggccagcagccuggugcugguggugagccugggcgccaucagcuucuggaugugcagcaacggcagccugcagugcagaaucugcaucuga

SEQ ID NO: 167181 - RNA, 1701 nt, Artificial Sequence; identical to SEQ ID NO: 165644
  derived and/or modified CDS sequence (opt4) from hemagglutinin__InfluenzaA__AEN68919

SEQ ID NO: 167182 - RNA, 1701 nt, Artificial Sequence; identical to SEQ ID NO: 164893
  derived and/or modified CDS sequence (opt4) from hemagglutinin__InfluenzaA__AEN68920

SEQ ID NO: 167183 - RNA, 1701 nt, Artificial Sequence; identical to SEQ ID NO: 163893
  derived and/or modified CDS sequence (opt4) from hemagglutinin__InfluenzaA__AEN68921

SEQ ID NO: 167184 - RNA, 1701 nt, Artificial Sequence; identical to SEQ ID NO: 163889
  derived and/or modified CDS sequence (opt4) from hemagglutinin__InfluenzaA__AEN68922

SEQ ID NO: 167185 - RNA, 1701 nt, Artificial Sequence; identical to SEQ ID NO: 163893
  derived and/or modified CDS sequence (opt4) from hemagglutinin__InfluenzaA__AEN68923

SEQ ID NO: 167186 - RNA, 1701 nt, Artificial Sequence; identical to SEQ ID NO: 163893
  derived and/or modified CDS sequence (opt4) from hemagglutinin__InfluenzaA__AEN68924

SEQ ID NO: 167187 - RNA, 1701 nt, Artificial Sequence
  derived and/or modified CDS sequence (opt4) from hemagglutinin__InfluenzaA__AEN68925
augaaggccauccugguggugcugcuguacaccuucgccaccgccaacgccgacacccugugcaucggcuaccacgccaacaacagcaccgacaccguggacaccgugcuggagaagaacgugaccgugacccacagcgugaaccugcuggaggacaagcacaacggcaagcugugcaagcugagaggcguggccccccugcaccugggcaagugcaacaucgccggcuggauccugggcaaccccgagugcgagagccugagcaccgccagcagcuggagcuacaucguggagaccagcagcagcgacaacggcaccugcuaccccggcgacuucaucgacuacgaggagcugagagagcagcugagcagcgugagcagcuucgagagauucgagaucuuccccaagaccagcagcuggcccaaccacgacagcaacaagggcgugaccgccgccugcccccacgccggcgccaagagcuucuacaagaaccugaucuggcuggugaagaagggcaacagcuaccccaagcugagcaagagcuacaucaacgacaagggcaaggaggugcuggugcuguggggcauccaccaccccagcaccagcgccgaccagcagagccuguaccagaacgccgacgccuacguguucguggagaccagcagauacagcaagaaguucaagcccgagaucgccaucagacccaaggugagagaccaggagggcagaaugaacuacuacuggacccugguggagcccggcgacaagaucaccuucgaggccaccggcaaccugguggugcccagauacgccuucgccauggagagaaacgccggcagcggcaucaucaucagcgacacccccgugcacgacugcaacaccaccugccagacccccaagggcgccaucaacaccagccugcccuuccagaacauccaccccaucaccaucggcaagugccccaaguacgugaagagcaccaagcugagacuggccaccggccugagaaacgugcccagcauccagagcagaggccuguucggcgccaucgccggcuucaucgagggcggcuggaccggcaugguggacggcugguacggcuaccaccaccagaacgagcagggcagcggcuacgccgccgaccugaagagcacccagaacgccaucgacaagaucaccaacaaggugaacagcgugaucgagaagaugaacacccaguucaccgccgugggcaaggaguucaaccaccuggagaagagaaucgagaaccugaacaagaagguggacgacggcuuccuggacaucuggaccuacaacgccgagcugcuggugcugcuggagaacgagagaacccuggacuaccacgacagcaacgugaagaaccuguacgagaaggugagaagccagcugaagaacaacgccaaggagaucggcaacggcugcuucgaguucuaccacaagugcgacaacaccugcauggagagcgugaagaacggcaccuacgacuaccccaaguacagcgaggaggccaagcugaacagagaggagaucgacggcgugaagcuggagagcaccagaaucuaccagauccuggccaucuacagcaccguggccagcagccuggugcugguggugagccugggcgccaucagcuucuggaugugcagcaacggcagccugcagugcagaaucugcaucuga

SEQ ID NO: 167188 - RNA, 1701 nt, Artificial Sequence
  derived and/or modified CDS sequence (opt4) from hemagglutinin__InfluenzaA__AEN68926
augaaggccauccugguggugcugcuguacaccuucgccaccgccaacgccgacacccugugcaucggcuaccacgccaacaacagcaccgacaccguggacaccgugcuggagaagaacgugaccgugacccacagcgugaaccugcuggaggacaagcacaacggcaagcugugcaagcugagaggcguggccccccugcaccugggcaagugcaacaucgccggcuggauccugggcaaccccgagugcgagagccuggccaccgccagcagcuggagcuacaucguggagaccagcaacagcgacaacggcaccugcuaccccggcgacuucaucgacuacgaggagcugagagagcagcugagcagcgugagcagcuucgagagauucgagaucuuccccaagaccagcagcuggcccaaccacgacagcaacaagggcgugaccgccgccugcccccacgccggcgccaagagcuucuacaagaaccugaucuggcuggugaagaagggcaacagcuaccccaagcugagcaagagcuacaucaacgacaagggcagagaggugcuggugcuguggggcauccaccaccccagcaccagcgccgaccagcagagccuguaccagaacgccgacaccuacguguucgugggcaccagcagauacagcaagaaguucaagcccgagaucgccaucagacccaaggugagagaccaggagggcagaaugaacuacuacuggacccugguggagcccggcgacaagaucaccuucgaggccaccggcaaccugguggugcccagauacgccuucgccauggagagaaacgccggcagcggcaucaucaucagcgacacccccgugcacgacugcaacaccaccugccagacccccaagggcgccaucaacaccagccugcccuuccagaacauccaccccaucaccaucggcaagugccccaaguacgugaagagcaccaagcugagacuggccaccggccugagaaacgugcccagcauccagagcagaggccuguucggcgccaucgccggcuucaucgagggcggcuggaccggcaugguggacggcugguacggcuaccaccaccagaacgagcagggcagcggcuacgccgccgaccugaagagcacccagaacgccaucgacgagaucaccaacaaggugaacagcgugaucgagaagaugaacacccaguucaccgccgugggcaaggaguucaaccaccuggagaagagaaucgagaaccugaacaagaagguggacgacggcuuccuggacaucuggaccuacaacgccgagcugcuggugcugcuggagaacgagagaacccuggacuaccacgacagcaacgugaagaaccuguacgagaaggugagaagccagcugaagaacaacgccaaggagaucggcaacggcugcuucgaguucuaccacaagugcgacaacaccugcauggagagcgugaagaacggcaccuacgacuaccccaaguacagcgaggaggccaagcugaacagagaggagaucgacggcgugaagcuggagagcaccagaaucuaccagauccuggccaucuacagcaccguggccagcagccuggugcugguggugagccugggcgccaucagcuucuggaugugcagcaacggcagccugcagugcagaaucugcaucuga

SEQ ID NO: 167189 - RNA, 1701 nt, Artificial Sequence
  derived and/or modified CDS sequence (opt4) from hemagglutinin__InfluenzaA__AEN68927
augaaggccauccugguggugcugcuguacaccuucgccaccgccaacgccgacacccugugcaucggcuaccacgccaacaacagcaccgacaccguggacaccgugcuggagaagaacgugaccgugacccacagcgugaaccugcuggaggacaagcacaacggcaagcugugcaagcugagaggcguggccccccugcaccugggcaagugcaacaucgccggcuggauccugggcaaccccgagugcgagagccugagcaccgccagcagcuggagcuacaucguggagaccagcagcagcgacaacggcaccugcuaccccggcgacuucaucgacuacgaggagcugagagagcagcugagcagcgugagcagcuucgagagauucgagaucuuccccaagaccagcagcuggcccgaccacgacagcaacaagggcgugaccgccgccugcccccacgccggcgccaagagcuucuacaagaaccugaucuggcuggugaagaagggcaacagcuaccccaagcugagcaagagcuacaucaacgacaagggcaaggaggugcuggugcuguggggcauccaccaccccagcaccagcgccgaccagcagagccuguaccagaacgccgacgccuacguguucgugggcaccagcagauacagcaagaaguucaagcccgagaucgccaucagacccaaggugagagaccaggagggcagaaugaacuacuacuggacccugguggagcccggcgacaagaucaccuucgaggccaccggcaaccugguggugcccagauacgccuucgccauggagagaaacgccggcagcggcaucaucaucagcgacacccccgugcacgacugcaacaccaccugccagacccccaagggcgccaucaacaccagccugcccuuccagaacauccaccccaucaccaucggcaagugccccaaguacgugaagagcaccaagcugagacuggccaccggccugagaaacgugcccagcauccagagcagaggccuguucggcgccaucgccggcuucaucgagggcggcuggaccggcaugguggacggcugguacggcuaccaccaccagaacgagcagggcagcggcuacgccgccgaccugaagagcacccagaacgccaucgacaagaucaccaacaaggugaacagcgugaucgagaagaugaacacccaguucaccgccgugggcaaggaguucaaccaccuggagaagagaaucgagaaccugaacaagaagguggacgacggcuuccuggacaucuggaccuacaacgccgagcugcuggugcugcuggagaacgagagaacccuggacuaccacgacagcaacgugaagaaccuguacgagaaggugagaaaccagcugaagaacaacgccaaggagaucggcaacggcugcuucgaguucuaccacaagugcgacaacaccugcauggagagcgugaagaacggcaccuacgacuaccccaaguacagcgaggaggccaagcugaacagagaggagaucgacggcgugaagcuggagagcaccagaaucuaccagauccuggccaucuacagcaccguggccagcagccuggugcugguggugagccugggcgccaucagcuucuggaugugcagcaacggcagccugcagugcagaaucugcaucuga

SEQ ID NO: 167190 - RNA, 1701 nt, Artificial Sequence; identical to SEQ ID NO: 166315
  derived and/or modified CDS sequence (opt4) from hemagglutinin__InfluenzaA__AEN68928

SEQ ID NO: 167191 - RNA, 1701 nt, Artificial Sequence
  derived and/or modified CDS sequence (opt4) from hemagglutinin__InfluenzaA__AEN68929
augaaggccauccugguggugcugcuguacaccuucgccaccgccaacgccgacacccugugcaucggcuaccacgccaacaacagcaccgacaccguggacaccgugcuggagaagaacgugaccgugacccacagcgugaaccugcuggaggacaagcacaacggcaagcugugcaagcugagaggcaucgccccccugcaccugggcaagugcaacaucgccggcuggauccugggcaaccccgagugcgagagccugagcaccgccagcagcuggagcuacaucguggagaccagcagcagcgacaacggcaccugcuaccccggcgacuucaucgacuacgaggagcugagagagcagcugagcagcgugagcagcuucgagagauucgagaucuuccccaagaccagcagcuggcccaaccacgacagcaacaagggcgugaccgccgccugcccccacgccggcgccaagagcuucuacaagaaccugaucuggcuggugaagaagggcaacagcuaccccaagcugagcaagagcuacaucaacgacaagggcaaggaggugcuggugcuguggggcauccaccaccccagcaccagcgccgaccagcagagccuguaccagaacgccgacgccuacguguucgugggcaccagcagauacagcaagaaguucaagcccgagaucgccaucagacccaaggugagagaccaggagggcagaaugaacuacuacuggacccugguggagcccggcgacaagaucaccuucgaggccaccggcaaccugguggugcccagauacgccuucgccauggagagaaacgccggcagcggcaucaucaucagcgacacccccgugcacgacugcaacaccaccugccagacccccaagggcgccaucaacaccagccugcccuuccagaacauccaccccaucaccaucggcaagugccccaaguacgugaagagcaccaagcugagacuggccaccggccugagaaacgugcccagcauccagagcagaggccuguucggcgccaucgccggcuucaucgagggcggcuggaccggcaugguggacggcugguacggcuaccaccaccagaacgagcagggcagcggcuacgccgccgaccugaagagcacccagaacgccaucgacaagaucaccaacaaggugaacagcgugaucgagaagaugaacacccaguucaccgccgugggcaaggaguucaaccaccuggagaagagaaucgagaaccugaacaagaagguggacgacggcuuccuggacaucuggaccuacaacgccgagcugcuggugcugcuggagaacgagagaacccuggacuaccacgacagcaacgugaagaaccuguacgagaaggugagaagccagcugaagaacaacgccaaggagaucggcaacggcugcuucgaguucuaccacaagugcgacaacaccugcauggagagcgugaagaacggcaccuacgacuaccccaaguacagcgaggaggccaagcugaacagagaggagaucgacggcgugaagcuggagagcaccagaaucuaccagauccuggccaucuacagcaccguggccagcagccuggugcugguggugagccugggcgccaucagcuucuggaugugcagcaacggcagccugcagugcagaaucugcaucuga

SEQ ID NO: 167192 - RNA, 1701 nt, Artificial Sequence; identical to SEQ ID NO: 165644
  derived and/or modified CDS sequence (opt4) from hemagglutinin__InfluenzaA__AEN68930

SEQ ID NO: 167193 - RNA, 1701 nt, Artificial Sequence; identical to SEQ ID NO: 165644
  derived and/or modified CDS sequence (opt4) from hemagglutinin__InfluenzaA__AEN68931

SEQ ID NO: 167194 - RNA, 1701 nt, Artificial Sequence; identical to SEQ ID NO: 165644
  derived and/or modified CDS sequence (opt4) from hemagglutinin__InfluenzaA__AEN68932

SEQ ID NO: 167195 - RNA, 1701 nt, Artificial Sequence
  derived and/or modified CDS sequence (opt4) from hemagglutinin__InfluenzaA__AEN69426
augaaggccauccugguggugcugcuguacaccuucgccaccagcaacgccgacacccugugcaucggcuaccacgccaacaacagcaccgacaccguggacaccgugcuggagaagaacgugaccgugacccacagcgugaaccugcuggaggacaagcacaacggcaagcugugcaagcugagaggcguggccccccugcaccugggcaagugcaacaucgccggcuggauccugggcaaccccgagugcgagagccugagcaccgccagcagcuggagcuacaucguggagaccagcagcagcgacaacggcaccugcuaccccggcaacuucaucgacuacgaggagcugagagagcagcugagcagcgugagcagcuucgagagauucgagaucuuccccaagaccagcagcuggcccgaccacgacagcaacaagggcgugaccgccgccugcccccacgccggcgccaagagcuucuacaagaaccugaucuggcuggugaagaagggcaacagcuaccccaagcugagcaagagcuacaucaacgacaagggcaaggaggugcuggugcuguggggcauccaccaccccagcaccagcgccgaccagcagagccuguaccagaacgccgacgccuacguguucgugggcaccagcagauacagcaagaaguucaagcccgagaucgccaucagacccaaggugagagaccaggagggcagaaugaacuacuacuggacccugguggagcccggcgacaagaucaccuucgaggccaccggcaaccugguggcccccagauacgccuucgccauggagagaaacgccggcagcggcaucaucaucagcgacacccccgugcacgacugcaacaccaccugccagacccccaagggcgccaucaacaccagccugcccuuccagaacauccaccccaucaccaucggcaagugccccaaguacgugaagagcaccaagcugagacuggccaccggccugagaaacgugcccagcauccagagcagaggccuguucggcgccaucgccggcuucaucgagggcggcuggaccggcaugguggacggcugguacggcuaccaccaccagaacgagcagggcagcggcuacgccgccgaccugaagagcacccagaacgccaucgacaagaucaccaacaaggugaacagcgugaucgagaagaugaacacccaguucaccgccgugggcaaggaguucaaccaccuggagaagagaaucgagaaccugaacaagaagguggacgacggcuuccuggacaucuggaccuacaacgccgagcugcuggugcugcuggagaacgagagaacccuggacuaccacgacagcaacgugaagaaccuguacgagaaggugagaagccagcugaagaacaacgccaaggagaucggcaacggcugcuucgaguucuaccacaagugcgacaacaccugcauggagagcgugaagaacggcaccuacgacuaccccaaguacagcgaggaggccaagcugaacagagaggagaucgacggcgugaagcuggagagcaccagaaucuaccagauccuggccaucuacagcaccguggccagcagccuggugcugguggugagccugggcgccaucagcuucuggaugugcagcaacggcagccugcagugcagaaucugcaucuga

SEQ ID NO: 167196 - RNA, 1701 nt, Artificial Sequence; identical to SEQ ID NO: 166980
  derived and/or modified CDS sequence (opt4) from hemagglutinin__InfluenzaA__AEN69475

SEQ ID NO: 167197 - RNA, 1701 nt, Artificial Sequence; identical to SEQ ID NO: 166980
  derived and/or modified CDS sequence (opt4) from hemagglutinin__InfluenzaA__AEN69481

SEQ ID NO: 167198 - RNA, 1701 nt, Artificial Sequence; identical to SEQ ID NO: 162982
  derived and/or modified CDS sequence (opt4) from hemagglutinin__InfluenzaA__AEO01032

SEQ ID NO: 167199 - RNA, 1701 nt, Artificial Sequence; identical to SEQ ID NO: 163082
  derived and/or modified CDS sequence (opt4) from hemagglutinin__InfluenzaA__AEO01033

SEQ ID NO: 167200 - RNA, 1701 nt, Artificial Sequence; identical to SEQ ID NO: 163082
  derived and/or modified CDS sequence (opt4) from hemagglutinin__InfluenzaA__AEO01034

SEQ ID NO: 167201 - RNA, 1701 nt, Artificial Sequence; identical to SEQ ID NO: 162716
  derived and/or modified CDS sequence (opt4) from hemagglutinin__InfluenzaA__AEO01035

SEQ ID NO: 167202 - RNA, 1701 nt, Artificial Sequence; identical to SEQ ID NO: 163082
  derived and/or modified CDS sequence (opt4) from hemagglutinin__InfluenzaA__AEO01036

SEQ ID NO: 167203 - RNA, 1701 nt, Artificial Sequence; identical to SEQ ID NO: 162971
  derived and/or modified CDS sequence (opt4) from hemagglutinin__InfluenzaA__AEO01037

SEQ ID NO: 167204 - RNA, 1701 nt, Artificial Sequence; identical to SEQ ID NO: 163082
  derived and/or modified CDS sequence (opt4) from hemagglutinin__InfluenzaA__AEO01038

SEQ ID NO: 167205 - RNA, 1701 nt, Artificial Sequence; identical to SEQ ID NO: 162909
  derived and/or modified CDS sequence (opt4) from hemagglutinin__InfluenzaA__AEO01039

SEQ ID NO: 167206 - RNA, 1701 nt, Artificial Sequence
  derived and/or modified CDS sequence (opt4) from hemagglutinin__InfluenzaA__AEO01040
augaaggccauccugguggugcugcuguacaccuucgccaccgccaacgccgacacccugugcaucggcuaccacgccaacaacagcaccgacaccguggacaccgugcuggagaagaacgugaccgugacccacagcgugaaccugcuggaggacaagcacaacggcaagcugugcaagcugagaggcguggccccccugcaccugggcaagugcaacaucgccggcuggauccugggcaaccccgagugcgagagccugagcaccgccagcagcuggagcuacaucguggagaccagcagcagcgacaacggcaccugcuaccccggcgacuucaucgacuacgaggagcugagagagcagcugagcagcgugagcagcuucgagagauucgagaucuuccccaagaccagcagcuggcccaaccacgacagcaacaagggcgugaccgccgccugcccccacgccggcgccaagagcuucuacaagaaccugaucuggcuggugaagaagggcaacagcuaccccaagcugagcaagagcuacaucaacgacaagggcaagaaggugcuggugcuguggggcauccaccaccccagcaccagcgccgaccagcagagccuguaccagaacgccgacgccuacguguucgugggcaccagcagauacagcaagaaguucaagcccgagaucgccaucagacccaaggugagagaccaggagggcagaaugaacuacuacuggacccugaucgagcccggcgacaagaucaccuucgaggccaccggcaaccugguggugcccagauacgccuucaccauggagagaaacgccggcagcggcaucaucaucagcgacacccccgugcacgacugcaacaccaccugccagacccccaagggcgccaucaacaccagccugcccuuccagaacauccaccccaucaccaucggcaagugccccaaguacgugaagagcaccaagcugagacuggccaccggccugagaaacgugcccagcauccagagcagaggccuguucggcgccaucgccggcuucaucgagggcggcuggaccggcaugguggacggcugguacggcuaccaccaccagaacgagcagggcagcggcuacgccgccgaccugaagagcacccagaacgccaucgacgagaucaccaacaaggugaacagcgugaucgagaagaugaacacccaguucaccgccgugggcaaggaguucaaccaccuggagaagagaaucgagaaccugaacaagaagguggacgacggcuuccuggacaucuggaccuacaacgccgagcugcuggugcugcuggagaacgagagaacccuggacuaccacgacagcaacgugaagaaccuguacgagaaggugagaagccagcugaagaacaacgccaaggagaucggcaacggcugcuucgaguucuaccacaagugcgacaacaccugcauggagagcgugaagaacggcaccuacgacuaccccaaguacagcgaggaggccaagcugaacagagaggagaucgacggcgugaagcuggagagcaccagaaucuaccagauccuggccaucuacagcaccguggccagcagccuggugcugguggugagccugggcgccaucagcuucuggaugugcagcaacggcagccugcagugcagaaucugcaucuga

SEQ ID NO: 167207 - RNA, 1701 nt, Artificial Sequence; identical to SEQ ID NO: 162729
  derived and/or modified CDS sequence (opt4) from hemagglutinin__InfluenzaA__AEO01041

SEQ ID NO: 167208 - RNA, 1701 nt, Artificial Sequence; identical to SEQ ID NO: 163082
  derived and/or modified CDS sequence (opt4) from hemagglutinin__InfluenzaA__AEO01042

SEQ ID NO: 167209 - RNA, 1701 nt, Artificial Sequence
  derived and/or modified CDS sequence (opt4) from hemagglutinin__InfluenzaA__AEO01043
augaaggccauccugguggugcugcuguacaccuucgccaccgccaacgccgacacccugugcaucggcuaccacgccaacaacagcaccgacaccguggacaccgugcuggagaagaacgugaccgugacccacagcgugaaccugcuggaggacaagcacaacggcaagcugugcaagcugagaggcguggccccccugcaccugggcaagugcaacaucgccggcuggauccugggcaaccccgagugcgagagccugagcaccgccagcagcuggagcuacaucguggagaccagcagcagcaacaacggcaccugcuaccccggcgacuucaucgacuacgaggagcugagagagcagcugagcagcgugagcagcuucgagagauucgagaucuuccccaagaccagcagcuggcccaaccacgacagcaacaagggcgugaccgccgccugcccccacgccggcgccaagagcuucuacaagaaccugaucuggcuggugaagaagggcaacagcuaccccaagcugagcaagagcuacaucaacgacaagggcaaggaggugcuggugcuguggggcauccaccaccccagcaccagcgccgaccagcagagccuguaccagaacgccgacgccuacguguucgugggcaccagcagauacagcaagaaguucaagcccgagaucgccaucagacccaaggugagagagcaggagggcagaaugaacuacuacuggacccugguggagcccggcgacaagaucaccuucgaggccaccggcaaccugguggugcccagauacgccuucgccauggagagaaacgccggcagcggcaucaucaucagcgacacccccgugcacgacugcaacaccaccugccagacccccaagggcgccaucaacaccagccugcccuuccagaacauccaccccaucaccaucggcaagugccccaaguacgugaagagcaccaagcugagacuggccaccggccugagaaacgugcccagcauccagagcagaggccuguucggcgccaucgccggcuucaucgagggcggcuggaccggcaugguggacggcugguacggcuaccaccaccagaacgagcagggcagcggcuacgccgccgaccugaagagcacccagaacgccaucgacgagaucaccaacaaggugaacagcgugaucgagaagaugaacacccaguucaccgccgugggcaaggaguucaaccaccuggagaagagaaucgagaaccugaacaagaagguggacgacggcuuccuggacaucuggaccuacaacgccgagcugcuggugcugcuggagaacgagagaacccuggacuaccacgacagcaacgugaagaaccuguacgagaaggugagaagccagcugaagaacaacgccaaggagaucggcaacggcugcuucgaguucuaccacaagugcgacaacaccugcauggagagcgugaagaacggcaccuacgacuaccccaaguacagcgaggaggccaagcugaacagagaggagaucgacggcgugaagcuggagagcaccagaaucuaccagauccuggccaucuacagcaccguggccagcagccuggugcugguggugagccugggcgccaucagcuucuggaugugcagcaacggcagccugcagugcagaaucugcaucuga

SEQ ID NO: 167210 - RNA, 1701 nt, Artificial Sequence; identical to SEQ ID NO: 162729
  derived and/or modified CDS sequence (opt4) from hemagglutinin__InfluenzaA__AEO01044

SEQ ID NO: 167211 - RNA, 1701 nt, Artificial Sequence
  derived and/or modified CDS sequence (opt4) from hemagglutinin__InfluenzaA__AEO01045
augaaggccauccugguggugcugcuguacaccuucgccaccgccaacgccgacacccugugcaucggcuaccacgccaacaacagcaccgacaccguggacaccgugcuggagaagaacgugaccgugacccacagcgugaaccugcuggaggacaagcacaacggcaagcugugcaagcugagaggcguggccccccugcaccugggcaagugcaacaucgccggcuggauccugggcaaccuggagugcgagagccugagcaccgccagcagcuggagcuacaucguggagaccagcagcagcgacaacggcaccugcuaccccggcgacuucaucgacuacgaggagcugagagagcagcugagcagcgugagcagcuucgagagauucgagaucuuccccaagaccagcagcuggcccaaccacgacagcaacaagggcgugaccgccgccugcccccacgccggcgccaagagcuucuacaagaaccugaucuggcuggugaagaagggcaacagcuaccccaagcugagcaagagcuacaucaacgacaagggcaaggaggugcuggugcuguggggcauccaccaccccagcaccagcgccgaccagcagagccuguaccagaacgccgacgccuacguguucgugggcaccagcagauacagcaagaaguucaagcccgagaucgccaucagacccaaggugagagaccaggagggcagaaugaacuacuacuggacccugguggagcccggcgacaagaucaccuucgaggccaccggcaaccugguggugcccagauacgccuucgccauggagagaaacgccggcagcggcaucaucaucagcgacacccccgugcacgacugcaacaccaccugccagacccccaagggcgccaucaacaccagccugcccuuccagaacauccaccccaucaccaucggcaagugccccaaguacgugaagagcaccaagcugagacuggccaccggccugagaaacgugcccagcauccagagcagaggccuguucggcgccaucgccggcuucaucgagggcggcuggaccggcaugguggacggcugguacggcuaccaccaccagaacgagcagggcagcggcuacgccgccgaccugaagagcacccagaacgccaucgacgagaucaccaacaaggugaacagcgugaucgagaagaugaacacccaguucaccgccgugggcaaggaguucaaccaccuggagaagagaaucgagaaccugaacaagaagguggacgacggcuuccuggacaucuggaccuacaacgccgagcugcuggugcugcuggagaacgagagaacccuggacuaccacgacagcaacgugaagaaccuguacgagaaggugagaagccagcugaagaacaacgccaaggagaucggcaacggcugcuucgaguucuaccacaagugcgacaacaccugcauggagagcgugaagaacggcaccuacgacuaccccaaguacagcgaggaggccaagcugaacagagaggagaucgacggcgugaagcuggagagcaccagaaucuaccagauccuggccaucuacagcaccguggccagcagccuggugcugguggugagccugggcgccaucagcuucuggaugugcagcaacggcagccugcagugcagaaucugcaucuga

SEQ ID NO: 167212 - RNA, 1701 nt, Artificial Sequence; identical to SEQ ID NO: 162729
  derived and/or modified CDS sequence (opt4) from hemagglutinin__InfluenzaA__AEO01046

SEQ ID NO: 167213 - RNA, 1701 nt, Artificial Sequence; identical to SEQ ID NO: 162729
  derived and/or modified CDS sequence (opt4) from hemagglutinin__InfluenzaA__AEO01047

SEQ ID NO: 167214 - RNA, 1701 nt, Artificial Sequence
  derived and/or modified CDS sequence (opt4) from hemagglutinin__InfluenzaA__AEO01048
augaaggccauccugguggugcugcuguacaccuucgccaccgccaacgccgacacccugugcaucggcuaccacgccaacaacagcaccgacaccguggacaccgugcuggagaagaacgugaccgugacccacagcgugaaccugcuggaggacaagcacaacggcaagcugugcaagcugagaggcguggccccccugcaccugggcaagugcaacaucgccggcuggauccugggcaaccccgagugcgagagccugagcaccgccagcagcuggagcuacaucguggagaccagcagcagcgacaacggcaccugcuaccccggcgacuucaucgacuacgaggagcugagagagcagcugagcagcgugagcagcuucgagagauucgagaucuuccccaagaccagcagcuggcccaaccacgacagcaacaagggcgugaccgccgccugcccccacgccggcgccaagagcuucuacaagaaccugaucuggcuggugaagaagggcaacagcuaccccaagcugagcaagagcuacaucaacgacaagggcaaggaggugcuggugcuguggggcauccaccaccccagcaccagcgccgaccagcagagccuguaccagaacgccgacgccuacguguucgugggcaccagcagauacagcaagaaguucaagcccgagaucgccaucagacccaaggugagagaccaggagggcagaaugaacuacuacuggacccugguggagcccggcgacaagaucaccuucgaggccaccggcaaccugguggugcccagauacgccuucgccauggagagaaacgccggcagcggcaucaucaucagcgacacccccgugcacgacugcaacaccaccugccagacccccaagggcgccaucaacaccagccugcccuuccagaacauccaccccaucaccaucggcaagugccccaaguacgugaagagcaccaagcugagacuggccaccggccugagaaacgugcccagcauccagagcagaggccuguucggcgccaucgccggcuucaucgagggcggcuggaccggcaugguggacggcugguacggcuaccaccaccagaacgagcagggcagcggcuacgccgccgaccugaagagcacccagaacgccaucgacgagaucaccaacaaggugaacagcgugaucgagaagaugaacacccaguucaccgccgugggcaaggaguucaaccaccuggagaagagaaucgagaaccugaacaagaagguggacgacggcuuccuggacaucuggaccuacaacgccgagcugcuggugcugcuggagaacgagagaacccuggacuaccacgacagcaacgugaagaaccuguacgagaaggugagaagccagcugaagaacaacgccaaggagaucggcaacggcugcuucgaguucuaccacaagugcgacaacaccugcauggagagcgugaagaacggcaccuacgacuaccccaaguacagcgaggaggccaagcugaacagagaggagaucgacggcgugaagcuggagagcaccagaaucuaccagauccuggccaucuacagcaccguggccagcagccuggugcugguggugagccugggcgccaucagcuucuggaugugcagcaacggcagccugcagugcaagaucugcaucuga

SEQ ID NO: 167215 - RNA, 1701 nt, Artificial Sequence; identical to SEQ ID NO: 163627
  derived and/or modified CDS sequence (opt4) from hemagglutinin__InfluenzaA__AEO01049

SEQ ID NO: 167216 - RNA, 1701 nt, Artificial Sequence; identical to SEQ ID NO: 162729
  derived and/or modified CDS sequence (opt4) from hemagglutinin__InfluenzaA__AEO01050

SEQ ID NO: 167217 - RNA, 1701 nt, Artificial Sequence; identical to SEQ ID NO: 163082
  derived and/or modified CDS sequence (opt4) from hemagglutinin__InfluenzaA__AEO01051

SEQ ID NO: 167218 - RNA, 1701 nt, Artificial Sequence
  derived and/or modified CDS sequence (opt4) from hemagglutinin__InfluenzaA__AEO01052
augaaggccaucaucguggugcugcuguacaccuucgccaccgccaacgccgacacccugugcaucggcuaccacgccaacaacagcaccgacaccguggacaccgugcuggagaagaacgugaccgugacccacagcgugaaccugcuggaggacaagcacaacggcaagcugugcaagcugagaggcguggccccccugcaccugggcaagugcaacaucgccggcuggauccugggcaaccccgagugcgagagccugagcaccgccagcagcuggagcuacaucguggagaccagcagcagcgacaacggcaccugcuaccccggcgacuucaucgacuacgaggagcugagagagcagcugagcagcgugagcagcuucgagagauucgagaucuuccccaagaccagcagcuggcccaaccacgacagcaacaagggcgugaccgccgccugcccccacgccggcgccaagagcuucuacaagaaccugaucuggcuggugaagaagggcaacagcuaccccaagcugagcaagagcuacaucaacgacaagggcaaggaggugcuggugcuguggggcauccaccaccccagcaccagcgccgaccagcagagccuguaccagaacgccgacgccuacguguucgugggcaccagcagauacagcaagaaguucaagcccgagaucgccaucagacccaaggugagagaccaggagggcagaaugaacuacuacuggacccugguggagcccggcgacaagaucaccuucgaggccaccggcaaccugguggugcccagauacgccuucgccauggagagaaacgccggcagcggcaucaucaucagcgacacccccgugcacgacugcaacaccaccugccagacccccaagggcgccaucaacaccagccugcccuuccagaacauccaccccaucaccaucggcaagugccccaaguacgugaagagcaccaagcugagacuggccaccggccugagaaacgugcccagcauccagagcagaggccuguucggcgccaucgccggcuucaucgagggcggcuggaccggcaugguggacggcugguacggcuaccaccaccagaacgagcagggcagcggcuacgccgccgaccugaagagcacccagaacgccaucgacaagaucaccaacaaggugaacagcgugaucgagaagaugaacacccaguucaccgccgugggcaaggaguucaaccaccuggagaagagaaucgagaaccugaacaagaagguggacgacggcuuccuggacaucuggaccuacaacgccgagcugcuggugcugcuggagaacgagagaacccuggacuaccacgacagcaacgugaagaaccuguacgagaaggugagaagccagcugaagaacaacgccaaggagaucggcaacggcugcuucgaguucuaccacaagugcgacaacaccugcauggagagcgugaagaacggcaccuacgacuaccccaaguacagcgaggaggccaagcugaacagagaggagaucgacggcgugaagcuggagagcaccagaaucuaccagauccuggccaucuacagcaccguggccagcagccuggugcugguggugagccugggcgccaucagcuucuggaugugcagcaacggcagccugcagugcagaaucugcaucuga

SEQ ID NO: 167219 - RNA, 1701 nt, Artificial Sequence; identical to SEQ ID NO: 163082
  derived and/or modified CDS sequence (opt4) from hemagglutinin__InfluenzaA__AEO01053

SEQ ID NO: 167220 - RNA, 1701 nt, Artificial Sequence; identical to SEQ ID NO: 162729
  derived and/or modified CDS sequence (opt4) from hemagglutinin__InfluenzaA__AEO01054

SEQ ID NO: 167221 - RNA, 1701 nt, Artificial Sequence; identical to SEQ ID NO: 163541
  derived and/or modified CDS sequence (opt4) from hemagglutinin__InfluenzaA__AEO01055

SEQ ID NO: 167222 - RNA, 1701 nt, Artificial Sequence; identical to SEQ ID NO: 163082
  derived and/or modified CDS sequence (opt4) from hemagglutinin__InfluenzaA__AEO01056

SEQ ID NO: 167223 - RNA, 1701 nt, Artificial Sequence; identical to SEQ ID NO: 162729
  derived and/or modified CDS sequence (opt4) from hemagglutinin__InfluenzaA__AEO01057

SEQ ID NO: 167224 - RNA, 1701 nt, Artificial Sequence; identical to SEQ ID NO: 162729
  derived and/or modified CDS sequence (opt4) from hemagglutinin__InfluenzaA__AEO01058

SEQ ID NO: 167225 - RNA, 1701 nt, Artificial Sequence; identical to SEQ ID NO: 162729
  derived and/or modified CDS sequence (opt4) from hemagglutinin__InfluenzaA__AEO01059

SEQ ID NO: 167226 - RNA, 1701 nt, Artificial Sequence; identical to SEQ ID NO: 162729
  derived and/or modified CDS sequence (opt4) from hemagglutinin__InfluenzaA__AEO01060

SEQ ID NO: 167227 - RNA, 1701 nt, Artificial Sequence; identical to SEQ ID NO: 162729
  derived and/or modified CDS sequence (opt4) from hemagglutinin__InfluenzaA__AEO01061

SEQ ID NO: 167228 - RNA, 1701 nt, Artificial Sequence; identical to SEQ ID NO: 162729
  derived and/or modified CDS sequence (opt4) from hemagglutinin__InfluenzaA__AEO01062

SEQ ID NO: 167229 - RNA, 1701 nt, Artificial Sequence; identical to SEQ ID NO: 162729
  derived and/or modified CDS sequence (opt4) from hemagglutinin__InfluenzaA__AEO01063

SEQ ID NO: 167230 - RNA, 1701 nt, Artificial Sequence; identical to SEQ ID NO: 162729
  derived and/or modified CDS sequence (opt4) from hemagglutinin__InfluenzaA__AEO01064

SEQ ID NO: 167231 - RNA, 1701 nt, Artificial Sequence; identical to SEQ ID NO: 162971
  derived and/or modified CDS sequence (opt4) from hemagglutinin__InfluenzaA__AEO01065

SEQ ID NO: 167232 - RNA, 1701 nt, Artificial Sequence; identical to SEQ ID NO: 163082
  derived and/or modified CDS sequence (opt4) from hemagglutinin__InfluenzaA__AEO01066

SEQ ID NO: 167233 - RNA, 1701 nt, Artificial Sequence
  derived and/or modified CDS sequence (opt4) from hemagglutinin__InfluenzaA__AEO01067
augaaggccauccugguggugcugcuguacaccuucgccaccgccaacgccgacacccugugcaucggcuaccacgccaacaacagcaccgacaccguggacaccgugcuggagaagaacgugaccgugacccacagcgugaaccugcuggaggacaagcacaacggcaagcugugcaagcugagaggcguggccccccugcaccugggcaagugcaacaucgccggcuggauccugggcaaccccgagugcgagagccugagcaccgccagcagcuggagcuacaucguggagaccagcagcagcgacaacggcaccugcuaccccggcgacuucaucgacuacgaggagcugagagagcagcugagcagcgugagcagcuucgagagauucgagaucuuccccaagaccagcagcuggcccaaccacgacagcaacaagggcgugaccgccgccugcccccacgccggcgccaagagcuucuacaagaaccugaucuggcuggugaagaagggcaacagcuaccccaagcugagcaagagcuacaucaacgacaagggcaaggaggugcuggugcuguggggcauccaccaccccagcaccagcgccgaccagcagagccuguaccagaacgccgacgccuacguguucgugggcaccagcagauacagcaagaaguucaagcccgagauggccaucagacccaaggugagagaccaggagggcagaaugaacuacuacuggacccugguggagcccggcgacaagaucaccuucgaggccaccggcaaccugguggugcccagauacgccuucgccauggagagaaacgccggcagcggcaucaucaucagcgacacccccgugcacgacugcaacaccaccugccagacccccaagggcgccaucaacaccagccugcccuuccagaacauccaccccaucaccaucggcaagugccccaaguacgugaagagcaccaagcugagacuggccaccggccugagaaacgugcccagcauccagagcagaggccuguucggcgccaucgccggcuucaucgagggcggcuggaccggcaugguggacggcugguacggcuaccaccaccagaacgagcagggcagcggcuacgccgccgaccugaagagcacccagaacgccaucgacgagaucaccaacaaggugaacagcgugaucgagaagaugaacacccaguucaccgccgugggcaaggaguucaaccaccuggagaagagaaucgagaaccugaacaagaagguggacgacggcuuccuggacaucuggaccuacaacgccgagcugcuggugcugcuggagaacgagagaacccuggacuaccacgacagcaacgugaagaaccuguacgagaaggugagaagccagcugaagaacaacgccaaggagaucggcaacggcugcuucgaguucuaccacaagugcgacaacaccugcauggagagcgugaagaacggcaccuacgacuaccccaaguacagcgaggaggccaagcugaacagagaggagaucgacggcgugaagcuggagagcaccagaaucuaccagauccuggccaucuacagcaccguggccagcagccuggugcugguggugagccugggcgccaucagcuucuggaugugcagcaacggcagccugcagugcagaaucugcaucuga

SEQ ID NO: 167234 - RNA, 1701 nt, Artificial Sequence; identical to SEQ ID NO: 163082
  derived and/or modified CDS sequence (opt4) from hemagglutinin__InfluenzaA__AEO01068

SEQ ID NO: 167235 - RNA, 1701 nt, Artificial Sequence; identical to SEQ ID NO: 162729
  derived and/or modified CDS sequence (opt4) from hemagglutinin__InfluenzaA__AEO01069

SEQ ID NO: 167236 - RNA, 1701 nt, Artificial Sequence; identical to SEQ ID NO: 163082
  derived and/or modified CDS sequence (opt4) from hemagglutinin__InfluenzaA__AEO01070

SEQ ID NO: 167237 - RNA, 1701 nt, Artificial Sequence; identical to SEQ ID NO: 162729
  derived and/or modified CDS sequence (opt4) from hemagglutinin__InfluenzaA__AEO01071

SEQ ID NO: 167238 - RNA, 1701 nt, Artificial Sequence
  derived and/or modified CDS sequence (opt4) from hemagglutinin__InfluenzaA__AEO01073
augaaggccauccugguggugcugcuguacaccuucgccaccgccaacgccgacacccugugcaucggcuaccacgccaacaacagcaccgacaccguggacaccgugcuggagaagaacgugaccgugacccacagcgugaaccugcuggaggacaagcacaacggcaagcugugcaagcugagaggcguggccccccugcaccugggcaagugcaacaucgccggcuggauccugggcaaccccgagugcgagagccugagcaccgccagcagcuggagcuacaucguggagaccagcagcagcgacaacggcaccugcuaccccggcgacuucaucgacuacgaggagcugagagagcagcugagcagcgugagcagcuucgagagauucgagaucuuccccaagaccagcagcuggcccaaccacgacagcaacaagggcgugaccgccgccugcccccacgccggcgccaagagcuucuacaagaaccugaucuggcuggugaagaagggcaacagcuaccccaagcugagcaagagcuacaucaacgacaagggcaaggaggugcuggugcuguggggcauccaccaccccagcaccagcgccgaccagcagagccuguaccagaacgccgacgccuacguguucgugggcaccagcagauacagcaagaaguucaagcccgagaucgccaucagacccaaggugagagaccaggagggcagaaugaacuacuacuggacccugguggagcccggcgacaagaucaccuucgaggccaccggcaaccugguggugcccagauacgccuucgccauggagagaaacgccggcagcggcaucaucaucagcgacacccccgugcacgacugcaacaccaccugccagacccccaagggcgccgugaacaccagccugcccuuccagaacauccaccccaucaccaucggcaagugccccaaguacgugaagagcaccaagcugagacuggccaccggccugagaaacgugcccagcauccagagcagaggccuguucggcgccaucgccggcuucaucgagggcggcuggaccggcaugguggacggcugguacggcuaccaccaccagaacgagcagggcagcggcuacgccgccgaccugaagagcacccagaacgccaucgacgagaucaccaacaaggugaacagcgugaucgagaagaugaacacccaguucaccgccgugggcaaggaguucaaccaccuggagaagagaaucgagaaccugaacaagaagguggacgacggcuuccuggacaucuggaccuacaacgccgagcugcuggugcugcuggagaacgagagaacccuggacuaccacgacagcaacgugaagaaccuguacgagaaggugagaagccagcugaagaacaacgccaaggagaucggcaacggcugcuucgaguucuaccacaagugcgacaacaccugcauggagagcgugaagaacggcaccuacgacuaccccaaguacagcgaggaggccaagcugaacagagaggagaucgacggcgugaagcuggagagcaccagaaucuaccagauccuggccaucuacagcaccguggccagcagccuggugcugguggugagccugggcgccaucagcuucuggaugugcagcaacggcagccugcagugcagaaucugcaucuga

SEQ ID NO: 167239 - RNA, 1701 nt, Artificial Sequence; identical to SEQ ID NO: 162971
  derived and/or modified CDS sequence (opt4) from hemagglutinin__InfluenzaA__AEO01074

SEQ ID NO: 167240 - RNA, 1701 nt, Artificial Sequence; identical to SEQ ID NO: 163082
  derived and/or modified CDS sequence (opt4) from hemagglutinin__InfluenzaA__AEO01075

SEQ ID NO: 167241 - RNA, 1701 nt, Artificial Sequence; identical to SEQ ID NO: 163082
  derived and/or modified CDS sequence (opt4) from hemagglutinin__InfluenzaA__AEO01076

SEQ ID NO: 167242 - RNA, 1701 nt, Artificial Sequence
  derived and/or modified CDS sequence (opt4) from hemagglutinin__InfluenzaA__AEO01077
augaaggccauccugguggugcugcuguacaccuucgccaccgccaacgccgacacccugugcaucggcuaccacgccaacaacagcaccgacaccguggacaccgugcuggagaagaacgugaccgugacccacagcgugaaccugcuggaggacaagcacaacggcaagcugugcaagcugagaggcguggccccccugcaccugggcaagugcaacaucgccggcuggauccugggcaaccccgagugcgagagccugagcaccgccagcagcuggagcuacaucguggagaccagcagcagcgacaacggcaccugcuaccccggcgacuucaucgacuacgaggagcugagagagcagcugagcagcgugagcagcuucgagagauucgagaucuuccccaagaccagcagcuggcccaaccacgacagcaacaagggcgugaccgccgccugcccccacgccggcgccaagagcuucuacaagaaccugaucuggcuggugaagaagggcaacagcuaccccaagcugagcaagagcuacaucaacgacaagggcaaggaggugcuggugcuguggggcauccaccaccccagcaccagcgccgaccagcagagccuguaccagaacgccgacgccuacguguucgugggcaccagcagauacagcaagaaguucaagcccgagaucgccaucagacccaaggugagagagcaggagggcagaaugaacuacuacuggacccugguggagcccggcgacaagaucaccuucgaggccaccggcaaccugguggugcccagauacgccuucgccauggagagaaacgccggcagcggcaucaucaucagcgacacccccgugcacgacugcaacaccaccugccagacccccaagggcgccaucaacaccagccugcccuuccagaacauccaccccaucaccaucggcaagugccccaaguacgugaagagcaccaagcugagacuggccaccggccugagaaacgugcccagcauccagagcagaggccuguucggcgccaucgccggcuucaucgagggcggcuggaccggcaugguggacggcugguacggcuaccaccaccagaacgagcagggcagcggcuacgccgccgaccugaagagcacccagaacgccaucgacgagaucaccaacaaggugaacagcgugaucgagaagaugaacacccaguucaccgccgugggcaaggaguucaaccaccuggagaagagaaucgagaaccugaacaagaagguggacgacggcuuccuggacaucuggaccuacaacgccgagcugcuggugcugcuggagaacgagagaacccuggacuaccacgacagcaacgugaagaaccuguacgagaaggugagaagccagcugaagaacaacgccaaggagaucggcaacggcugcuucgaguucuaccacaagugcgacaacaccugcauggagaacgugaagaacggcaccuacgacuaccccaaguacagcgaggaggccaagcugaacagagaggagaucgacggcgugaagcuggagagcaccagaaucuaccagauccuggccaucuacagcaccguggccagcagccuggugcugguggugagccugggcgccaucagcuucuggaugugcagcaacggcagccugcagugcagaaucugcaucuga

SEQ ID NO: 167243 - RNA, 1701 nt, Artificial Sequence; identical to SEQ ID NO: 162729
  derived and/or modified CDS sequence (opt4) from hemagglutinin__InfluenzaA__AEO01078

SEQ ID NO: 167244 - RNA, 1701 nt, Artificial Sequence; identical to SEQ ID NO: 162729
  derived and/or modified CDS sequence (opt4) from hemagglutinin__InfluenzaA__AEO01079

SEQ ID NO: 167245 - RNA, 1701 nt, Artificial Sequence; identical to SEQ ID NO: 162729
  derived and/or modified CDS sequence (opt4) from hemagglutinin__InfluenzaA__AEO01080

SEQ ID NO: 167246 - RNA, 1701 nt, Artificial Sequence; identical to SEQ ID NO: 163082
  derived and/or modified CDS sequence (opt4) from hemagglutinin__InfluenzaA__AEO01081

SEQ ID NO: 167247 - RNA, 1701 nt, Artificial Sequence; identical to SEQ ID NO: 162729
  derived and/or modified CDS sequence (opt4) from hemagglutinin__InfluenzaA__AEO01082

SEQ ID NO: 167248 - RNA, 1701 nt, Artificial Sequence; identical to SEQ ID NO: 162729
  derived and/or modified CDS sequence (opt4) from hemagglutinin__InfluenzaA__AEO01083

SEQ ID NO: 167249 - RNA, 1701 nt, Artificial Sequence; identical to SEQ ID NO: 162729
  derived and/or modified CDS sequence (opt4) from hemagglutinin__InfluenzaA__AEO01084

SEQ ID NO: 167250 - RNA, 1701 nt, Artificial Sequence; identical to SEQ ID NO: 163082
  derived and/or modified CDS sequence (opt4) from hemagglutinin__InfluenzaA__AEO01085

SEQ ID NO: 167251 - RNA, 1701 nt, Artificial Sequence; identical to SEQ ID NO: 162729
  derived and/or modified CDS sequence (opt4) from hemagglutinin__InfluenzaA__AEO01086

SEQ ID NO: 167252 - RNA, 1701 nt, Artificial Sequence; identical to SEQ ID NO: 163082
  derived and/or modified CDS sequence (opt4) from hemagglutinin__InfluenzaA__AEO01087

SEQ ID NO: 167253 - RNA, 1701 nt, Artificial Sequence; identical to SEQ ID NO: 162909
  derived and/or modified CDS sequence (opt4) from hemagglutinin__InfluenzaA__AEO01088

SEQ ID NO: 167254 - RNA, 1701 nt, Artificial Sequence; identical to SEQ ID NO: 163082
  derived and/or modified CDS sequence (opt4) from hemagglutinin__InfluenzaA__AEO01089

SEQ ID NO: 167255 - RNA, 1701 nt, Artificial Sequence; identical to SEQ ID NO: 163082
  derived and/or modified CDS sequence (opt4) from hemagglutinin__InfluenzaA__AEO01090

SEQ ID NO: 167256 - RNA, 1701 nt, Artificial Sequence; identical to SEQ ID NO: 163082
  derived and/or modified CDS sequence (opt4) from hemagglutinin__InfluenzaA__AEO01091

SEQ ID NO: 167257 - RNA, 1701 nt, Artificial Sequence
  derived and/or modified CDS sequence (opt4) from hemagglutinin__InfluenzaA__AEO01092
augaaggccauccugguggugcugcuguacaccuucgccaccgccaacgccgacacccugugcaucggcuaccacgccaacaacagcaccgacaccguggacaccgugcuggagaagaacgugaccgugacccacagcgugaaccugcuggaggacaagcacaacggcaagcugugcaagcugagaggcguggccccccugcaccugggcaagugcaacaucgccggcuggauccugggcaaccccgagugcgagagccugagcaccgccagcagcuggagcuacaucguggagaccagcagcagcgacaacggcaccugcuaccccggcgacuucaucgacuacgaggagcugagagagcagcugagcagcgugagcagcuucgagagauucgagaucuuccccaagaccagcagcuggcccaaccacgacagcaacaagggcgugaccgccgccugcccccacgccggcgccaagagcuucuacaagaaccugaucuggcuggugaagaagggcaacagcuaccccaagcugagcaagagcuacaucaacgacaagggcaaggaggugcuggugcuguggggcauccaccaccccagcaccagcgccgaccagcagagccuguaccagaacgccgacgccuacguguucgugggcaccagcagauacagcaagaaguucaagcccgagaucgccaucagacccaaggugagagaccaggagggcagaaugaacuacuacuggacccugguggagcccggcgacaagaucaccuucgaggccaccggcaaccugguggugcccagauacgccuucgccauggagagaaacgccggcagcggcaucaucaucagcgacacccccgugcacgacugcaacaccaccugccagacccccaagggcgccaucaacaccagccugcccuuccagaacauccaccccaucaccaucggcaagugccccaaguacgugaagagcaccaagcugagacuggccaccggccugagaaacgugcccagcauccagagcagaggccuguucggcgccaucgccggcuucaucgagggcggcuggaccggcaugguggacggcugguacggcuaccaccaccagaacgagcagggcagcggcuacgccgccgaccugaagagcacccagaacgccaucgacgagaucaccaacaaggugaacagcgugaucgagaagaugaacacccaguucaccgccgugggcaaggaguucaaccaccuggagaagagaaucgagaaccugaacaagaagguggacgacggcuuccuggacaucuggaccuacaacgccgagcugcuggugcugcuggagaacgagagaacccuggacuaccacgacagcaacgugaagaaccuguacgagagagugagaagccagcugaagaacaacgccaaggagaucggcaacggcugcuucgaguucuaccacaagugcgacaacaccugcauggagagcgugaagaacggcaccuacgacuaccccaaguacagcgaggaggccaagcugaacagagaggagaucgacggcgugaagcuggagagcaccagaaucuaccagauccuggccaucuacagcaccguggccagcagccuggugcugguggugagccugggcgccaucagcuucuggaugugcagcaacggcagccugcagugcagaaucugcaucuga

SEQ ID NO: 167258 - RNA, 1701 nt, Artificial Sequence; identical to SEQ ID NO: 162729
  derived and/or modified CDS sequence (opt4) from hemagglutinin__InfluenzaA__AEO01093

SEQ ID NO: 167259 - RNA, 1701 nt, Artificial Sequence; identical to SEQ ID NO: 162729
  derived and/or modified CDS sequence (opt4) from hemagglutinin__InfluenzaA__AEO01094

SEQ ID NO: 167260 - RNA, 1701 nt, Artificial Sequence; identical to SEQ ID NO: 165936
  derived and/or modified CDS sequence (opt4) from hemagglutinin__InfluenzaA__AEO01095

SEQ ID NO: 167261 - RNA, 1701 nt, Artificial Sequence; identical to SEQ ID NO: 163082
  derived and/or modified CDS sequence (opt4) from hemagglutinin__InfluenzaA__AEO01096

SEQ ID NO: 167262 - RNA, 1701 nt, Artificial Sequence; identical to SEQ ID NO: 163082
  derived and/or modified CDS sequence (opt4) from hemagglutinin__InfluenzaA__AEO01097

SEQ ID NO: 167263 - RNA, 1701 nt, Artificial Sequence; identical to SEQ ID NO: 163082
  derived and/or modified CDS sequence (opt4) from hemagglutinin__InfluenzaA__AEO01098

SEQ ID NO: 167264 - RNA, 1701 nt, Artificial Sequence; identical to SEQ ID NO: 162729
  derived and/or modified CDS sequence (opt4) from hemagglutinin__InfluenzaA__AEO01099

SEQ ID NO: 167265 - RNA, 1701 nt, Artificial Sequence; identical to SEQ ID NO: 162971
  derived and/or modified CDS sequence (opt4) from hemagglutinin__InfluenzaA__AEO01100

SEQ ID NO: 167266 - RNA, 1701 nt, Artificial Sequence; identical to SEQ ID NO: 162729
  derived and/or modified CDS sequence (opt4) from hemagglutinin__InfluenzaA__AEO01101

SEQ ID NO: 167267 - RNA, 1701 nt, Artificial Sequence; identical to SEQ ID NO: 162729
  derived and/or modified CDS sequence (opt4) from hemagglutinin__InfluenzaA__AEO01102

SEQ ID NO: 167268 - RNA, 1701 nt, Artificial Sequence; identical to SEQ ID NO: 163082
  derived and/or modified CDS sequence (opt4) from hemagglutinin__InfluenzaA__AEO01103

SEQ ID NO: 167269 - RNA, 1701 nt, Artificial Sequence; identical to SEQ ID NO: 163082
  derived and/or modified CDS sequence (opt4) from hemagglutinin__InfluenzaA__AEO01104

SEQ ID NO: 167270 - RNA, 1701 nt, Artificial Sequence
  derived and/or modified CDS sequence (opt4) from hemagglutinin__InfluenzaA__AEO01105
augaaggccauccugguggugcugcuguacaccuucgccaccgccaacgccgacacccugugcaucggcuaccacgccaacaacagcaccgacaccguggacaccgugcuggagaagaacgugaccgugacccacagcgugaaccugcuggaggacaagcacaacggcaagcugugcaagcugagaggcguggccccccugcaccugggcaagugcaacaucgccggcuggauccugggcaaccccgagugcgagagccugagcaccgccagcagcuggagcuacaucguggagaccagcagcagcgacaacggcaccugcuaccccggcgacuucaucgacuacgaggagcugagagagcagcugagcagcgugagcagcuucgagagauucgagaucuuccccaagaccagcagcuggcccaaccacgacagcagcaagggcgugaccgccgccugcccccacgccggcgccaagagcuucuacaagaaccugaucuggcuggugaagaagggcaacagcuaccccaagcugagcaagagcuacaucaacgacaagggcaaggaggugcuggugcuguggggcauccaccaccccagcaccagcgccgaccagcagagccuguaccagaacgccgacgccuacguguucgugggcaccagcagauacagcaagaaguucaagcccgagaucgccaucagacccaaggugagagaccaggagggcagaaugaacuacuacuggacccugguggagcccggcgacaagaucaccuucgaggccaccggcaaccugguggugcccagauacgccuucgccauggagagaaacgccggcagcggcaucaucaucagcgacacccccgugcacgacugcaacaccaccugccagacccccaagggcgccaucaacaccagccugcccuuccagaacauccaccccaucaccaucggcaagugccccaaguacgugaagagcaccaagcugagacuggccaccggccugagaaacgugcccagcauccagagcagaggccuguucggcgccaucgccggcuucaucgagggcggcuggaccggcaugguggacggcugguacggcuaccaccaccagaacgagcagggcagcggcuacgccgccgaccugaagagcacccagaacgccaucgacgagaucaccaacaaggugaacagcgugaucgagaagaugaacacccaguucaccgccgugggcaaggaguucaaccaccuggagaagagaaucgagaaccugaacaagaagguggacgacggcuuccuggacaucuggaccuacaacgccgagcugcuggugcugcuggagaacgagagaacccuggacuaccacgacagcaacgugaagaaccuguacgagaaggugagaagccagcugaagaacaacgccaaggagaucggcaacggcugcuucgaguucuaccacaagugcgacaacaccugcauggagagcgugaagaacggcaccuacgacuaccccaaguacagcgaggaggccaagcugaacagagaggagaucgacggcgugaagcuggagagcaccagaaucuaccagauccuggccaucuacagcaccguggccagcagccuggugcugguggugagccugggcgccaucagcuucuggaugugcagcaacggcagccugcagugcagaaucugcaucuga

SEQ ID NO: 167271 - RNA, 1701 nt, Artificial Sequence; identical to SEQ ID NO: 163082
  derived and/or modified CDS sequence (opt4) from hemagglutinin__InfluenzaA__AEO01106

SEQ ID NO: 167272 - RNA, 1701 nt, Artificial Sequence; identical to SEQ ID NO: 162729
  derived and/or modified CDS sequence (opt4) from hemagglutinin__InfluenzaA__AEO01107

SEQ ID NO: 167273 - RNA, 1701 nt, Artificial Sequence; identical to SEQ ID NO: 162729
  derived and/or modified CDS sequence (opt4) from hemagglutinin__InfluenzaA__AEO01108

SEQ ID NO: 167274 - RNA, 1701 nt, Artificial Sequence; identical to SEQ ID NO: 162729
  derived and/or modified CDS sequence (opt4) from hemagglutinin__InfluenzaA__AEO01109

SEQ ID NO: 167275 - RNA, 1701 nt, Artificial Sequence; identical to SEQ ID NO: 162729
  derived and/or modified CDS sequence (opt4) from hemagglutinin__InfluenzaA__AEO01110

SEQ ID NO: 167276 - RNA, 1701 nt, Artificial Sequence; identical to SEQ ID NO: 162729
  derived and/or modified CDS sequence (opt4) from hemagglutinin__InfluenzaA__AEO01111

SEQ ID NO: 167277 - RNA, 1701 nt, Artificial Sequence; identical to SEQ ID NO: 162729
  derived and/or modified CDS sequence (opt4) from hemagglutinin__InfluenzaA__AEO01112

SEQ ID NO: 167278 - RNA, 1701 nt, Artificial Sequence
  derived and/or modified CDS sequence (opt4) from hemagglutinin__InfluenzaA__AEO01113
augaaggccauccugguggugcugcuguacaccuucgccaccgccaacgccgacacccugugcaucggcuaccacgccaacaacagcaccgacaccguggacaccgugcuggagaagaacgugaccgugacccacagcgugaaccugcuggaggacaagcacaacggcaagcugugcaagcugagaggcguggccccccugcaccugggcaagugcaacaucgccggcuggauccugggcaaccccgagugcgagagccugagcaccgccagcagcuggagcuacaucguggagaccagcagcagcgacaacggcaccugcuaccccggcgacuucaucgacuacgaggagcugagagagcagcugagcagcgugagcagcuucgagagauucgagaucuuccccaagaccagcagcuggcccaaccacgacagcaacaagggcgugaccgccgccugccugcacgccggcgccaagagcuucuacaagaaccugaucuggcuggugaagaagggcaacagcuaccccaagcugagcaagagcuacaucaacgacaagggcaaggaggugcuggugcuguggggcauccaccaccccagcaccagcgccgaccagcagagccuguaccagaacgccgacgccuacguguucgugggcaccagcagauacagcaagaaguucaagcccgagaucgccaucagacccaaggugagagaccaggagggcagaaugaacuacuacuggacccugguggagcccggcgacaagaucaccuucgaggccaccggcaaccugguggugcccagauacgccuucgccauggagagaaacgccggcagcggcaucaucaucagcgacacccccgugcacgacugcaacaccaccugccagacccccaagggcgccaucaacaccagccugcccuuccagaacauccaccccaucaccaucggcaagugccccaaguacgugaagagcaccaagcugagacuggccaccggccugagaaacgugcccagcauccagagcagaggccuguucggcgccaucgccggcuucaucgagggcggcuggaccggcaugguggacggcugguacggcuaccaccaccagaacgagcagggcagcggcuacgccgccgaccugaagagcacccagaacgccaucgacgagaucaccaacaaggugaacagcgugaucgagaagaugaacacccaguucaccgccgugggcaaggaguucaaccaccuggagaagagaaucgagaaccugaacaagaagguggacgacggcuuccuggacaucuggaccuacaacgccgagcugcuggugcugcuggagaacgagagaacccuggacuaccacgacagcaacgugaagaaccuguacgagaaggugagaagccagcugaagaacaacgccaaggagaucggcaacggcugcuucgaguucuaccacaagugcgacaacaccugcauggagagcgugaagaacggcaccuacgacuaccccaaguacagcgaggaggccaagcugaacagagaggagaucgacggcgugaagcuggagagcaccagaaucuaccagauccuggccaucuacagcaccguggccagcagccuggugcugguggugagccugggcgccaucagcuucuggaugugcagcaacggcagccugcagugcagaaucugcaucuga

SEQ ID NO: 167279 - RNA, 1701 nt, Artificial Sequence; identical to SEQ ID NO: 162971
  derived and/or modified CDS sequence (opt4) from hemagglutinin__InfluenzaA__AEO01114

SEQ ID NO: 167280 - RNA, 1701 nt, Artificial Sequence
  derived and/or modified CDS sequence (opt4) from hemagglutinin__InfluenzaA__AEO01115
auggaggccauccugguggugcugcuguacaccuucgccaccgccaacgccgacacccugugcaucggcuaccacgccaacaacagcaccgacaccguggacaccgugcuggagaagaacgugaccgugacccacagcgugaaccugcuggaggacaagcacaacggcaagcugugcaagcugagaggcguggccccccugcaccugggcaagugcaacaucgccggcuggauccugggcaaccccgagugcgagagccugagcaccgccagcagcuggagcuacaucguggagaccagcagcagcgacaacggcaccugcuaccccggcgacuucaucgacuacgaggagcugagagagcagcugagcagcgugagcagcuucgagagauucgagaucuuccccaagaccagcagcuggcccaaccacgacagcaacaagggcgugaccgccgccugccugcacgccggcgccaagagcuucuacaagaaccugaucuggcuggugaagaagggcaacagcuaccccaagcugagcaagagcuacaucaacgacaagggcaaggaggugcuggugcuguggggcauccaccaccccagcaccagcgccgaccagcagagccuguaccagaacgccgacgccuacguguucgugggcaccagcagauacagcaagaaguucaagcccgagaucgccaucagacccaaggugagagaccaggagggcagaaugaacuacuacuggacccugguggagcccggcgacaagaucaccuucgaggccaccggcaaccugguggugcccagauacgccuucgccauggagagaaacgccggcagcggcaucaucaucagcgacacccccgugcacgacugcaacaccaccugccagacccccaagggcgccaucaacaccagccugcccuuccacaacauccaccccaucaccaucggcaagugccccaaguacgugaagagcaccaagcugagacuggccaccggccugagaaacgugcccagcauccagagcagaggccuguucggcgccaucgccggcuucaucgagggcggcuggaccggcaugguggacggcugguacggcuaccaccaccagaacgagcagggcagcggcuacgccgccgaccugaagagcacccagaacgccaucgacgagaucaccaacaaggugaacagcgugaucgagaagaugaacacccaguucaccgccgugggcaaggaguucaaccaccuggagaagagaaucgagaaccugaacaagaagguggacgacggcuuccuggacaucuggaccuacaacgccgagcugcuggugcugcuggagaacgagagaacccuggacuaccacgacagcaacgugaagaaccuguacgagaaggugagaagccagcugaagaacaacgccaaggagaucggcaacggcugcuucgaguucuaccacaagugcgacaacaccugcauggagagcgugaagaacggcaccuacgacuaccccaaguacagcgaggaggccaagcugaacagagaggagaucgacggcgugaagcuggagagcaccagaaucuaccagauccuggccaucuacagcaccguggccagcagccuggugcugguggugagccugggcgccaucagcuucuggaugugcagcaacggcagccugcagugcagaaucugcaucuga

SEQ ID NO: 167281 - RNA, 1701 nt, Artificial Sequence; identical to SEQ ID NO: 162729
  derived and/or modified CDS sequence (opt4) from hemagglutinin__InfluenzaA__AEO01116

SEQ ID NO: 167282 - RNA, 1701 nt, Artificial Sequence; identical to SEQ ID NO: 162729
  derived and/or modified CDS sequence (opt4) from hemagglutinin__InfluenzaA__AEO01117

SEQ ID NO: 167283 - RNA, 1701 nt, Artificial Sequence; identical to SEQ ID NO: 163595
  derived and/or modified CDS sequence (opt4) from hemagglutinin__InfluenzaA__AEO01118

SEQ ID NO: 167284 - RNA, 1701 nt, Artificial Sequence; identical to SEQ ID NO: 162729
  derived and/or modified CDS sequence (opt4) from hemagglutinin__InfluenzaA__AEO01119

SEQ ID NO: 167285 - RNA, 1701 nt, Artificial Sequence
  derived and/or modified CDS sequence (opt4) from hemagglutinin__InfluenzaA__AEO01120
augaaggccauccugguggugcugcuguacaccuucgccaccgccaacgccgacacccugugcaucggcuaccacgccaacaacagcaccgacaccguggacaccgugcuggagaagaacgugaccgugacccacagcgugaaccugcuggaggacaagcacaacggcaagcugugcaagcugagaggcguggccccccugcaccugggcaagugcaacaucgccggcuggauccugggcaaccccgagugcgagagccugagcaccgccagcagcuggagcuacaucguggagaccagcagcagcgacaacggcaccugcuaccccggcgacuucaucgacuacgaggagcugagagagcagcugagcagcgugagcagcuucgagagauucgagaucuuccccaagaccagcagcuggcccaaccacgacagcaacaagggcgugaccgccgccugcccccacgccggcgccaagagcuucuacaagaaccugaucuggcuggugaagaagggcaacagcuaccccaagcugagcaagagcuacaucaacgacaagggcaaggaggugcuggugcuguggggcauccaccaccccagcaccagcgccgaccagcagagccuguaccagaacgccgacgccuacguguucgugggcaccagcagauacagcaagaaguucaagcccgagaucgccaucagacccaaggugagagagcaggagggcagaaugaacuacuacuggacccugguggagcccggcgacaagaucaccuucgaggccaccggcaaccugguggugcccagauacgccuucgccauggagagaaacgccggcagcggcaucaucaucagcgacacccccgugcacgacugcaacaccaccugccagacccccaagggcgccaucaacaccagccugcccuuccagaacauccaccccaucaccaucggcaagugccccaaguacgugaagagcaccaagcugagacuggccaccggccugagaaacauccccagcauccagagcagaggccuguucggcgccaucgccggcuucaucgagggcggcuggaccggcaugguggacggcugguacggcuaccaccaccagaacgagcagggcagcggcuacgccgccgaccugaagagcacccagaacgccaucgacgagaucaccaacaaggugaacagcgugaucgagaagaugaacacccaguucaccgccgugggcaaggaguucaaccaccuggagaagagaaucgagaaccugaacaagaagguggacgacggcuuccuggacguguggaccuacaacgccgagcugcuggugcugcuggagaacgagagaacccuggacuaccacgacagcaacgugaagaaccuguacgagaaggugagaagccagcugaagaacaacgccaaggagaucggcaacggcugcuucgaguucuaccacaagugcgacaacaccugcauggagagcgugaagaacggcaccuacgacuaccccaaguacagcgaggaggccaagcugaacagagaggagaucgacggcgugaagcuggagagcaccagaaucuaccagauccuggccaucuacagcaccguggccagcagccuggugcugguggugagccugggcgccaucagcuucuggaugugcagcaacggcagccugcagugcagaaucugcaucuga

SEQ ID NO: 167286 - RNA, 1701 nt, Artificial Sequence; identical to SEQ ID NO: 162729
  derived and/or modified CDS sequence (opt4) from hemagglutinin__InfluenzaA__AEO01121

SEQ ID NO: 167287 - RNA, 1701 nt, Artificial Sequence; identical to SEQ ID NO: 163082
  derived and/or modified CDS sequence (opt4) from hemagglutinin__InfluenzaA__AEO01122

SEQ ID NO: 167288 - RNA, 1701 nt, Artificial Sequence; identical to SEQ ID NO: 162729
  derived and/or modified CDS sequence (opt4) from hemagglutinin__InfluenzaA__AEO01123

SEQ ID NO: 167289 - RNA, 1701 nt, Artificial Sequence; identical to SEQ ID NO: 162729
  derived and/or modified CDS sequence (opt4) from hemagglutinin__InfluenzaA__AEO01124

SEQ ID NO: 167290 - RNA, 1701 nt, Artificial Sequence; identical to SEQ ID NO: 163082
  derived and/or modified CDS sequence (opt4) from hemagglutinin__InfluenzaA__AEO01125

SEQ ID NO: 167291 - RNA, 1701 nt, Artificial Sequence
  derived and/or modified CDS sequence (opt4) from hemagglutinin__InfluenzaA__AEO01126
augaaggccacccugguggugcugcuguacaccuucgccaccgccaacgccgacacccugugcaucggcuaccacgccaacaacagcaccgacaccguggacaccgugcuggagaagaacgugaccgugacccacagcgugaaccugcuggaggacaagcacaacggcaagcugugcaagcugagaggcguggccccccugcaccugggcaagugcaacaucgccggcuggauccugggcaaccccgagugcgagagccugagcaccgccagcagcuggagcuacaucguggagaccagcagcagcgacaacggcaccugcuaccccggcgacuucaucgacuacgaggagcugagagagcagcugagcagcgugagcagcuucgagagauucgagaucuuccccaagaccagcagcuggcccaaccacgacagcaacaagggcgugaccgccgccugcccccacgccggcgccaagagcuucuacaagaaccugaucuggcuggugaagaagggcaacagcuaccccaagcugagcaagagcuacaucaacgacaagggcaaggaggugcuggugcuguggggcauccaccaccccagcaccagcgccgaccagcagagccuguaccagaacgccgacgccuacguguucgugggcaccagcagauacagcaagaaguucaagcccgagaucgccaucagacccaaggugagagagcaggagggcagaaugaacuacuacuggacccugguggagcccggcgacaagaucaccuucgaggccaccggcaaccugguggugcccagauacgccuucgccauggagagaaacgccggcagcggcaucaucaucagcgacacccccgugcacgacugcaacaccaccugccagacccccaagggcgccaucaacaccagccugcccuuccagaacauccaccccaucaccaucggcaagugccccaaguacgugaagagcaccaagcugagacuggccaccggccugagaaacgugcccagcauccagagcagaggccuguucggcgccaucgccggcuucaucgagggcggcuggaccggcaugguggacggcugguacggcuaccaccaccagaacgagcagggcagcggcuacgccgccgaccugaagagcacccagaacgccaucgacgagaucaccaacaaggugaacagcgugaucgagaagaugaacacccaguucaccgccgugggcaaggaguucaaccaccuggagaagagaaucgagaaccugaacaagaagguggacgacggcuuccuggacaucuggaccuacaacgccgagcugcuggugcugcuggagaacgagagaacccuggacuaccacgacagcaacgugaagaaccuguacgagaaggugagaagccagcugaagaacaacgccaaggagaucggcaacggcugcuucgaguucuaccacaagugcgacaacaccugcauggagagcgugaagaacggcaccuacgacuaccccaaguacagcgaggaggccaagcugaacagagaggagaucgacggcgugaagcuggagagcaccagaaucuaccagauccuggccaucuacagcaccguggccagcagccuggugcugguggugagccugggcgccaucagcuucuggaugugcagcaacggcagccugcagugcagaaucugcaucuga

SEQ ID NO: 167292 - RNA, 1701 nt, Artificial Sequence; identical to SEQ ID NO: 162729
  derived and/or modified CDS sequence (opt4) from hemagglutinin__InfluenzaA__AEO01127

SEQ ID NO: 167293 - RNA, 1701 nt, Artificial Sequence; identical to SEQ ID NO: 162729
  derived and/or modified CDS sequence (opt4) from hemagglutinin__InfluenzaA__AEO01128

SEQ ID NO: 167294 - RNA, 1701 nt, Artificial Sequence; identical to SEQ ID NO: 163082
  derived and/or modified CDS sequence (opt4) from hemagglutinin__InfluenzaA__AEO01129

SEQ ID NO: 167295 - RNA, 1701 nt, Artificial Sequence; identical to SEQ ID NO: 162729
  derived and/or modified CDS sequence (opt4) from hemagglutinin__InfluenzaA__AEO01130

SEQ ID NO: 167296 - RNA, 1701 nt, Artificial Sequence; identical to SEQ ID NO: 163082
  derived and/or modified CDS sequence (opt4) from hemagglutinin__InfluenzaA__AEO01131

SEQ ID NO: 167297 - RNA, 1701 nt, Artificial Sequence; identical to SEQ ID NO: 162729
  derived and/or modified CDS sequence (opt4) from hemagglutinin__InfluenzaA__AEO01132

SEQ ID NO: 167298 - RNA, 1701 nt, Artificial Sequence
  derived and/or modified CDS sequence (opt4) from hemagglutinin__InfluenzaA__AEO01133
augaaggccauccugguggugcugcuguacaccuucgccaccgccaacgccgacacccugugcaucggcuaccacgccaacaacagcaccgacaccguggacaccgugcuggagaagaacgugaccgugacccacagcgugaacauccuggaggacaagcacaacggcaagcugugcaagcugagaggcguggccccccugcaccugggcaagugcaacaucgccggcuggauccugggcaaccccgagugcgagagccugagcaccgccagcagcuggagcuacaucguggagaccagcagcagcgacaacggcaccugcuaccccggcgacuucaucgacuacgaggagcugagagagcagcugagcagcgugagcagcuucgagagauucgagaucuuccccaagaccagcagcuggcccaaccacgacagcaacaagggcgugaccgccgccugcccccacgccggcgccaagagcuucuacaagaaccugaucuggcuggugaagaagggcaacagcuaccccaagcugagcaagagcuacaucaacgacaagggcaaggaggugcuggugcuguggggcauccaccaccccagcaccagcgccgaccagcagagccuguaccagaacgccgacgccuacguguucgugggcagcagcagauacagcaagaaguucaagcccgagaucgccaucagacccaaggugagagaccaggagggcagaaugaacuacuacuggacccugguggagcccggcgacaagaucaccuucgaggccaccggcaaccugguggugcccagauacgccuucgccauggagagaaacgccggcagcggcaucaucaucagcgacacccccgugcacgacugcaacaccaccugccagacccccaagggcgccaucaacaccagccugcccuuccagaacauccaccccaucaccaucggcaagugccccaaguacgugaagagcaccaagcugagacuggccaccggccugagaaacgugcccagcauccagagcagaggccuguucggcgccaucgccggcuucaucgagggcggcuggaccggcaugguggacggcugguacggcuaccaccaccagaacgagcagggcagcggcuacgccgccgaccugaagagcacccagaacgccaucgacgagaucaccaacaaggugaacagcgugaucgagaagaugaacacccaguucaccgccgugggcaaggaguucaaccaccuggagaagagaaucgagaaccugaacaagaagguggacgacggcuuccuggacaucuggaccuacaacgccgagcugcuggugcugcuggagaacgagagaacccuggacuaccacgacagcaacgugaagaaccuguacgagaaggugagaagccagcugaagaacaacgccaaggagaucggcaacggcugcuucgaguucuaccacaagugcgacaacaccugcauggagagcgugaagaacggcaccuacgacuaccccaaguacagcgaggaggccaagcugaacagagaggagaucgacggcgugaagcuggagagcaccaugaucuaccagauccuggccaucuacagcaccguggccagcagccuggugcugguggugagccugggcgccaucagcuucuggaugugcagcaacggcagccugcagugcagaaucugcaucuga

SEQ ID NO: 167299 - RNA, 1701 nt, Artificial Sequence; identical to SEQ ID NO: 163082
  derived and/or modified CDS sequence (opt4) from hemagglutinin__InfluenzaA__AEO01134

SEQ ID NO: 167300 - RNA, 1701 nt, Artificial Sequence; identical to SEQ ID NO: 163082
  derived and/or modified CDS sequence (opt4) from hemagglutinin__InfluenzaA__AEO01135

SEQ ID NO: 167301 - RNA, 1701 nt, Artificial Sequence; identical to SEQ ID NO: 162729
  derived and/or modified CDS sequence (opt4) from hemagglutinin__InfluenzaA__AEO01136

SEQ ID NO: 167302 - RNA, 1701 nt, Artificial Sequence; identical to SEQ ID NO: 163176
  derived and/or modified CDS sequence (opt4) from hemagglutinin__InfluenzaA__AEO01137

SEQ ID NO: 167303 - RNA, 1701 nt, Artificial Sequence; identical to SEQ ID NO: 163176
  derived and/or modified CDS sequence (opt4) from hemagglutinin__InfluenzaA__AEO01138

SEQ ID NO: 167304 - RNA, 1701 nt, Artificial Sequence; identical to SEQ ID NO: 162729
  derived and/or modified CDS sequence (opt4) from hemagglutinin__InfluenzaA__AEO01139

SEQ ID NO: 167305 - RNA, 1701 nt, Artificial Sequence; identical to SEQ ID NO: 162729
  derived and/or modified CDS sequence (opt4) from hemagglutinin__InfluenzaA__AEO01140

SEQ ID NO: 167306 - RNA, 1701 nt, Artificial Sequence; identical to SEQ ID NO: 162729
  derived and/or modified CDS sequence (opt4) from hemagglutinin__InfluenzaA__AEO01141

SEQ ID NO: 167307 - RNA, 1701 nt, Artificial Sequence; identical to SEQ ID NO: 162729
  derived and/or modified CDS sequence (opt4) from hemagglutinin__InfluenzaA__AEO01142

SEQ ID NO: 167308 - RNA, 1701 nt, Artificial Sequence
  derived and/or modified CDS sequence (opt4) from hemagglutinin__InfluenzaA__AEO01144
augaaggccauccugguggugcugcuguacaccuucgccaccgccaacgccgacacccugugcaucggcuaccacgccaacaacagcaccgacaccguggacaccgugcuggagaagaacgugaccgugacccacagcgugaaccugcuggaggacaagcacaacggcaagcugugcaagcugagaggcguggccccccugcaccugggcaagugcaacaucgccggcuggauccugggcaaccccgagugcgagagccugagcaccgccagcagcuggagcuacaucguggagaccagcaucagcgacaacggcaccugcuaccccggcgacuucaucgacuacgaggagcugagagagcagcugagcagcgugagcagcuucgagagauucgagaucuuccccaagaccagcagcuggcccaaccacgacagcaacaagggcgugaccgccgccugcccccacgccggcgccaagggcuucuacaagaaccugaucuggcuggugaagaagggcaacagcuaccccaagcugagcaagagcuacaucaacgacaagggcaaggaggugcuggugcuguggggcauccaccaccccagcaccagcgccgaccagcagagccuguaccagaacgccgacgccuacguguucgugggcaccagcagauacagcaagaaguucaagcccgagaucgccaucagacccaaggugagagaccaggagggcagaaugaacuacuacuggacccugguggagcccggcgacaagaucaccuucgaggccaccggcaaccugguggugcccagauacgccuucgccauggagagaaacgccggcagcggcaucaucaucagcgacacccccgugcacgacugcaacaccaccugccagacccccaagggcgccaucaacaccagccugcccuuccagaacauccaccccaucaccaucggcaagugccccaaguacgugaagagcaccaagcugagacuggccaccggccugagaaacgugcccagcauccagagcagaggccuguucggcgccaucgccggcuucaucgagggcggcuggaccggcaugguggacggcugguacggcuaccaccaccagaacgagcagggcagcggcuacgccgccgaccugaagagcacccagaacgccaucgacgagaucaccaacaaggugaacagcgugaucgagaagaugaacacccaguucaccgccgugggcaaggaguucaaccaccuggagaagagaaucgagaaccugaacaagaagguggacgacggcuuccuggacaucuggaccuacaacgccgagcugcuggugcugcuggagaacgagagaacccuggacuaccacgacagcaacgugaagaaccuguacgagaaggugagaagccagcugaagaacaacgccaaggagaucggcaacggcugcuucgaguucuaccacaagugcgacaacaccugcauggagagcgugaagaacggcaccuacgacuaccccaaguacagcgaggaggccaagcugaacagagaggagaucgacggcgugaagcuggagagcaccagaaucuaccagauccuggccaucuacagcaccguggccagcagccuggugcugguggugagccugggcgccaucagcuucuggaugugcagcaacggcagccugcagugcagaaucugcaucuga

SEQ ID NO: 167309 - RNA, 1701 nt, Artificial Sequence; identical to SEQ ID NO: 162909
  derived and/or modified CDS sequence (opt4) from hemagglutinin__InfluenzaA__AEO01145

SEQ ID NO: 167310 - RNA, 1701 nt, Artificial Sequence
  derived and/or modified CDS sequence (opt4) from hemagglutinin__InfluenzaA__AEO01146
augaaggccauccugguggugcugcuguacaccuucgccaccgccaacgccgacacccugugcaucggcuaccacgccaacaacagcaccgacaccguggacaccgugcuggagaagaacgugaccgugacccacagcgugaaccugcuggaggacaagcacaacggcaagcugugcaagcugagaggcguggccccccugcaccugggcaagugcaacaucgccggcuggauccugggcaaccccgagugcgagagccugagcaccgccagcagcuggagcuacaucguggagaccagcagcagcgacaacggcaccugcuaccccggcgacuucaucgacuacgaggagcugagagagcagcugagcagcgugagcagcuucgagagauucgagaucuuccccaagaccagcagcuggcccaaccacgacagcaacaagggcgugaccgccgccugcccccacgccggcgccaagagcuucuacaagaaccugaucuggcuggugaagaagggcaacagcuaccccaagcugagcaagagcuacaucaacgacaagggcaaggaggugcuggugcuguggggcauccaccaccccagcaccagcgccgaccagcagagccuguaccagaacgccgacgccuacguguucgugggcaccagcagauacagcaagaaguucaaccccgagaucgccaucagacccaaggugagagaccaggagggcagaaugaacuacuacuggacccugguggagcccggcgacaagaucaccuucgaggccaccggcaaccugguggugcccagauacgccuucgccauggagagaaacgccggcagcggcaucaucaucagcgacacccccgugcacgacugcaacaccaccugccagacccccaagggcgccaucaacaccagccugcccuuccagaacauccaccccaucaccaucggcaagugccccaaguacgugaagagcaccaagcugagacuggccaccggccugagaaacgugcccagcauccagagcagaggccuguucggcgccaucgccggcuucaucgagggcggcuggaccggcaugguggacggcugguacggcuaccaccaccagaacgagcagggcagcggcuacgccgccgaccugaagagcacccagaacgccaucgacgagaucaccaacaaggugaacagcgugaucgagaagaugaacacccaguucaccgccgugggcaaggaguucaaccaccuggagaagagaaucgagaaccugaacaagaagguggacgacggcuuccuggacaucuggaccuacaacgccgagcugcuggugcugcuggagaacgagagaacccuggacuaccacgacagcaacgugaagaaccuguacgagaaggugagaagccagcugaagaacaacgccaaggagaucggcaacggcugcuucgaguucuaccacaagugcgacaacaccugcauggagagcgugaagaacggcaccuacgacuaccccaaguacagcgaggaggccaagcugaacagagaggagaucgacggcgugaagcuggagagcaccagaaucuaccagauccuggccaucuacagcaccguggccagcagccuggugcugguggugagccugggcgccaucagcuucuggaugugcagcaacggcagccugcagugcagaaucugcaucuga

SEQ ID NO: 167311 - RNA, 1701 nt, Artificial Sequence; identical to SEQ ID NO: 162729
  derived and/or modified CDS sequence (opt4) from hemagglutinin__InfluenzaA__AEO01147

SEQ ID NO: 167312 - RNA, 1701 nt, Artificial Sequence; identical to SEQ ID NO: 163082
  derived and/or modified CDS sequence (opt4) from hemagglutinin__InfluenzaA__AEO01148

SEQ ID NO: 167313 - RNA, 1701 nt, Artificial Sequence; identical to SEQ ID NO: 163082
  derived and/or modified CDS sequence (opt4) from hemagglutinin__InfluenzaA__AEO01149

SEQ ID NO: 167314 - RNA, 1701 nt, Artificial Sequence; identical to SEQ ID NO: 165936
  derived and/or modified CDS sequence (opt4) from hemagglutinin__InfluenzaA__AEO01150

SEQ ID NO: 167315 - RNA, 1701 nt, Artificial Sequence; identical to SEQ ID NO: 162729
  derived and/or modified CDS sequence (opt4) from hemagglutinin__InfluenzaA__AEO01151

SEQ ID NO: 167316 - RNA, 1701 nt, Artificial Sequence
  derived and/or modified CDS sequence (opt4) from hemagglutinin__InfluenzaA__AEO01152
augaaggccauccugaucgugcugcuguacaccuucgccaccgccaacgccgacacccugugcaucggcuaccacgccaacaacagcaccgacaccguggacaccgugcuggagaagaacgugaccgugacccacagcgugaaccugcuggaggacaagcacaacggcaagcugugcaagcugagaggcguggccccccugcaccugggcaagugcaacaucgccggcuggauccugggcaaccccgagugcgagagccugagcaccgccagcagcuggagcuacaucguggagaccagcagcagcgacaacggcaccugcuaccccggcgacuucaucgacuacgaggagcugagagagcagcugagcagcgugagcagcuucgagagauucgagaucuuccccaagaccagcagcuggcccaaccacgacagcaacaagggcgugaccgccgccugcccccacgccggcgccaagagcuucuacaagaaccugaucuggcuggugaagaagggcaacagcuaccccaagcugagcaagagcuacaucaacgacaagggcaaggaggugcuggugcuguggggcauccaccaccccagcaccagcgccgaccagcagagccuguaccagaacgccgacgccuacguguucgugggcaccagcagauacagcaagaaguucaagcccgagaucgccaucagacccaaggugagaggccaggagggcagaaugaacuacuacuggacccugguggagcccggcgacaagaucaccuucgaggccaccggcaaccugguggugcccagauacgccuucgccauggagagaaacgccggcagcggcaucaucaucagcgacacccccgugcacgacugcaacaccaccugccagacccccaagggcgccaucaacaccagccugcccuuccagaacauccaccccaucaccaucggcaagugccccaaguacgugaagagcaccaagcugagacuggccaccggccugagaaacgugcccagcauccagagcagaggccuguucggcgccaucgccggcuucaucgagggcggcuggaccggcaugguggacggcugguacggcuaccaccaccagaacgagcagggcagcggcuacgccgccgaccugaagagcacccagaacgccaucgacgagaucaccaacaaggugaacagcgugaucgagaagaugaacacccaguucaccgccgugggcaaggaguucaaccaccuggagaagagaaucgagaaccugaacaagaagguggacgacggcuuccuggacaucuggaccuacaacgccgagcugcuggugcugcuggagaacgagagaacccuggacuaccacgacagcaacgugaagaaccuguacgagaaggugagaagccagcugaagaacaacgccaaggagaucggcaacggcugcuucgaguucuaccacaagugcgacaacaccugcauggagagcgugaagaacggcaccuacgacuaccccaaguacagcgaggaggccaagcugaacagagaggagaucgacggcgugaagcuggagagcaccagaaucuaccagauccuggccaucuacagcaccguggccagcagccuggugcugguggugagccugggcgccaucagcuucuggaugugcagcaacggcagccugcagugcagaaucugcaucuga

SEQ ID NO: 167317 - RNA, 1701 nt, Artificial Sequence
  derived and/or modified CDS sequence (opt4) from hemagglutinin__InfluenzaA__AEO01153
augaaggccauccugguggugcugcuguacaccuucgccaccgccaacgccgacacccugugcaucggcuaccacgccaacaacagcaccgacaccguggacaccgugcuggagaagaacgugaccgugacccacagcgugaaccugcuggaggacaagcacaacggcaagcugugcaagcugagaggcguggccccccugcaccugggcaagugcaacaucgccggcuggauccugggcaaccccgagugcgagagccugagcaccgccagcagcuggagcuacaucguggagaccagcagcagcgacaacggcaccugcuaccccggcgacuucaucgacuacgaggagcugagagagcagcugagcagcgugagcagcuucgagagauucgagaucuuccccaagaccagcagcuggcccaaccacgacagcaacaagggcgugaccgccgccugcccccacgccggcgccaagagcuucuacaagaaccugaucuggcuggugaagaagggcaacagcuaccccaagcugagcaagagcuacaucaacaacaagggcaaggaggugcuggugcuguggggcauccaccaccccagcaccagcgccgaccagcagagccuguaccagaacgccgacgccuacguguucgugggcaccagcagauacagcaagaaguucaagcccgagaucgccaucagacccaaggugagagaccaggagggcagaaugaacuacuacuggacccugguggagcccggcgacaagaucaccuucgaggccaccggcaaccugguggugcccagauacgccuucgccauggagagaaacgccggcagcggcaucaucaucagcaacacccccgugcacgacugcaacaccaccugccagacccccaagggcgccaucaacaccagccugcccuuccagaacauccaccccaucaccaucggcaagugccccaaguacgugaagagcaccaagcugagacuggccaccggccugagaaacgugcccagcauccagagcagaggccuguucggcgccaucgccggcuucaucgagggcggcuggaccggcaugguggacggcugguacggcuaccaccaccagaacgagcagggcagcggcuacgccgccgaccugaagagcacccagaacgccaucgacgagaucaccaacaaggugaacagcgugaucgagaagaugaacacccaguucaccgccgugggcaaggaguucaaccaccuggagaagagaaucgagaaccugaacaagaagguggacgacggcuuccuggacaucuggaccuacaacgccgagcugcuggugcugcuggagaacgagagaacccuggacuaccacgacagcaacgugaagaaccuguacgagaaggugagaagccagcugaagaacaacgccaaggagaucggcaacggcugcuucgaguucuaccacaagugcgacaacaccugcauggagagcgugaagaacggcaccuacgacuaccccaaguacagcgaggaggccaagcugaacagagaggagaucgacggcgugaagcuggagagcaccagaaucuaccagauccuggccaucuacagcaccguggccagcagccuggugcugguggugagccugggcgccaucagcuucuggaugugcagcaacggcagccugcagugcagaaucugcaucuga

SEQ ID NO: 167318 - RNA, 1701 nt, Artificial Sequence; identical to SEQ ID NO: 162729
  derived and/or modified CDS sequence (opt4) from hemagglutinin__InfluenzaA__AEO01154

SEQ ID NO: 167319 - RNA, 1701 nt, Artificial Sequence; identical to SEQ ID NO: 163082
  derived and/or modified CDS sequence (opt4) from hemagglutinin__InfluenzaA__AEO01155

SEQ ID NO: 167320 - RNA, 1701 nt, Artificial Sequence; identical to SEQ ID NO: 163082
  derived and/or modified CDS sequence (opt4) from hemagglutinin__InfluenzaA__AEO01156

SEQ ID NO: 167321 - RNA, 1701 nt, Artificial Sequence; identical to SEQ ID NO: 162729
  derived and/or modified CDS sequence (opt4) from hemagglutinin__InfluenzaA__AEO01157

SEQ ID NO: 167322 - RNA, 1701 nt, Artificial Sequence; identical to SEQ ID NO: 162729
  derived and/or modified CDS sequence (opt4) from hemagglutinin__InfluenzaA__AEO01158

SEQ ID NO: 167323 - RNA, 1701 nt, Artificial Sequence; identical to SEQ ID NO: 162729
  derived and/or modified CDS sequence (opt4) from hemagglutinin__InfluenzaA__AEO01159

SEQ ID NO: 167324 - RNA, 1701 nt, Artificial Sequence
  derived and/or modified CDS sequence (opt4) from hemagglutinin__InfluenzaA__AEO01160
augaaggccauccugguggcccugcuguacaccuucgccaccgccaacgccgacacccugugcaucggcuaccacgccaacaacagcaccgacaccguggacaccgugcuggagaagaacgugaccgugacccacagcgugaaccugcuggaggacaagcacaacggcaagcugugcaagcugagaggcguggccccccugcaccugggcaagugcaacaucgccggcuggauccugggcaaccccgagugcgagagccugagcaccgccagcagcuggagcuacaucguggagaccagcagcagcgacaacggcaccugcuaccccggcgacuucaucgacuacgaggagcugagagagcagcugagcagcgugagcagcuucgagagauucgagaucuuccccaagaccagcagcuggcccaaccacgacagcaacaagggcgugaccgccgccugcccccacgccggcgccaagagcuucuacaagaaccugaucuggcuggugaagaagggcaacagcuaccccaagcugagcaagagcuacaucaacgacaagggcaaggaggugcuggugcuguggggcauccaccaccccagcaccagcgccgaccagcagagccuguaccagaacgccgacgccuacguguucgugggcaccagcagauacagcaagaaguucaagcccgagaucgccaucagacccaaggugagagagcaggagggcagaaugaacuacuacuggacccugguggagcccggcgacaagaucaccuucgaggccaccggcaaccugguggugcccagauacgccuucgccauggagagaaacgccggcagcggcaucaucaucagcgacacccccgugcacgacugcaacaccaccugccagacccccaagggcgccaucaacaccagccugcccuuccagaacauccaccccaucaccaucggcaagugccccaaguacgugaagagcaccaagcugagacuggccaccggccugagaaacgugcccagcauccagagcagaggccuguucggcgccaucgccggcuucaucgagggcggcuggaccggcaugguggacggcugguacggcuaccaccaccagaacgagcagggcagcggcuacgccgccgaccugaagagcacccagaacgccaucgacgagaucaccaacaaggugaacagcgugaucgagaagaugaacacccaguucaccgccgugggcaaggaguucaaccaccuggagaagagaaucgagaaccugaacaagaagguggacgacggcuuccuggacaucuggaccuacaacgccgagcugcuggugcugcuggagaacgagagaacccuggacuaccacgacagcaacgugaagaaccuguacgagaaggugagaagccagcugaagaacaacgccaaggagaucggcaacggcugcuucgaguucuaccacaagugcgacaacaccugcauggagagcgugaagaacggcaccuacgacuaccccaaguacagcgaggaggccaagcugaacagagaggagaucgacggcgugaagcuggagagcaccagaaucuaccagauccuggccaucuacagcaccguggccagcagccuggugcugguggugagccugggcgccaucagcuucuggaugugcagcaacggcagccugcagugcagaaucugcaucuga

SEQ ID NO: 167325 - RNA, 1701 nt, Artificial Sequence; identical to SEQ ID NO: 162729
  derived and/or modified CDS sequence (opt4) from hemagglutinin__InfluenzaA__AEO01161

SEQ ID NO: 167326 - RNA, 1701 nt, Artificial Sequence; identical to SEQ ID NO: 163082
  derived and/or modified CDS sequence (opt4) from hemagglutinin__InfluenzaA__AEO01162

SEQ ID NO: 167327 - RNA, 1701 nt, Artificial Sequence; identical to SEQ ID NO: 163082
  derived and/or modified CDS sequence (opt4) from hemagglutinin__InfluenzaA__AEO01163

SEQ ID NO: 167328 - RNA, 1701 nt, Artificial Sequence; identical to SEQ ID NO: 163082
  derived and/or modified CDS sequence (opt4) from hemagglutinin__InfluenzaA__AEO01164

SEQ ID NO: 167329 - RNA, 1701 nt, Artificial Sequence
  derived and/or modified CDS sequence (opt4) from hemagglutinin__InfluenzaA__AEO01165
augaaggccauccugguggugcugcuguacaccuucgccaccgccaacgccgacacccugugcaucggcuaccacgccaacaacagcaccgacaccguggacaccgugcuggagaagaacgugaccgugacccacagcgugaaccugcuggaggacaagcacaacggcaagcugugcaagcugagaggcguggccccccugcaccugggcaagugcaacaucgccggcuggauccugggcaaccccgagugcgagagccugagcaccgccagcagcuggagcuacaucguggagaccagcagcagcgacaacggcaccugcuaccccggcgacuucaucgacuacgaggagcugagagagcagcugagcagcgugagcagcuucgagagauucgagaucuuccccaagaccagcagcuggcccaaccacgacagcaacaagggcgugaccgccgccugcccccacgccggcgccaagagcuucuacaagaaccugaucuggcuggugaagaagggcaacagcuaccccaaguucagcaagagcuacaucaacgacaagggcaaggaggugcuggugcuguggggcauccaccaccccagcaccagcgccgaccagcagagccuguaccagaacgccgacgccuacguguucgugggcaccagcagauacagcaagaaguucaagcccgagaucgccaucagacccaaggugagagaccaggagggcagaaugaacuacuacuggacccugguggagcccggcgacaagaucaccuucgaggccaccggcaaccugguggugcccagauacgccuucgccauggagagaaacgccggcagcggcaucaucaucagcgacacccccgugcacgacugcaacaccaccugccagacccccaagggcgccaucaacaccagccugcccuuccagaacauccaccccaucaccaucggcaagugccccaaguacgugaagagcaccaagcugagacuggccaccggccugagaaacgugcccagcauccagagcagaggccuguucggcgccaucgccggcuucaucgagggcggcuggaccggcaugguggacggcugguacggcuaccaccaccagaacgagcagggcagcggcuacgccgccgaccugaagagcacccagaacgccaucgacgagaucaccaacaaggugaacagcgugaucgagaagaugaacacccaguucaccgccgugggcaaggaguucaaccaccuggagaagagaaucgagaaccugaacaagaagguggacgacggcuuccuggacaucuggaccuacaacgccgagcugcuggugcugcuggagaacgagagaacccuggacuaccacgacagcaacgugaagaaccuguacgagaaggugagaagccagcugaagaacaacgccaaggagaucggcaacggcugcuucgaguucuaccacaagugcgacaacaccugcauggagagcgugaagaacggcaccuacgacuaccccaaguacagcgaggaggccaagcugaacagagaggagaucgacggcgugaagcuggagagcaccagaaucuaccagauccuggccaucuacagcaccguggccagcagccuggugcugguggugagccugggcgccaucagcuucuggaugugcagcaacggcagccugcagugcagaaucugcaucuga

SEQ ID NO: 167330 - RNA, 1701 nt, Artificial Sequence; identical to SEQ ID NO: 163082
  derived and/or modified CDS sequence (opt4) from hemagglutinin__InfluenzaA__AEO01166

SEQ ID NO: 167331 - RNA, 1701 nt, Artificial Sequence
  derived and/or modified CDS sequence (opt4) from hemagglutinin__InfluenzaA__AEO01167
augaaggccauccugguggugcugcuguacaccuucgccaccgccaacgccgacacccugugcaucggcuaccacgccaacaacagcaccgacaccguggacaccgugcuggagaagaacgugaccgugacccacagcgugaaccugcuggaggacaagcacaacggcaagcugugcaagcugagaggcguggccccccugcaccugggcaagugcaacaucgccggcuggauccugggcaaccccgagugcgagagccugagcaccgccagcagcuggagcuacaucguggagaccagcagcagcgacaacggcaccugcuaccccggcgacuucaucgacuacgaggagcugagagagcagcugagcagcgugagcagcuucgagagauucgagaucuuccccaagaccagcagcuggcccaaccacgacagcaacaagggcgugaccgccgccugcccccacgccggcgccaagagcuucuacaagaaccugaucuggcuggugaagaagggcaacagcuaccccaagcugagcaagagcuacaucaacgacaagggcaaggaggugcuggugcuguggggcauccaccaccccagcaccagcgccgaccagcagagccuguaccagaacgccgacgccuacguguucgugggcaccagcagauacagcaagaaguucaagcccgagaucgccaucagacccaaggugagagagcaggagggcagaaugaacuacuacuggacccugguggagcccggcgacaagaucaccuucgaggccaccggcaaccugguggugcccagauacgccuucgccauggagagaaacgccggcagcggcaucaucaucagcgacaccagcgugcacgacugcaacaccaccugccagacccccaagggcgccaucaacaccagccugcccuuccagaacauccaccccaucaccaucggcaagugccccaaguacgugaagagcaccaagcugagacuggccaccggccugagaaacgugcccagcauccagagcagaggccuguucggcgccaucgccggcuucaucgagggcggcuggaccggcaugguggacggcugguacggcuaccaccaccagaacgagcagggcagcggcuacgccgccgaccugaagagcacccagaacgccaucgacgagaucaccaacaaggugaacagcgugaucgagaagaugaacacccaguucaccgccgugggcaaggaguucaaccaccuggagaagagaaucgagaaccugaacaagaagguggacgacggcuuccuggacaucuggaccuacaacgccgagcugcuggugcugcuggagaacgagagaacccuggacuaccacgacagcaacgugaagaaccuguacgagaaggugagaagccagcugaagaacaacgccaaggagaucggcaacggcugcuucgaguucuaccacaagugcgacaacaccugcauggagagcgugaagaacggcaccuacgacuaccccaaguacagcgaggaggccaagcugaacagagaggagaucgacggcgugaagcuggagagcaccagaaucuaccagauccuggccaucuacagcaccguggccagcagccuggugcugguggugagccugggcgccaucagcuucuggaugugcagcaacggcagccugcagugcagaaucugcaucuga

SEQ ID NO: 167332 - RNA, 1701 nt, Artificial Sequence; identical to SEQ ID NO: 162729
  derived and/or modified CDS sequence (opt4) from hemagglutinin__InfluenzaA__AEO01168

SEQ ID NO: 167333 - RNA, 1701 nt, Artificial Sequence; identical to SEQ ID NO: 163082
  derived and/or modified CDS sequence (opt4) from hemagglutinin__InfluenzaA__AEO01169

SEQ ID NO: 167334 - RNA, 1701 nt, Artificial Sequence; identical to SEQ ID NO: 163082
  derived and/or modified CDS sequence (opt4) from hemagglutinin__InfluenzaA__AEO01170

SEQ ID NO: 167335 - RNA, 1701 nt, Artificial Sequence; identical to SEQ ID NO: 163082
  derived and/or modified CDS sequence (opt4) from hemagglutinin__InfluenzaA__AEO01171

SEQ ID NO: 167336 - RNA, 1701 nt, Artificial Sequence; identical to SEQ ID NO: 162729
  derived and/or modified CDS sequence (opt4) from hemagglutinin__InfluenzaA__AEO01172

SEQ ID NO: 167337 - RNA, 1701 nt, Artificial Sequence
  derived and/or modified CDS sequence (opt4) from hemagglutinin__InfluenzaA__AEO01173
augaaggccauccugguggugcugcuguacaccuucgccaccgccaacgccgacacccugugcaucggcuaccacgccaacaacagcaccgacaccguggacaccgugcuggagaagaacgugaccgugacccacagcgugaaccugcuggaggacaagcacaacggcaagcugugcaagcugagaggcguggccccccugcaccugggcaagugcaacaucgccggcuggauccugggcaaccccgagugcgagagccugagcaccgccagcagcuggagcuacaucguggagaccagcagcagcgacaacggcaccugcuaccccggcgacuucaucgacuacgaggagcugagagagcagcugagcagcgugagcagcuucgagagauucgagaucuuccccaagaccagcagcuggcccaaccacgacagcaacaagggcgugaccgccgccugcccccacgccggcgccaagagcuucuacaagaaccugaucuggcuggugaagaagggcaacagcuaccccaagcugagcaagagcuacaucaacgacaagggcaaggaggugcuggugcuguggggcauccaccaccccagcaccagcgccgaccagcagagccuguaccagaacgccgacgccuacguguucgugggcaccagcagauacagcaagaaguucaagcccgagaucgccaucagacccaaggugagagaccaggagggcagaaugaacuacuacuggacccugguggagcccggcggcaagaucaccuucgaggccaccggcaaccugguggugcccagauacgccuucgccauggagagaaacgccggcagcggcaucaucaucagcgacacccccgugcacgacugcaacaccaccugccagacccccaagggcgccaucaacaccagccugcccuuccagaacauccaccccaucaccaucggcaagugccccaaguacgugaagagcaccaagcugagacuggccaccggccugagaaacgugcccagcauccagagcagaggccuguucggcgccaucgccggcuucaucgagggcggcuggaccggcaugguggacggcugguacggcuaccaccaccagaacgagcagggcagcggcuacgccgccgaccugaagagcacccagaacgccaucgacgagaucaccaacaaggugaacagcgugaucgagaagaugaacacccaguucaccgccgugggcaaggaguucaaccaccuggagaagagaaucgagaaccugaacaagaagguggacgacggcuuccuggacaucuggaccuacaacgccgagcugcuggugcugcuggagaacgagagaacccuggacuaccacgacagcaacgugaagaaccuguacgagaaggugagaagccagcugaagaacaacgccaaggagaucggcaacggcugcuucgaguucuaccacaagugcgacaacaccugcauggagagcgugaagaacggcaccuacgacuaccccaaguacagcgaggaggccaagcugaacagagaggagaucgacggcgugaagcuggagagcaccagaaucuaccagauccuggccaucuacagcaccguggccagcagccuggugcugguggugagccugggcgccaucagcuucuggaugugcagcaacggcagccugcagugcagaaucugcaucuga

SEQ ID NO: 167338 - RNA, 1701 nt, Artificial Sequence
  derived and/or modified CDS sequence (opt4) from hemagglutinin__InfluenzaA__AEO01174
augaaggccauccugguggugcugcuguacaccuucgccaccgccaacgccgacacccugugcaucggcuaccacgccaacaacagcaccgacaccguggacaccgugcuggagaagaacgugaccgugacccacagcgugaaccugcuggaggacaagcacaacggcaagcugugcaagcugagaggcguggccccccugcaccugggcaagugcaacaucgccggcuggauccugggcaaccccgagugcgagagccugagcaccgccagcagcuggagcuacaucguggagaccagcagcagcggcaacggcaccugcuaccccggcgacuucaucgacuacgaggagcugagagagcagcugagcagcgugagcagcuucgagagauucgagaucuuccccaagaccagcagcuggcccaaccacgacagcaacaagggcgugaccgccgccugcccccacgccggcgccaagagcuucuacaagaaccugaucuggcuggugaagaagggcaacagcuaccccaagcugagcaagagcuacaucaacgacaagggcaaggaggugcuggugcuguggggcauccaccaccccagcaccagcgccgaccagcagagccuguaccagaacgccgacgccuacguguucgugggcaccagcagauacagcaagaaguucaagcccgagaucgccaucagacccaaggugagagagcaggagggcagaaugaacuacuacuggacccugguggagcccggcgacaagaucaccuucgaggccaccggcaaccugguggugcccagauacgccuucgccauggagagaaacgccggcagcggcaucaucaucagcgacacccccgugcacgacugcaacaccaccugccagacccccaagggcgccaucaacaccagccugcccuuccagaacauccaccccaucaccaucggcaagugccccaaguacgugaagagcaccaagcugagacuggccaccggccugagaaacgugcccagcauccagagcagaggccuguucggcgccaucgccggcuucaucgagggcggcuggaccggcaugguggacggcugguacggcuaccaccaccagaacgagcagggcagcggcuacgccgccgaccugaagagcacccagaacgccaucgacgagaucaccaacaaggugaacagcgugaucgagaagaugaacacccaguucaccgccgugggcaaggaguucaaccaccuggagaagagaaucgagaaccugaacaagaagguggacgacggcuuccuggacaucuggaccuacaacgccgagcugcuggugcugcuggagaacgagagaacccuggacuaccacgacagcaacgugaagaaccuguacgagaaggugagaagccagcugaagaacaacgccaaggagaucggcaacggcugcuucgaguucuaccacaagugcgacaacaccugcauggagagcgugaagaacggcaccuacgacuaccccaaguacagcgaggaggccaagcugaacagagaggagaucgacggcgugaagcuggagagcaccagaaucuaccagauccuggccaucuacagcaccguggccagcagccuggugcugguggugagccugggcgccaucagcuucuggaugugcagcaacggcagccugcagugcagaaucugcaucuga

SEQ ID NO: 167339 - RNA, 1701 nt, Artificial Sequence; identical to SEQ ID NO: 162729
  derived and/or modified CDS sequence (opt4) from hemagglutinin__InfluenzaA__AEO01176

SEQ ID NO: 167340 - RNA, 1701 nt, Artificial Sequence; identical to SEQ ID NO: 162729
  derived and/or modified CDS sequence (opt4) from hemagglutinin__InfluenzaA__AEO01177

SEQ ID NO: 167341 - RNA, 1701 nt, Artificial Sequence; identical to SEQ ID NO: 163082
  derived and/or modified CDS sequence (opt4) from hemagglutinin__InfluenzaA__AEO01179

SEQ ID NO: 167342 - RNA, 1701 nt, Artificial Sequence; identical to SEQ ID NO: 163082
  derived and/or modified CDS sequence (opt4) from hemagglutinin__InfluenzaA__AEO01180

SEQ ID NO: 167343 - RNA, 1701 nt, Artificial Sequence; identical to SEQ ID NO: 163082
  derived and/or modified CDS sequence (opt4) from hemagglutinin__InfluenzaA__AEO01181

SEQ ID NO: 167344 - RNA, 1701 nt, Artificial Sequence; identical to SEQ ID NO: 163082
  derived and/or modified CDS sequence (opt4) from hemagglutinin__InfluenzaA__AEO01182

SEQ ID NO: 167345 - RNA, 1701 nt, Artificial Sequence; identical to SEQ ID NO: 162729
  derived and/or modified CDS sequence (opt4) from hemagglutinin__InfluenzaA__AEO01183

SEQ ID NO: 167346 - RNA, 1701 nt, Artificial Sequence; identical to SEQ ID NO: 163082
  derived and/or modified CDS sequence (opt4) from hemagglutinin__InfluenzaA__AEO01184

SEQ ID NO: 167347 - RNA, 1701 nt, Artificial Sequence; identical to SEQ ID NO: 162729
  derived and/or modified CDS sequence (opt4) from hemagglutinin__InfluenzaA__AEO01185

SEQ ID NO: 167348 - RNA, 1701 nt, Artificial Sequence; identical to SEQ ID NO: 162729
  derived and/or modified CDS sequence (opt4) from hemagglutinin__InfluenzaA__AEO01186

SEQ ID NO: 167349 - RNA, 1701 nt, Artificial Sequence; identical to SEQ ID NO: 162729
  derived and/or modified CDS sequence (opt4) from hemagglutinin__InfluenzaA__AEO01187

SEQ ID NO: 167350 - RNA, 1701 nt, Artificial Sequence; identical to SEQ ID NO: 162729
  derived and/or modified CDS sequence (opt4) from hemagglutinin__InfluenzaA__AEO01188

SEQ ID NO: 167351 - RNA, 1701 nt, Artificial Sequence; identical to SEQ ID NO: 162729
  derived and/or modified CDS sequence (opt4) from hemagglutinin__InfluenzaA__AEO01189

SEQ ID NO: 167352 - RNA, 1701 nt, Artificial Sequence; identical to SEQ ID NO: 162729
  derived and/or modified CDS sequence (opt4) from hemagglutinin__InfluenzaA__AEO01191

SEQ ID NO: 167353 - RNA, 1701 nt, Artificial Sequence; identical to SEQ ID NO: 162729
  derived and/or modified CDS sequence (opt4) from hemagglutinin__InfluenzaA__AEO01192

SEQ ID NO: 167354 - RNA, 1701 nt, Artificial Sequence; identical to SEQ ID NO: 164043
  derived and/or modified CDS sequence (opt4) from hemagglutinin__InfluenzaA__AEO01193

SEQ ID NO: 167355 - RNA, 1701 nt, Artificial Sequence; identical to SEQ ID NO: 163082
  derived and/or modified CDS sequence (opt4) from hemagglutinin__InfluenzaA__AEO01194

SEQ ID NO: 167356 - RNA, 1701 nt, Artificial Sequence; identical to SEQ ID NO: 163082
  derived and/or modified CDS sequence (opt4) from hemagglutinin__InfluenzaA__AEO01195

SEQ ID NO: 167357 - RNA, 1701 nt, Artificial Sequence; identical to SEQ ID NO: 162729
  derived and/or modified CDS sequence (opt4) from hemagglutinin__InfluenzaA__AEO01196

SEQ ID NO: 167358 - RNA, 1701 nt, Artificial Sequence; identical to SEQ ID NO: 162729
  derived and/or modified CDS sequence (opt4) from hemagglutinin__InfluenzaA__AEO01197

SEQ ID NO: 167359 - RNA, 1701 nt, Artificial Sequence; identical to SEQ ID NO: 163082
  derived and/or modified CDS sequence (opt4) from hemagglutinin__InfluenzaA__AEO01198

SEQ ID NO: 167360 - RNA, 1701 nt, Artificial Sequence; identical to SEQ ID NO: 163595
  derived and/or modified CDS sequence (opt4) from hemagglutinin__InfluenzaA__AEO01200

SEQ ID NO: 167361 - RNA, 1701 nt, Artificial Sequence
  derived and/or modified CDS sequence (opt4) from hemagglutinin__InfluenzaA__AEO01201
augaaggccauccugguggugcugcuguacaccuucgccaccgccaacgccgacacccugugcaucggcuaccacgccaacaacagcaccgacaccguggacaccgugcuggagaagaacgugaccgugacccacagcgugaaccugcuggaggagaagcacaacggcaagcugugcaagcugagaggcguggccccccugcaccugggcaagugcaacaucgccggcuggauccugggcaaccccgagugcgagagccugagcaccgccagcagcuggagcuacaucguggagaccagcagcagcgacaacggcaccugcuaccccggcgacuucaucgacuacgaggagcugagagagcagcugagcagcgugagcagcuucgagagauucgagaucuuccccaagaccagcagcuggcccaaccacgacagcaacaagggcgugaccgccgccugcccccacgccggcgccaagagcuucuacaagaaccugaucuggcuggugaagaagggcaacagcuaccccaagcugagcaagagcuacaucaacgacaagggcaaggaggugcuggugcuguggggcauccaccaccccagcaccagcgccgaccagcagagccuguaccagaacgccgacgccuacguguucgugggcaccagcagauacagcaagaaguucaagcccgagaucgccaucagacccaaggugagagagcaggagggcagaaugaacuacuacuggacccugguggagcccggcgacaagaucaccuucgaggccaccggcaaccugguggugcccagauacgccuucgccauggagagaaacgccggcagcggcaucaucaucagcgacacccccgugcacgacugcaacaccaccugccagacccccaagggcgccaucaacaccagccugcccuuccagaacauccaccccaucaccaucggcaagugccccaaguacgugaagagcaccaagcugagacuggccaccggccugagaaacgugcccagcauccagagcagaggccuguucggcgccaucgccggcuucaucgagggcggcuggaccggcaugguggacggcugguacggcuaccaccaccagaacgagcagggcagcggcuacgccgccgaccugaagagcacccagaacgccaucgacgagaucaccaacaaggugaacagcgugaucgagaagaugaacacccaguucaccgccgugggcaaggaguucaaccaccuggagaagagaaucgagaaccugaacaagaagguggacgacggcuuccuggacaucuggaccuacaacgccgagcugcuggugcugcuggagaacgagagaacccuggacuaccacgacagcaacgugaagaaccuguacgagaaggugagaagccagcugaagaacaacgccaaggagaucggcaacggcugcuucgaguucuaccacaagugcgacaacaccugcauggagagcgugaagaacggcaccuacgacuaccccaaguacagcgaggaggccaagcugaacagagaggagaucgacggcgugaagcuggagagcaccagaaucuaccagauccuggccaucuacagcaccguggccagcagccuggugcugguggugagccugggcgccaucagcuucuggaugugcagcaacggcagccugcagugcagaaucugcaucuga

SEQ ID NO: 167362 - RNA, 1701 nt, Artificial Sequence; identical to SEQ ID NO: 162729
  derived and/or modified CDS sequence (opt4) from hemagglutinin__InfluenzaA__AEO01202

SEQ ID NO: 167363 - RNA, 1701 nt, Artificial Sequence; identical to SEQ ID NO: 164365
  derived and/or modified CDS sequence (opt4) from hemagglutinin__InfluenzaA__AEO01203

SEQ ID NO: 167364 - RNA, 1701 nt, Artificial Sequence; identical to SEQ ID NO: 162729
  derived and/or modified CDS sequence (opt4) from hemagglutinin__InfluenzaA__AEO01204

SEQ ID NO: 167365 - RNA, 1701 nt, Artificial Sequence; identical to SEQ ID NO: 162729
  derived and/or modified CDS sequence (opt4) from hemagglutinin__InfluenzaA__AEO01205

SEQ ID NO: 167366 - RNA, 1701 nt, Artificial Sequence; identical to SEQ ID NO: 162729
  derived and/or modified CDS sequence (opt4) from hemagglutinin__InfluenzaA__AEO01206

SEQ ID NO: 167367 - RNA, 1701 nt, Artificial Sequence; identical to SEQ ID NO: 162729
  derived and/or modified CDS sequence (opt4) from hemagglutinin__InfluenzaA__AEO01207

SEQ ID NO: 167368 - RNA, 1701 nt, Artificial Sequence; identical to SEQ ID NO: 162729
  derived and/or modified CDS sequence (opt4) from hemagglutinin__InfluenzaA__AEO01208

SEQ ID NO: 167369 - RNA, 1701 nt, Artificial Sequence; identical to SEQ ID NO: 163082
  derived and/or modified CDS sequence (opt4) from hemagglutinin__InfluenzaA__AEO01209

SEQ ID NO: 167370 - RNA, 1701 nt, Artificial Sequence; identical to SEQ ID NO: 162729
  derived and/or modified CDS sequence (opt4) from hemagglutinin__InfluenzaA__AEO01210

SEQ ID NO: 167371 - RNA, 1701 nt, Artificial Sequence; identical to SEQ ID NO: 163082
  derived and/or modified CDS sequence (opt4) from hemagglutinin__InfluenzaA__AEO01211

SEQ ID NO: 167372 - RNA, 1701 nt, Artificial Sequence; identical to SEQ ID NO: 162729
  derived and/or modified CDS sequence (opt4) from hemagglutinin__InfluenzaA__AEO01212

SEQ ID NO: 167373 - RNA, 1701 nt, Artificial Sequence; identical to SEQ ID NO: 162729
  derived and/or modified CDS sequence (opt4) from hemagglutinin__InfluenzaA__AEO01213

SEQ ID NO: 167374 - RNA, 1701 nt, Artificial Sequence
  derived and/or modified CDS sequence (opt4) from hemagglutinin__InfluenzaA__AEO01214
augaaggccauccugguggugcugcuguacaccuucgccaccgccaacgccgacacccugugcaucggcuaccacgccaacaacagcaccgacaccguggacaccgugcuggagaagaacgugaccgugacccacagcgugaaccugcuggaggacaagcacaacggcaagcugugcaagcugagaggcguggccccccugcaccugggcaagugcaacaucgccggcuggauccugggcaaccccgagugcgagagccugagcaccgccagcagcuggagcuacaucguggagaccagcagcagcgacaacggcaccugcuaccccggcgacuucaucgacuacgaggagcugagagagcagcugagcagcgugagcagcuucgagagauucgagaucuuccccaagaccagcagcuggcccaaccacgacagcaacaagggcgugaccgccgccugcccccacgccggcgccaagagcuucuacaagaaccugaucuggcuggugaagaagggcaacagcuaccccaagcugagcaagagcuacaucaacgacaagggcaaggaggugcuggugcuguggggcauccaccaccccagcaccagcgccgaccagcagagccuguaccagaacgccgacgccuacguguucgugggcaccagcagauacagcaagaaguucaagcccgagaucgccaucagacccaaggugagagaccaggagggcagaaugaacuacuacuggacccugguggagcccggcgacaagaucaccuucgaggccaccggcaaccugguggcccccagauacgccuucgccauggagagaaacgccggcagcggcaucaucaucagcgacacccccgugcacgacugcaacaccaccugccagacccccaagggcgccaucaacaccagccugcccuuccagaacauccaccccaucaccaucggcaagugccccaaguacgugaagagcaccaagcugagacuggccaccggccugagaaacgugcccagcauccagagcagaggccuguucggcgccaucgccggcuucaucgagggcggcuggaccggcaugguggacggcugguacggcuaccaccaccagaacgagcagggcagcggcuacgccgccgaccugaagagcacccagaacgccaucgacgagaucaccaacaaggugaacagcgugaucgagaagaugaacacccaguucaccgccgugggcaaggaguucaaccaccuggagaagagaaucgagaaccugaacaagaagguggacgacggcuuccuggacaucuggaccuacaacgccgagcugcuggugcugcuggagaacgagagaacccuggacuaccacgacagcaacgugaagaaccuguacgagaaggugagaagccagcugaagaacaacgccaaggagaucggcaacggcugcuucgaguucuaccacaagugcgacaacaccugcauggagagcgugaagaacggcaccuacgacuaccccaaguacagcgaggaggccaagcugaacagagaggagaucgacggcgugaagcuggagagcaccagaaucuaccagauccuggccaucuacagcaccguggccagcagccuggugcugguggugagccugggcgccaucagcuucuggaugugcagcaacggcagccugcagugcagaaucugcaucuga

SEQ ID NO: 167375 - RNA, 1701 nt, Artificial Sequence; identical to SEQ ID NO: 163082
  derived and/or modified CDS sequence (opt4) from hemagglutinin__InfluenzaA__AEO01215

SEQ ID NO: 167376 - RNA, 1701 nt, Artificial Sequence
  derived and/or modified CDS sequence (opt4) from hemagglutinin__InfluenzaA__AEO01216
augaaggccauccugguggugcugcuguacaccuucgccaccgccaacgccgacacccugugcaucggcuaccacgccaacaacagcaccgacaccguggacaccgugcuggagaagaacgugaccgugacccacagcgugaaccugcuggaggacaagcacaacggcaagcugugcaagcugagaggcguggccccccugcaccugggcaagugcaacaucgccggcuggauccugggcaaccccgagugcgagagccugagcaccgccagcagcuggagcuacaucguggagaccagcagcagcgacaacggcaccugcuaccccggcgacuucaucgacuacgaggagcugagagagcagcugagcagcgugagcagcuucgagagauucgagaucuuccccaagaccagcagcuggcccaaccacgacagcaacaagggcgugaccgccgccugcccccacgccggcgccaagagcuucuacaagaaccugaucuggcuggugaagaagggcaacagcuaccccaagcugagcaagagcuacaucaacgacaagggcaaggaggugcuggugcuguggggcauccaccaccccagcaccagcgccgaccagcagagccuguaccagaacgccgacgccuacguguucgugggcaccagcagauacagcaagaaguucaagcccgagaucgccaucagacccaaggugagagagcaggagggcagaaugaacuacuacuggacccugguggagcccggcgacaagaucaccuucgaggccaccggcaaccugguggugcccagauacgccuucgccauggagagaaacgccggcagcggcaucaucaucagcgacacccccgugcacgacugcaacaccaccugccagacccccaagggcgccaucaacaccagccugcccuuccagaacauccaccccaucaccaucggcaagugccccaaguacgugaagagcaccaagcugagacuggccaccggccugagaaacgugcccagcauccagagcagaggccuguucggcgccaucgccggcuucaucgagggcggcuggaccggcaugguggacggcugguacggcuaccaccaccagaacgagcagggcagcggcuacgccgccgaccugaagagcacccagaacgccaucgacgagaucaccaacaaggugaacagcgugaucgagaagaugaacacccaguucaccgccgugggcaaggaguucaaccaccuggagaagagaguggagaaccugaacaagaagguggacgacggcuuccuggacaucuggaccuacaacgccgagcugcuggugcugcuggagaacgagagaacccuggacuaccacgacagcaacgugaagaaccuguacgagaaggugagaagccagcugaagaacaacgccaaggagaucggcaacggcugcuucgaguucuaccacaagugcgacaacaccugcauggagagcgugaagaacggcaccuacgacuaccccaaguacagcgaggaggccaagcugaacagagaggagaucgacggcgugaagcuggagagcaccagaaucuaccagauccuggccaucuacagcaccguggccagcagccuggugcugguggugagccugggcgccaucagcuucuggaugugcagcaacggcagccugcagugcagaaucugcaucuga

SEQ ID NO: 167377 - RNA, 1701 nt, Artificial Sequence; identical to SEQ ID NO: 163082
  derived and/or modified CDS sequence (opt4) from hemagglutinin__InfluenzaA__AEO01217

SEQ ID NO: 167378 - RNA, 1701 nt, Artificial Sequence; identical to SEQ ID NO: 163082
  derived and/or modified CDS sequence (opt4) from hemagglutinin__InfluenzaA__AEO01218

SEQ ID NO: 167379 - RNA, 1701 nt, Artificial Sequence; identical to SEQ ID NO: 163082
  derived and/or modified CDS sequence (opt4) from hemagglutinin__InfluenzaA__AEO01219

SEQ ID NO: 167380 - RNA, 1701 nt, Artificial Sequence; identical to SEQ ID NO: 162820
  derived and/or modified CDS sequence (opt4) from hemagglutinin__InfluenzaA__AEO01220

SEQ ID NO: 167381 - RNA, 1701 nt, Artificial Sequence; identical to SEQ ID NO: 162729
  derived and/or modified CDS sequence (opt4) from hemagglutinin__InfluenzaA__AEO01221

SEQ ID NO: 167382 - RNA, 1701 nt, Artificial Sequence; identical to SEQ ID NO: 162729
  derived and/or modified CDS sequence (opt4) from hemagglutinin__InfluenzaA__AEO01222

SEQ ID NO: 167383 - RNA, 1701 nt, Artificial Sequence; identical to SEQ ID NO: 163082
  derived and/or modified CDS sequence (opt4) from hemagglutinin__InfluenzaA__AEO01223

SEQ ID NO: 167384 - RNA, 1701 nt, Artificial Sequence
  derived and/or modified CDS sequence (opt4) from hemagglutinin__InfluenzaA__AEO01224
augaaggccauccugguggugcugcuguacaccuucgccaccgccaacgccgacacccugugcaucggcuaccacgccaacaacagcaccgacaccguggacaccgugcuggagaagaacgugaccgugacccacagcgugaaccugcuggaggacaagcacaacggcaagcugugcaagcugagaggcguggccccccugcaccugggcaagugcaacaucgccggcuggauccugggcaaccccgagugcgagagccugagcaccgccagcagcuggagcuacaucguggagaccagcagcagcgacaacggcaccugcuaccccggcgacuucaucgacuacgaggagcugagagagcagcugagcagcgugagcagcuucgagagauucgagaucuuccccaagaccagcagcuggcccaaccacgacagcaacaagggcgugaccgccgccugcccccacgccggcgccaagagcuucuacaagaaccugaucuggcuggugaagaagggcaacagcuaccccaagcugagcaagagcuacaucaacgacaagggcaaggaggugcuggugcuguggggcauccaccaccccagcaccagcgccgaccagcagagccuguaccagaacgccgacgccuacguguucgugggcaccagcagauacagcaagaaguucaagcccgagaucgccaucagacccaaggugagagaccaggagggcagaaugaacuacuacuggacccugguggagcccggcgacaagaucaccuucgaggccaccggcaaccugguggugcccagauacgccuucgccaccgagagaaacgccggcagcggcaucaucaucagcgacacccccgugcacgacugcaacaccaccugccagacccccaagggcgccaucaacaccagccugcccuuccagaacauccaccccaucaccaucggcaagugccccaaguacgugaagagcaccaagcugagacuggccaccggccugagaaacgugcccagcauccagagcagaggccuguucggcgccaucgccggcuucaucgagggcggcuggaccggcaugguggacggcugguacggcuaccaccaccagaacgagcagggcagcggcuacgccgccgaccugaagagcacccagaacgccaucgacgagaucaccaacaaggugaacagcgugaucgagaagaugaacacccaguucaccgccgugggcaaggaguucaaccaccuggagaagagaaucgagaaccugaacaagaagguggacgacggcuuccuggacaucuggaccuacaacgccgagcugcuggugcugcuggagaacgagagaacccuggacuaccacgacagcaacgugaagaaccuguacgagaaggugagaagccagcugaagaacaacgccaaggagaucggcaacggcugcuucgaguucuaccacaagugcgacaacaccugcauggagagcgugaagaacggcaccuacgacuaccccaaguacagcgaggaggccaagcugaacagagaggagaucgacggcgugaagcuggagagcaccagaaucuaccagauccuggccaucuacagcaccguggccagcagccuggugcugguggugagccugggcgccaucagcuucuggaugugcagcaacggcagccugcagugcagaaucugcaucuga

SEQ ID NO: 167385 - RNA, 1701 nt, Artificial Sequence
  derived and/or modified CDS sequence (opt4) from hemagglutinin__InfluenzaA__AEO01225
augaaggccauccugguggugcugcuguacaccuucgccaccgccaacgccgacacccugugcaucggcuaccacgccaacaacagcaccgacaccguggacaccgugcuggagaagaacgugaccgugacccacagcgugaaccugcuggaggacaagcacaacggcaagcugugcaagcugagaggcguggccccccugcaccugggcaagugcaacaucgccggcuggauccugggcaaccccgagugcgagagccugagcaccgccagcagcuggagcuacaucguggagaccagcagcagcgacaacggcaccugcuaccccggcgacuucaucgacuacgaggagcugagagagcagcugagcagcgugagcagcuucgagagauucgagaucuuccccaagaccagcagcuggcccaaccacgacagcaacaagggcgugaccgccgccugcccccacgccggcgccaagagcuucuacaagaaccugaucuggcuggugaagaagggcaacagcuaccccaagcugagcaagagcuacaucaacgacaagggcaaggaggugcuggugcuguggggcauccaccaccccagcaccagcgccgaccagcagagccuguaccagaacgccgacgccuacguguucgugggcaccagcagauacagcaagaaguucaagcccgagaucgccaucagacccaaggugagagaccaggagggcagaaugaacuacuacuggaccgugguggagcccggcgacaagaucaccuucgaggccaccggcaaccugguggugcccagauacgccuucgccauggagagaaacgccggcagcggcaucaucaucagcgacacccccgugcacgacugcaacaccaccugccagacccccaagggcgccaucaacaccagccugcccuuccagaacauccaccccaucaccaucggcaagugccccaaguacgugaagagcaccaagcugagacuggccaccggccugagaaacgugcccagcauccagagcagaggccuguucggcgccaucgccggcuucaucgagggcggcuggaccggcaugguggacggcugguacggcuaccaccaccagaacgagcagggcagcggcuacgccgccgaccugaagagcacccagaacgccaucgacgagaucaccaacaaggugaacagcgugaucgagaagaugaacacccaguucaccgccgugggcaaggaguucaaccaccuggagaagagaaucgagaaccugaacaagaagguggacgacggcuuccuggacaucuggaccuacaacgccgagcugcuggugcugcuggagaacgagagaacccuggacuaccacgacagcaacgugaagaaccuguacgagaaggugagaagccagcugaagaacaacgccaaggagaucggcaacggcugcuucgaguucuaccacaagugcgacaacaccugcauggagagcgugaagaacggcaccuacgacuaccccaaguacagcgaggaggccaagcugaacagagaggagaucgacggcgugaagcuggagagcaccagaaucuaccagauccuggccaucuacagcaccguggccagcagccuggugcugguggugagccugggcgccaucagcuucuggaugugcagcaacggcagccugcagugcagaaucugcaucuga

SEQ ID NO: 167386 - RNA, 1701 nt, Artificial Sequence
  derived and/or modified CDS sequence (opt4) from hemagglutinin__InfluenzaA__AEO01226
augaaggccauccugguggugcugcuguacaccuucgccaccgccaacgccgacacccugugcaucggcuaccacgccaacaacagcaccgacaccguggacaccgugcuggagaagaacgugaccgugacccacagcgugaaccugcuggaggacaagcacaacggcaagcugugcaagcugagaggcguggccccccugcaccugggcaagugcaacaucgccggcuggauccugggcaaccccgagugcgagagccugagcaccgccagcagcuggagcuacaucguggagaccagcagcagcgacaacggcaccugcuaccccggcgacuucaucgacuacgaggagcugagagagcagcugagcagcgugagcagcuucgagagauucgagaucuuccccaagaccagcagcuggcccaaccacgacagcaacaagggcgugaccgccgccugcccccacgccggcgccaagagcuucuacaagaaccugaucuggcuggugaagaagggcaacagcuaccccaagcugagcaagagcuacaucaacgacaagggcaaggaggugcuggugcuguggggcauccaccaccccagcaccagcgccgaccagcagagccuguaccagaacgccgacgccuacguguucgugggcaccagcagauacagcaagaaguucaagcccgagaucgccaucagacccaaggugagagaccaggagggcagaaugaacuacuacuggacccugguggagcccggcgacaagaucaccuucgaggccaccggcaaccugguggugcccagauacgccuucgccauggagagaaacgacggcagcggcaucaucaucagcgacacccccgugcacgacugcaacaccaccugccagacccccaagggcgccaucaacaccagccugcccuuccagaacauccaccccaucaccaucggcaagugccccaaguacgugaagagcaccaagcugagacuggccaccggccugagaaacgugcccagcauccagagcagaggccuguucggcgccaucgccggcuucaucgagggcggcuggaccggcaugguggacggcugguacggcuaccaccaccagaacgagcagggcagcggcuacgccgccgaccugaagagcacccagaacgccaucgacgagaucaccaacaaggugaacagcgugaucgagaagaugaacacccaguucaccgccgugggcaaggaguucaaccaccuggagaagagaaucgagaaccugaacaagaagguggacgacggcuuccuggacaucuggaccuacaacgccgagcugcuggugcugcuggagaacgagagaacccuggacuaccacgacagcaacgugaagaaccuguacgagaaggugagaagccagcugaagaacaacgccaaggagaucggcaacggcugcuucgaguucuaccacaagugcgacaacaccugcauggagagcgugaagaacggcaccuacgacuaccccaaguacagcgaggaggccaagcugaacagagaggagaucgacggcgugaagcuggagagcaccagaaucuaccagauccuggccaucuacagcaccguggccagcagccuggugcugguggugagccugggcgccaucagcuucuggaugugcagcaacggcagccugcagugcagaaucugcaucuga

SEQ ID NO: 167387 - RNA, 1701 nt, Artificial Sequence; identical to SEQ ID NO: 164896
  derived and/or modified CDS sequence (opt4) from hemagglutinin__InfluenzaA__AEO01227

SEQ ID NO: 167388 - RNA, 1701 nt, Artificial Sequence; identical to SEQ ID NO: 162729
  derived and/or modified CDS sequence (opt4) from hemagglutinin__InfluenzaA__AEO01228

SEQ ID NO: 167389 - RNA, 1701 nt, Artificial Sequence; identical to SEQ ID NO: 162729
  derived and/or modified CDS sequence (opt4) from hemagglutinin__InfluenzaA__AEO01229

SEQ ID NO: 167390 - RNA, 1701 nt, Artificial Sequence
  derived and/or modified CDS sequence (opt4) from hemagglutinin__InfluenzaA__AEO01230
augaaggccauccugguggugcugcuguacaccuucgccaccgccaacgccgacacccugugcaucggcuaccacgccaacaacagcaccgacaccguggacaccgugcuggagagaaacgugaccgugacccacagcgugaaccugcuggaggacaagcacaacggcaagcugugcaagcugagaggcguggccccccugcaccugggcaagugcaacaucgccggcuggauccugggcaaccccgagugcgagagccugagcaccgccagcagcuggagcuacaucguggagaccagcagcagcgacaacggcaccugcuaccccggcgacuucaucgacuacgaggagcugagagagcagcugagcagcgugagcagcuucgagagauucgagaucuuccccaagaccagcagcuggcccaaccacgacagcaacaagggcgugaccgccgccugcccccacgccggcgccaagagcuucuacaagaaccugaucuggcuggugaagaagggcaacagcuaccccaagcugagcaagagcuacaucaacgacaagggcaaggaggugcuggugcuguggggcauccaccaccccagcaccagcgccgaccagcagagccuguaccagaacgccgacgccuacguguucgugggcaccagcagauacagcaagaaguucaagcccgagaucgccaucagacccaaggugagagaccaggagggcagaaugaacuacuacuggacccugguggagcccggcgacaagaucaccuucgaggccaccggcaaccugguggugcccagauacgccuucgccauggagagaaacgccggcagcggcaucaucaucagcgacacccccgugcacgacugcaacaccaccugccagacccccaagggcgccaucaacaccagccugcccuuccagaacauccaccccaucaccaucggcaagugccccaaguacgugaagagcaccaagcugagacuggccaccggccugagaaacgugcccagcauccagagcagaggccuguucggcgccaucgccggcuucaucgagggcggcuggaccggcaugguggacggcugguacggcuaccaccaccagaacgagcagggcagcggcuacgccgccgaccugaagagcacccagaacgccaucgacgagaucaccaacaaggugaacagcgugaucgagaagaugaacacccaguucaccgccgugggcaaggaguucaaccaccuggagaagagaaucgagaaccugaacaagaagguggacgacggcuuccuggacaucuggaccuacaacgccgagcugcuggugcugcuggagaacgagagaacccuggacuaccacgacagcaacgugaagaaccuguacgagaaggugagaagccagcugaagaacaacgccaaggagaucggcaacggcugcuucgaguucuaccacaagugcgacaacaccugcauggagagcgugaagaacggcaccuacgacuaccccaaguacagcaaggaggccaagcugaacagagaggagaucgacggcgugaagcuggagagcaccagaaucuaccagauccuggccaucuacagcaccguggccagcagccuggugcugguggugagccugggcgccaucagcuucuggaugugcagcaacggcagccugcagugcagaaucugcaucuga

SEQ ID NO: 167391 - RNA, 1701 nt, Artificial Sequence; identical to SEQ ID NO: 162729
  derived and/or modified CDS sequence (opt4) from hemagglutinin__InfluenzaA__AEO01231

SEQ ID NO: 167392 - RNA, 1701 nt, Artificial Sequence; identical to SEQ ID NO: 163082
  derived and/or modified CDS sequence (opt4) from hemagglutinin__InfluenzaA__AEO01232

SEQ ID NO: 167393 - RNA, 1701 nt, Artificial Sequence; identical to SEQ ID NO: 162729
  derived and/or modified CDS sequence (opt4) from hemagglutinin__InfluenzaA__AEO01233

SEQ ID NO: 167394 - RNA, 1701 nt, Artificial Sequence; identical to SEQ ID NO: 162729
  derived and/or modified CDS sequence (opt4) from hemagglutinin__InfluenzaA__AEO01234

SEQ ID NO: 167395 - RNA, 1701 nt, Artificial Sequence; identical to SEQ ID NO: 162729
  derived and/or modified CDS sequence (opt4) from hemagglutinin__InfluenzaA__AEO01235

SEQ ID NO: 167396 - RNA, 1701 nt, Artificial Sequence; identical to SEQ ID NO: 166601
  derived and/or modified CDS sequence (opt4) from hemagglutinin__InfluenzaA__AEO01236

SEQ ID NO: 167397 - RNA, 1701 nt, Artificial Sequence; identical to SEQ ID NO: 162729
  derived and/or modified CDS sequence (opt4) from hemagglutinin__InfluenzaA__AEO01237

SEQ ID NO: 167398 - RNA, 1701 nt, Artificial Sequence; identical to SEQ ID NO: 162729
  derived and/or modified CDS sequence (opt4) from hemagglutinin__InfluenzaA__AEO01238

SEQ ID NO: 167399 - RNA, 1701 nt, Artificial Sequence; identical to SEQ ID NO: 162729
  derived and/or modified CDS sequence (opt4) from hemagglutinin__InfluenzaA__AEO01240

SEQ ID NO: 167400 - RNA, 1701 nt, Artificial Sequence; identical to SEQ ID NO: 163082
  derived and/or modified CDS sequence (opt4) from hemagglutinin__InfluenzaA__AEO01241

SEQ ID NO: 167401 - RNA, 1701 nt, Artificial Sequence; identical to SEQ ID NO: 162729
  derived and/or modified CDS sequence (opt4) from hemagglutinin__InfluenzaA__AEO01242

SEQ ID NO: 167402 - RNA, 1701 nt, Artificial Sequence
  derived and/or modified CDS sequence (opt4) from hemagglutinin__InfluenzaA__AEO01244
augaaggccauccugguggugcugcuguacaccuucgccaccgccaacgccgacacccugugcaucggcuaccacgccaacaacagcaccgacaccguggacaccgugcuggagaagaacgugaccgugacccacagcgugaaccugcuggaggacaagcacaacggcaagcugugcaagcugagaggcguggccccccugcaccugggcaagugcaacaucgccggcuggauccugggcaaccccgagugcgagagccugagcaccgccagcagcuggagcuacaucguggagaccagcagcagcgacaacggcaccugcuaccccggcgacuucaucgacuacgaggagcugagagagcagcugagcagcgugagcagcuucgagagauucgagaucuuccccaagaccagcagcuggcccaaccacgacagcaacaagggcgugaccgccgccugcccccacgccggcgccaagagcuucuacaagaaccugaucuggcuggugaagaagggcaacagcuaccccaagcugagcaagagcuacaucaacgacaagggcaaggaggugcuggugcuguggggcauccaccaccccagcaccagcgccgaccagcagagccuguaccagaacgccgacgccuacguguucgugggcaccagcaaguacagcaagaaguucaagcccgagaucgccaucagacccaaggugagaggccaggagggcagaaugaacuacuacuggacccugguggagcccggcgacaagaucaccuucgaggccaccggcaaccugguggugcccagauacgccuucgccauggagagaaacgccggcagcggcaucaucaucagcgacacccccgugcacgacugcaacaccaccugccagacccccaagggcgccaucaacaccagccugcccuuccagaacauccaccccaucaccaucggcaagugccccaaguacgugaagagcaccaagcugagacuggccaccggccugagaaacgugcccagcauccagagcagaggccuguucggcgccaucgccggcuucaucgagggcggcuggaccggcaugguggacggcugguacggcuaccaccaccagaacgagcagggcagcggcuacgccgccgaccugaagagcacccagaacgccaucgacgagaucaccaacaaggugaacagcgugaucgagaagaugaacacccaguucaccgccgugggcaaggaguucaaccaccuggagaagagaaucgagaaccugaacaagaagguggacgacggcuuccuggacaucuggaccuacaacgccgagcugcuggugcugcuggagaacgagagaacccuggacuaccacgacagcaacgugaagaaccuguacgagaaggugagaagccagcugaagaacaacgccaaggagaucggcaacggcugcuucgaguucuaccacaagugcgacaacaccugcauggagagcgugaagaacggcaccuacgacuaccccaaguacagcgaggaggccaagcugaacagagaggagaucgacggcgugaagcuggagagcaccagaaucuaccagauccuggccaucuacagcaccguggccagcagccuggugcugguggugagccugggcgccaucagcuucuggaugugcagcaacggcagccugcagugcagaaucugcaucuga

SEQ ID NO: 167403 - RNA, 1701 nt, Artificial Sequence; identical to SEQ ID NO: 162729
  derived and/or modified CDS sequence (opt4) from hemagglutinin__InfluenzaA__AEO01245

SEQ ID NO: 167404 - RNA, 1701 nt, Artificial Sequence
  derived and/or modified CDS sequence (opt4) from hemagglutinin__InfluenzaA__AEO01247
augaaggccauccugguggugcugcuguacaccuucgccaccgccaacgccgacacccugugcaucggcuaccacgccaacaacagcaccgacaccguggacaccgugcuggagaagaacgugaccgugacccacagcgugaaccugcuggaggacaagcacaacggcaagcugugcaagcugagaggcguggccccccugcaccugggcaagugcaacaucgccggcuggauccugggcaaccccgagugcgagagccugagcaccgccagcagcuggagcuacaucguggagaccagcagcagcgacaacggcaccugcuaccccggcgacuucaucgacuacgaggagcugagagagcagcugagcagcgugagcagcuucgagagauucgagaucuuccccaagaccagcagcuggcccaaccacgacagcaacaagggcgugaccgccgccugcccccacgccggcgccaagagcuucuacaagaaccugaucuggcuggugaagaagggcaacagcuaccccaagcugagcaagagcuacaucaacgacaagggcaaggaggugcuggugcuguggggcauccaccaccccagcaccagcgccgaccagcagagccuguaccagaacgccgacgccuacguguucgugggcaccagcagauacagcaagaaguucaagcccgagaucgccaucagacccaaggugagagaccaggagggcagaaugaacuacuacuggacccugguggagcccggcgacaagaucaccuucgaggccaccggcaaccugguggugcccagauacgccuucgccauggagagaaacgccggcagcggcauccugaucagcgacacccccgugcacgacugcaacaccaccugccagacccccaagggcgccaucaacaccagccugcccuuccagaacauccaccccaucaccaucggcaagugccccaaguacgugaagagcaccaagcugagacuggccaccggccugagaaacgugcccagcauccagagcagaggccuguucggcgccaucgccggcuucaucgagggcggcuggaccggcaugguggacggcugguacggcuaccaccaccagaacgagcagggcagcggcuacgccgccgaccugaagagcacccagcacgccaucgacgagaucaccaacaaggugaacagcgugaucgagaagaugaacacccaguucaccgccgugggcaaggaguucaaccaccuggagaagagaaucgagaaccugaacaagaagguggacgacggcuuccuggacaucuggaccuacaacgccgagcugcuggugcugcuggagaacgagagaacccuggacuaccacgacagcaacgugaagaaccuguacgagaaggugagaagccagcugaagaacaacgccaaggagaucggcaacggcugcuucgaguucuaccacaagugcgacaacaccugcauggagagcgugaagaacggcaccuacgacuaccccaaguacagcgaggaggccaagcugaacagagaggagaucgacggcgugaagcuggagagcaccagaaucuaccagauccuggccaucuacagcaccguggccagcagccuggugcugguggugagccugggcgccaucagcuucuggaugugcagcaacggcagccugcagugcagaaucugcaucuga

SEQ ID NO: 167405 - RNA, 1701 nt, Artificial Sequence; identical to SEQ ID NO: 162729
  derived and/or modified CDS sequence (opt4) from hemagglutinin__InfluenzaA__AEO01248

SEQ ID NO: 167406 - RNA, 1701 nt, Artificial Sequence; identical to SEQ ID NO: 162729
  derived and/or modified CDS sequence (opt4) from hemagglutinin__InfluenzaA__AEO01249

SEQ ID NO: 167407 - RNA, 1701 nt, Artificial Sequence
  derived and/or modified CDS sequence (opt4) from hemagglutinin__InfluenzaA__AEO01250
augaaggccauccugguggugcugcuguacaccuucgccaccgccaacgccgacacccugugcaucggcuaccacgccaacaacagcaccgacaccguggacaccgugcuggagaagaacgugaccgugacccacagcgugaaccugcuggaggacaagcacaacggcaagcugugcaagcugagaggcguggccccccugcaccugggcaagugcaacaucgccggcuggauccugggcaaccccgagugcgagagccugagcaccgccagcagcuggagcuacaucguggagaccagcagcagcgacaacggcaccugcuaccccggcgacuucaucgacuacgaggagcugagagagcagcugagcagcgugagcagcuucgagagauucgagaucuuccccaagaccagcagcuggcccaaccacgacagcaacaagggcgugaccgccgccugcccccacgccggcgccaagagcuucuacaagaaccugaucuggcuggugaagaagggcaacagcuaccccaagcugagcaagagcuacaucaacgacaagggcaaggaggugcuggugcuguggggcauccaccaccccagcaccagcgccgaccagcagagccuguaccagaacgaggacgccuacguguucgugggcaccagcagauacagcaagaaguucaagcccgagaucgccaucagacccaaggugagagaccaggagggcagaaugaacuacuacuggacccugguggagcccggcgacaagaucaccuucgaggccaccggcaaccugguggugcccagauacgccuucgccauggagagaaacgccggcagcggcaucaucaucagcgacacccccgugcacgacugcaacaccaccugccagacccccaagggcgccaucaacaccagccugcccuuccagaacauccaccccaucaccaucggcaagugccccaaguacgugaagagcaccaagcugagacuggccaccggccugagaaacgugcccagcauccagagcagaggccuguucggcgccaucgccggcuucaucgagggcggcuggaccggcaugguggacggcugguacggcuaccaccaccagaacgagcagggcagcggcuacgccgccgaccugaagagcacccagaacgccaucgacgagaucaccaacaaggugaacagcgugaucgagaagaugaacacccaguucaccgccgugggcaaggaguucaaccaccuggagaagagaaucgagaaccugaacaagaagguggacgacggcuuccuggacaucuggaccuacaacgccgagcugcuggugcugcuggagaacgagagaacccuggacuaccacgacagcaacgugaagaaccuguacgagaaggugagaagccagcugaagaacaacgccaaggagaucggcaacggcugcuucgaguucuaccacaagugcgacaacaccugcauggagagcgugaagaacggcaccuacgacuaccccaaguacagcgaggaggccaagcugaacagagaggagaucgacggcgugaagcuggagagcaccagaaucuaccagauccuggccaucuacagcaccguggccagcagccuggugcugguggugagccugggcgccaucagcuucuggaugugcagcaacggcagccugcagugcagaaucugcaucuga

SEQ ID NO: 167408 - RNA, 1701 nt, Artificial Sequence; identical to SEQ ID NO: 164326
  derived and/or modified CDS sequence (opt4) from hemagglutinin__InfluenzaA__AEO01251

SEQ ID NO: 167409 - RNA, 1701 nt, Artificial Sequence; identical to SEQ ID NO: 162729
  derived and/or modified CDS sequence (opt4) from hemagglutinin__InfluenzaA__AEO01252

SEQ ID NO: 167410 - RNA, 1701 nt, Artificial Sequence; identical to SEQ ID NO: 162729
  derived and/or modified CDS sequence (opt4) from hemagglutinin__InfluenzaA__AEO01253

SEQ ID NO: 167411 - RNA, 1701 nt, Artificial Sequence
  derived and/or modified CDS sequence (opt4) from hemagglutinin__InfluenzaA__AEO01254
augaaggccauccugguggugcugcuguacaccuucgccaccgccaacgccgacacccugugcaucggcuaccacgccaacaacagcaccgacaccguggacaccgugcuggagaagaacgugaccgugacccacagcgugaaccugcuggaggacaagcacaacggcaagcugugcaagcugagaggcguggccccccugcaccugggcaagugcaacaucgccggcuggauccugggcaaccccgagugcgagagccugagcaccgccagcagcuggagcuacaucguggagaccagcagcagcgacaacggcaccugcuaccccggcgacuucaucgacuacgaggagcugagagagcagcugagcagcgugagcagcuucgagagauucgagaucuuccccaagaccagcagcuggcccaaccacgacagcaacaagggcgugaccgccgccugcccccacgccggcgccaagagcuucuacaagaaccugaucuggcuggugaagaagggcaacagcuaccccaagcugagcaagagcuacaucaacaacaagggcaaggaggugcuggugcuguggggcauccaccaccccagcaccagcgccgaccagcagagccuguaccagaacgccgacgccuacguguucgugggcaccagcagauacagcaagaaguucaagcccgagaucgccaucagacccaaggugagagaccaggagggcagaaugaacuacuacuggacccugguggagcccggcgacaagaucaccuucgaggccaccggcaaccugguggugcccagauacgccuucgccauggagagaaacgccggcagcggcaucaucaucagcgacacccccgugcacgacugcaacaccaccugccagacccccaagggcgccaucaacaccagccugcccuuccagaacauccaccccaucaccaucggcaagugccccaaguacgugaagagcaccaagcugagacuggccaccggccugagaaacgugcccagcauccagagcagaggccuguucggcgccaucgccggcuucaucgagggcggcuggaccggcaugguggacggcugguacggcuaccaccaccagaacgagcagggcagcggcuacgccgccgaccugaagagcacccagaacgccaucgacaagaucaccaacaaggugaacagcgugaucgagaagaugaacacccaguucaccgccgugggcaaggaguucaaccaccuggagaagagaaucgagaaccugaacaagaagguggacgacggcuuccuggacaucuggaccuacaacgccgagcugcuggugcugcuggagaacgagagaacccuggacuaccacgacagcaacgugaagaaccuguacgagaaggugagaagccagcugaagaacaacgccaaggagaucggcaacggcugcuucgaguucuaccacaagugcgacaacaccugcauggagagcgugaagaacggcaccuacgacuaccccaaguacagcgaggaggccaagcugaacagagaggagaucgacggcgugaagcuggagagcaccagaaucuaccagauccuggccaucuacagcaccguggccagcagccuggugcugguggugagccugggcgccaucagcuucuggaugugcagcaacggcagccugcagugcagaaucugcaucuga

SEQ ID NO: 167412 - RNA, 1701 nt, Artificial Sequence; identical to SEQ ID NO: 163176
  derived and/or modified CDS sequence (opt4) from hemagglutinin__InfluenzaA__AEO01256

SEQ ID NO: 167413 - RNA, 1701 nt, Artificial Sequence; identical to SEQ ID NO: 166148
  derived and/or modified CDS sequence (opt4) from hemagglutinin__InfluenzaA__AEO01257

SEQ ID NO: 167414 - RNA, 1701 nt, Artificial Sequence; identical to SEQ ID NO: 162729
  derived and/or modified CDS sequence (opt4) from hemagglutinin__InfluenzaA__AEO01258

SEQ ID NO: 167415 - RNA, 1701 nt, Artificial Sequence; identical to SEQ ID NO: 167411
  derived and/or modified CDS sequence (opt4) from hemagglutinin__InfluenzaA__AEO01259

SEQ ID NO: 167416 - RNA, 1701 nt, Artificial Sequence; identical to SEQ ID NO: 165284
  derived and/or modified CDS sequence (opt4) from hemagglutinin__InfluenzaA__AEO01260

SEQ ID NO: 167417 - RNA, 1701 nt, Artificial Sequence
  derived and/or modified CDS sequence (opt4) from hemagglutinin__InfluenzaA__AEO01261
augaaggccauccugguggugcugcuguacaccuucgccaccgccaacgccgacacccugugcaucggcuaccacgccaacaacagcaccgacaccguggacaccgugcuggagaagaacgugaccgugacccacagcgugaaccugcuggaggacaagcacaacggcaagcugugcaagcugagaggcguggccccccugcaccugggcaagugcaacaucgccggcuggauccugggcaaccccgagugcgagagccugagcaccgccagcagcuggagcuacaucguggagaccagcagcagcgacaacggcaccugcuaccccggcgacuucaucgacuacgaggagcugagagagcagcugagcagcgugagcagcuucgagagauucgagaucuuccccaagaccagcagcuggcccaaccacgacagcaacaagggcgugaccgccgccugcccccacgccggcgccaagagcuucuacaagaaccugaucuggcuggugaagaagggcaacagcuaccccaagcugagcaagagcuacaucaacgacaagggcaaggaggugcuggugcuguggggcauccaccaccccagcaccagcgccgaccagcagagccuguaccagaacgccgacgccuacguguucgugggcaccagcagauacagcaagaaguucaagcccgagaucgccaucagacccaaggugagagaccaggagggcagaaugaacuacuacuggacccugguggagcccggcgacaagaucaccuucgaggccaccggcaaccugguggugcccagauacgccuucgccauggagagaaacgccggcagcggcaucaucaucagcgacacccccgugcacgacugcaacaccaccugccagacccccaagggcgccaucaacaccagccugcccuuccagaacauccaccccaucaccaucggcaagugccccaaguacgugaagagcaccaagcugagaauggccaccggccugagaaacgugcccagcauccagagcagaggccuguucggcgccaucgccggcuucaucgagggcggcuggaccggcaugguggacggcugguacggcuaccaccaccagaacgagcagggcagcggcuacgccgccgaccugaagagcacccagaacgccaucgacgagaucaccaacaaggugaacagcgugaucgagaagaugaacacccaguucaccgccgugggcaaggaguucaaccaccuggagaagagaaucgagaaccugaacaagaagguggacgacggcuuccuggacaucuggaccuacaacgccgagcugcuggugcugcuggagaacgagagaacccuggacuaccacgacagcaacgugaagaaccuguacgagaaggugagaagccagcugaagaacaacgccaaggagaucggcaacggcugcuucgaguucuaccacaagugcgacaacaccugcauggagagcgugaagaacggcaccuacgacuaccccaaguacagcgaggaggccaagcugaacagagaggagaucgacggcgugaagcuggagagcaccggcaucuaccagauccuggccaucuacagcaccguggccagcagccuggugcugguggugagccugggcgccaucagcuucuggaugugcagcaacggcagccugcagugcagaaucugcaucuga

SEQ ID NO: 167418 - RNA, 1701 nt, Artificial Sequence; identical to SEQ ID NO: 162729
  derived and/or modified CDS sequence (opt4) from hemagglutinin__InfluenzaA__AEO01262

SEQ ID NO: 167419 - RNA, 1701 nt, Artificial Sequence; identical to SEQ ID NO: 164411
  derived and/or modified CDS sequence (opt4) from hemagglutinin__InfluenzaA__AEO01263

SEQ ID NO: 167420 - RNA, 1701 nt, Artificial Sequence; identical to SEQ ID NO: 163082
  derived and/or modified CDS sequence (opt4) from hemagglutinin__InfluenzaA__AEO01264

SEQ ID NO: 167421 - RNA, 1701 nt, Artificial Sequence; identical to SEQ ID NO: 162729
  derived and/or modified CDS sequence (opt4) from hemagglutinin__InfluenzaA__AEO01265

SEQ ID NO: 167422 - RNA, 1701 nt, Artificial Sequence
  derived and/or modified CDS sequence (opt4) from hemagglutinin__InfluenzaA__AEO01266
augaaggccauccugguggugcugcuguacaccuucgccaccgccaacgccgacacccugugcaucggcuaccacgccaacaacagcaccgacaccguggacaccgugcuggagaagaacgugaccgugacccacagcgugaaccugcuggaggacaagcacaacggcaagcugugcaagcugagaggcguggccccccugcaccugggcaagugcaacaucgccggcuggauccugggcaaccccgagugcgagagccugagcaccgccagcagcuggagcuacaucguggagaccagcagcagcgacaacggcaccugcuaccccggcgacuucaucgacuacgaggagcugagagagcagcugagcagcgugagcagcuucgagagauucgagaucuuccccaagaccagcagcuggcccaaccacgacagcaacaagggcgugaccgccgccugcccccacgccggcgccaagagcuucuacaagaaccugaucuggcuggugaagaagggcaacagcuaccccaagcugagcaagagcuacaucaacgacaagggcaaggaggugcuggugcuguggggcauccaccaccccagcaccagcgccgaccagcagagccuguaccagaacgccgacgccuacguguucgugggcaccagcagauacagcaagaaguucaagcccgagaucgccaucagacccaaggugagaggccaggagggcagaaugaacuacuacuggacccugguggagcccggcgacaagaucaccuucgaggccaccggcaaccugguggugcccagauacgccuucgccauggagagaaacgccggcagcggcaucaucaucagcgacgcccccgugcacgacugcaacaccaccugccagacccccaagggcgccaucaacaccagccugcccuuccagaacauccaccccaucaccaucggcaagugccccaaguacgugaagagcaccaagcugagacuggccaccggccugagaaacgugcccagcauccagagcagaggccuguucggcgccaucgccggcuucaucgagggcggcuggaccggcaugguggacggcugguacggcuaccaccaccagaacgagcagggcagcggcuacgccgccgaccugaagagcacccagaacgccaucgacgagaucaccaacaaggugaacagcgugaucgagaagaugaacacccaguucaccgccgugggcaaggaguucaaccaccuggagaagagaaucgagaaccugaacaagaagguggacgacggcuuccuggacaucuggaccuacaacgccgagcugcuggugcugcuggagaacgagagaacccuggacuaccacgacagcaacgugaagaaccuguacgagaaggugagaagccagcugaagaacaacgccaaggagaucggcaacggcugcuucgaguucuaccacaagugcgacaacaccugcauggagagcgugaagaacggcaccuacgacuaccccaaguacagcgaggaggccaagcugaacagagaggagaucgacggcgugaagcuggagagcaccagaaucuaccagauccuggccaucuacagcaccguggccagcagccuggugcugguggugagccugggcgccaucagcuucuggaugugcagcaacggcagccugcagugcagaaucugcaucuga

SEQ ID NO: 167423 - RNA, 1701 nt, Artificial Sequence; identical to SEQ ID NO: 162729
  derived and/or modified CDS sequence (opt4) from hemagglutinin__InfluenzaA__AEO01267

SEQ ID NO: 167424 - RNA, 1701 nt, Artificial Sequence; identical to SEQ ID NO: 162729
  derived and/or modified CDS sequence (opt4) from hemagglutinin__InfluenzaA__AEO01268

SEQ ID NO: 167425 - RNA, 1701 nt, Artificial Sequence
  derived and/or modified CDS sequence (opt4) from hemagglutinin__InfluenzaA__AEO01269
augaaggccauccugguggugcugcuguacaccuucgccaccgccaacgccgacacccugugcaucggcuaccacgccaacaacagcaccgacaccguggacaccgugcuggagaagaacgugaccgugacccacagcgugaaccugcuggaggacaagcacaacggcaagcugugcaagcugagaggcguggccccccugcaccugggcaagugcaacaucgccggcuggauccugggcaaccccgagugcgagagccugagcaccgccagcagcuggagcuacaucguggagaccagcagcagcgacaacggcaccugcuaccccggcgacuucaucgacuacgaggagcugagagagcagcugagcagcgugagcagcuucgagagauucgagaucuuccccaagaccagcagcuggcccaaccacgacagcaacaagggcgugaccgccgccugcccccacgccggcgccaagagcuucuacaagaaccugaucuggcuggugaagaagggcaacagcuaccccaagcugagcaagagcuacaucaacgacaagggcaaggaggugcuggugcuguggggcauccaccaccccagcaccagcgccgaccagcagagccuguaccagaacgccgacgccuacguguucgugggcaccagcagauacagcaagaaguucaagcccgagaucgccaucagacccaaggugagagagcaggagggcagaaugaacuacuacuggacccugguggagcccggcgacaagaucaccuucgaggccaccggcaaccugguggugcccagauacgccuucgccauggagagaaacgccggcagcggcaucgugaucagcgacacccccgugcacgacugcaacaccaccugccagacccccaagggcgccaucaacaccagccugcccuuccagaacauccaccccaucaccaucggcaagugccccaaguacgugaagagcaccaagcugagacuggccaccggccugagaaacgugcccagcauccagagcagaggccuguucggcgccaucgccggcuucaucgagggcggcuggaccggcaugguggacggcugguacggcuaccaccaccagaacgagcagggcagcggcuacgccgccgaccugaagagcacccagaacgccaucgacgagaucaccaacaaggugaacagcgugaucgagaagaugaacacccaguucaccgccgugggcaaggaguucaaccaccuggagaagagaauggagaaccugaacaagaagguggacgacggcuuccuggacaucuggaccuacaacgccgagcugcuggugcugcuggagaacgagagaacccuggacuaccacgacagcaacgugaagaaccuguacgagaaggugagaagccagcugaagaacaacgccaaggagaucggcaacggcugcuucgaguucuaccacaagugcgacaacaccugcauggagagcgugaagaacggcaccuacgacuaccccaaguacagcgaggaggccaagcugaacagagaggagaucgacggcgugaagcuggagagcaccagaaucuaccagauccuggccaucuacagcaccguggccagcagccuggugcugguggugagccugggcgccaucagcuucuggaugugcagcaacggcagccugcagugcagaaucugcaucuga

SEQ ID NO: 167426 - RNA, 1701 nt, Artificial Sequence; identical to SEQ ID NO: 163893
  derived and/or modified CDS sequence (opt4) from hemagglutinin__InfluenzaA__AEO01270

SEQ ID NO: 167427 - RNA, 1701 nt, Artificial Sequence
  derived and/or modified CDS sequence (opt4) from hemagglutinin__InfluenzaA__AEO01271
augaaggccauccugguggugcugcuguacaccuucgccaccgccaacgccgacacccugugcaucggcuaccacgccaacaacagcaccgacaccguggacaccgugcuggagaagaacgugaccgugacccacagcgugaaccugcuggaggacaagcacaacggcaagcugugcaagcugagaggcguggccccccugcaccugggcaagugcgacaucgccggcuggauccugggcaaccccgagugcgagagccugagcaccgccagcagcuggagcuacaucguggagacccccagcagcgacaacggcaccugcuaccccggcgacuucaucgacuacgaggagcugagagagcagcugagcagcgugagcagcuucgagagauucgagaucuuccccaagaccagcagcuggcccaaccacgacagcaacaagggcgugaccgccgccugcccccacgccggcgccaagagcuucuacaagaaccugaucuggcuggugaagaagggcaacagcuaccccaagcugagcaagagcuacaucaacgacaagggcaaggaggugcuggugcuguggggcauccaccaccccagcaccagcgccgaccagcagagccuguaccagaacgccgacgccuacguguucgugggcaccagcagauacagcaagaaguucaagcccgagaucgccaucagacccaaggugagagaccaggagggcagaaugaacuacuacuggacccugguggagcccggcgacaagaucaccuucgaggccaccggcaaccugguggugcccagauacgccuucgccauggagagaaacgccggcagcggcaucaucaucagcgacacccccgugcacgacugcaacaccaccugccagacccccaagggcgccaucaacaccagccugcccuuccagaacauccaccccaucaccaucggcaagugccccaaguacgugaagagcaccaagcugagacuggccaccggccugagaaacgugcccagcauccagagcagaggccuguucggcgccaucgccggcuucaucgagggcggcuggaccggcaugguggacggcugguacggcuaccaccaccagaacgagcagggcagcggcuacgccgccgaccugaagagcacccagcacgccaucgacgagaucaccaacaaggugaacagcgugaucgagaagaugaacacccaguucaccgccgugggcaaggaguucaaccaccuggagaagagaaucgagaaccugaacaagaagguggacgacggcuuccuggacaucuggaccuacaacgccgagcugcuggugcugcuggagaacgagagaacccuggacuaccacgacagcaacgugaagaaccuguacgagaaggugagaagccagcugaagaacaacgccaaggagaucggcaacggcugcuucgaguucuaccacaagugcgacaacaccugcauggagagcgugaagaacggcaccuacgacuaccccaaguacagcgaggaggccaagcugaacagagaggagaucgacggcgugaagcuggagagcaccagaaucuaccagauccuggccaucuacagcaccguggccagcagccuggugcugguggugagccugggcgccaucagcuucuggaugugcagcaacggcagccugcagugcagaaucugcaucuga

SEQ ID NO: 167428 - RNA, 1701 nt, Artificial Sequence; identical to SEQ ID NO: 162729
  derived and/or modified CDS sequence (opt4) from hemagglutinin__InfluenzaA__AEO01272

SEQ ID NO: 167429 - RNA, 1701 nt, Artificial Sequence; identical to SEQ ID NO: 162729
  derived and/or modified CDS sequence (opt4) from hemagglutinin__InfluenzaA__AEO01273

SEQ ID NO: 167430 - RNA, 1701 nt, Artificial Sequence; identical to SEQ ID NO: 162729
  derived and/or modified CDS sequence (opt4) from hemagglutinin__InfluenzaA__AEO01274

SEQ ID NO: 167431 - RNA, 1701 nt, Artificial Sequence; identical to SEQ ID NO: 164897
  derived and/or modified CDS sequence (opt4) from hemagglutinin__InfluenzaA__AEO01275

SEQ ID NO: 167432 - RNA, 1701 nt, Artificial Sequence
  derived and/or modified CDS sequence (opt4) from hemagglutinin__InfluenzaA__AEO01276
augaaggccauccugguggugcugcuguacaccuucgccaccgccaacgccgacacccugugcaucggcuaccacgccaacaacagcaccgacaccguggacaccgugcugaagaagaacgugaccgugacccacagcgugaaccugcuggaggacaagcacaacggcaagcugugcaagcugagaggcguggccccccugcaccugggcaagugcaacaucgccggcuggauccugggcaaccccgagugcgagagccugagcaccgccagcagcuggagcuacaucguggagaccagcagcagcgacaacggcaccugcuaccccggcgacuucaucgacuacgaggagcugagagagcagcugagcagcgugagcagcuucgagagauucgagaucuuccccaagaccagcagcuggcccaaccacgacagcaacaagggcgugaccgccgccugcccccacgccggcgccaagagcuucuacaagaaccugaucuggcuggugaagaagggcaacagcuaccccaagcugagcaagagcuacaucaacgacaagggcaaggaggugcuggugcuguggggcauccaccaccccagcaccagcgccgaccagcagagccuguaccagaacgccgacgccuacguguucgugggcaccagcagauacagcaagaaguucaagcccgagaucgccaucagacccaaggugagagaccaggagggcagaaugaacuacuacuggacccugguggagcccggcgacaagaucaccuucgaggccaccggcaaccugguggugcccagauacgccuucgccauggagagaaacgccggcagcggcaucaucaucagcgacacccccgugcacgacugcaacaccaccugccagacccccaagggcgccaucaacaccagccugcccuuccagaacauccaccccaucaccaucggcaagugccccaaguacgugaagagcaccaagcugagacuggccaccggccugagaaacgugcccagcauccagagcagaggccuguucggcgccaucgccggcuucaucgagggcggcuggaccggcaugguggacggcugguacggcuaccaccaccagaacgagcagggcagcggcuacgccgccgaccugaagagcacccagaacgccaucgacgagaucaccaacaaggugaacagcgugaucgagaagaugaacacccaguucaccgccgugggcaaggaguucaaccaccuggagaagagaaucgagaaccugaacaagaagguggacgacggcuuccuggacaucuggaccuacaacgccgagcugcuggugcugcuggagaacgagagaacccuggacuaccacgacagcaacgugaagaaccuguacgagaaggugagaagccagcugaagaacaacgccgaggagaucggcaacggcugcuucgaguucuaccacaagugcgacaacaccugcauggagagcgugaagaacggcaccuacgacuaccccaaguacagcgaggaggccaagcugaacagagaggagaucgacggcgugaagcuggagagcaccagaaucuaccagauccuggccaucuacagcaccguggccagcagccuggugcugguggugagccugggcgccaucagcuucuggaugugcagcaacggcagccugcagugcagaaucugcaucuga

SEQ ID NO: 167433 - RNA, 1701 nt, Artificial Sequence; identical to SEQ ID NO: 162729
  derived and/or modified CDS sequence (opt4) from hemagglutinin__InfluenzaA__AEO01277

SEQ ID NO: 167434 - RNA, 1701 nt, Artificial Sequence
  derived and/or modified CDS sequence (opt4) from hemagglutinin__InfluenzaA__AEO01278
augaaggccauccugguggugcugcuguacaccuucgccaccgccaacgccgacacccugugcaucggcuaccacgccaacaacagcaccgacaccguggacaccgugcuggagaagaacgugaccgugacccacagcgugaaccugcuggaggacaagcacaacggcaagcugugcaagcugagaggcguggccccccugcaccugggcaagugcgacaucgccggcuggauccugggcaaccccgagugcgagagccugagcaccgccagcagcuggagcuacaucguggagaccagcagcagcgacaacggcaccugcuaccccggcgacuucaucgacuacgaggagcugagagagcagcugagcagcgugagcagcuucgagagauucgagaucuuccccaagaccagcagcuggcccaaccacgacagcaacaagggcgugaccgccgccugcccccacgccggcgccaagagcuucuacaagaaccugaucuggcuggugaagaagggcaacagcuaccccaagcugagcaagagcuacaucaacgacaagggcaaggaggugcuggugcuguggggcauccaccaccccagcaccagcgccgaccagcagagccuguaccagaacgccgacgccuacguguucgugggcaccagcagauacagcaagaaguucaagcccgagaucgccaucagacccaaggugagagaccaggagggcagaaugaacuacuacuggacccugguggagcccggcgacaagaucaccuucgaggccaccggcaaccugguggugcccagauacgccuucgccauggagagaaacgccggcagcggcaucaucaucagcgacacccccgugcacgacugcaacaccaccugccagacccccaagggcgccaucaacaccagccugcccuuccagaacauccaccccaucaccaucggcaagugccccaaguacgugaagagcaccaagcugagacuggccaccggccugagaaacgugcccagcauccagagcagaggccuguucggcgccaucgccggcuucaucgagggcggcuggaccggcaugguggacggcugguacggcuaccaccaccagaacgagcagggcagcggcuacgccgccgaccugaagagcacccagcacgccaucgacgagaucaccaacaaggugaacagcgugaucgagaagaugaacacccaguucaccgccgugggcaaggaguucaaccaccuggagaagagaaucgccaaccugaacaagaagguggacgacggcuuccuggacaucuggaccuacaacgccgagcugcuggugcugcuggagaacgagagaacccuggacuaccacgacagcaacgugaagaaccuguacgagaaggugagaagccagcugaagaacaacgccaaggagaucggcaacggcugcuucgaguucuaccacaagugcgacaacaccugcauggagagcgugaagaacggcaccuacgacuaccccaaguacagcgaggaggccaagcugaacagagaggagaucgacggcgugaagcuggagagcaccagaaucuaccagauccuggccaucuacagcaccguggccagcagccuggugcugguggugagccugggcgccaucagcuucuggaugugcagcaacggcagccugcagugcagaaucugcaucuga

SEQ ID NO: 167435 - RNA, 1701 nt, Artificial Sequence
  derived and/or modified CDS sequence (opt4) from hemagglutinin__InfluenzaA__AEO01279
augaaggccauccugguggugcugcuguacaccuucgccaccgccaacgccgacacccugugcaucggcuaccacgccaacaacagcaccgacaccguggacaccgugcuggagaagaacgugaccgugacccacagcgugaaccugcuggaggacaagcacaacggcaagcugugcaagcugagaggcguggccccccugcaccugggcaagugcaacaucgccggcuggauccugggcaaccccgagugcgagagccugagcaccgccagcagcuggagcuacaucguggagaccagcagcagcgacaacggcaccugcuaccccggcgacuucaucgacuacgaggagcugagagagcagcugagcagcgugagcagcuucgagagauucgagaucuuccccaagaccagcagcuggcccaaccacgacagcaacaagggcgugaccgccgccugcccccacgccggcgccaagagcuucuacaagaaccugaucuggcuggugaagaagggcaacagcuaccccaagcugagcaagagcuacaucaacgacaagggcaaggaggugcuggugcuguggggcauccaccaccccagcaccagcgccgaccagcagagccuguaccagaacgccgacgccuacguguucgugggcaccagcagauacagcaagaaguucaagcccgagaucgccaucagacccaaggugagagaccaggagggcagaaugaacuacuacuggacccugguggagcccggcgacaagaucaccuucgaggccaccggcaaccugguggugcccagauacgccuucgccauggagagaaccgccggcagcggcaucaucaucagcgacacccccgugcacgacugcaacaccaccugccagacccccaagggcgccaucaacaccagccugcccuuccagaacauccaccccaucaccaucggcaagugccccaaguacgugaagagcaccaagcugagacuggccaccggccugagaaacgugcccagcauccagagcagaggccuguucggcgccaucgccggcuucaucgagggcggcuggaccggcaugguggacggcugguacggcuaccaccaccagaacgagcagggcagcggcuacgccgccgaccugaagagcacccagaacgccaucgacaagaucaccaacaaggugaacagcgugaucgagaagaugaacacccaguucaccgccgugggcaaggaguucaaccaccuggagaagagaaucgagaaccugaacaagaagguggacgacggcuuccuggacaucuggaccuacaacgccgagcugcuggugcugcuggagaacgagagaacccuggacuaccacgacagcaacgugaagaaccuguacgagaaggugagaagccagcugaagaacaacgccaaggagaucggcaacggcugcuucgaguucuaccacaagugcgacaacaccugcauggagagcgugaagaacggcaccuacgacuaccccaaguacagcgaggaggccaagcugaacagagaggagaucgacggcgugaagcuggagagcaccagaaucuaccagauccuggccaucuacagcaccguggccagcagccuggugcugguggugagccugggcgccaucagcuucuggaugugcagcaacggcagccugcagugcagaaucugcaucuga

SEQ ID NO: 167436 - RNA, 1701 nt, Artificial Sequence
  derived and/or modified CDS sequence (opt4) from hemagglutinin__InfluenzaA__AEO01282
augaaggccauccugguggugcugcuguacaccuucgccaccgccaacgccgacacccugugcaucggcuaccacgccaacaacagcaccgacaccguggacaccgugcuggagaagaacgugaccgugacccacagcgugaaccugcuggaggacaagcacaacggcaagcugugcaagcugagaggcguggccccccugcaccugggcaagugcaacaucgccggcuggauccugggcaaccccgagugcgagagccugagcaccgccagcagcuggagcuacaucguggagaccagcagcagcgacaacggcaccugcuaccccggcgacuucaucgacuacgaggagcugagagagcagcugagcagcgugagcagcuucgagagauucgagaucuuccccaagaccagcagcuggcccaaccacgacagcaacaagggcgugaccgccgccugcccccacgccggcgccaagagcuucuacaagaaccugaucuggcuggugaagaagggcaacagcuaccccaagcugagcaagagcuacaucaacgacaagggcaaggaggugcuggugcuguggggcauccaccaccccagcaccagcgccgaccagcagagccuguaccagaacgccgacgccuacguguucgugggcaccagcagauacagcaagaaguucaagcccgagaucgccaucagacccaaggugagagaccaggagggcagaaugaacuacuacuggacccugguggagcccggcgacaagaucaccuucgaggccaccggcaaccugguggugcccagauacgccuucgccauggagagaaacgccggcagcggcaucaucaucagcgacacccccgugcacgacugcaacaccaccugccagacccccaagggcgccaucaacaccagccugcccuuccagaacauccaccccaucaccaucggcaagugccccaaguacgugaagagcaccaagcugagacuggccaccggccugagaaacgugcccagcauccagagcagaggccuguucggcgccaucgccggcuucaucgagggcggcuggaccggcaugguggacggcugguacggcuaccaccaccagaacgagcagggcagcggcuacgccgccgaccugaagagcacccagaacgccaucgacgagaucaccaacaaggugaacagcgugaucgagaagaugaacacccaguucaccgccgugggcaaggaguucaaccaccuggagaagagaaucgagaaccugaacaagaagguggacgacggcuuccuggacaucuggaccuacaacgccgagcugcuggugcugcuggagaacgagagaacccuggacuaccacgacagcaacgugaagaagcuguacgagaaggugagaagccagcugaagaacaacgccaaggagaucggcaacggcugcuucgaguucuaccacaagugcaacaacaccugcauggagagcgugaagaacggcaccuacgacuaccccaaguacagcgaggaggccaagcugaacagagaggagaucgacggcgugaagcuggagagcaccagaaucuaccagauccuggccaucuacagcaccguggccagcagccuggugcugguggugagccugggcgccaucagcuucuggaugugcagcaacggcagccugcagugcagaaucugcaucuga

SEQ ID NO: 167437 - RNA, 1701 nt, Artificial Sequence; identical to SEQ ID NO: 163831
  derived and/or modified CDS sequence (opt4) from hemagglutinin__InfluenzaA__AEO01283

SEQ ID NO: 167438 - RNA, 1701 nt, Artificial Sequence
  derived and/or modified CDS sequence (opt4) from hemagglutinin__InfluenzaA__AEO01284
augaaggccauccugguggugcugcuguacaccuucgccaucgccaacgccgacacccugugcaucggcuaccacgccaacaacagcaccgacaccguggacaccgugcuggagaagaacgugaccgugacccacagcgugaaccugcuggaggacaagcacaacggcaagcugugcaagcugagaggcguggccccccugcaccugggcaagugcaacaucgccggcuggauccugggcaaccccgagugcgagagccugagcaccgccagcagcuggagcuacaucguggagaccagcagcagcgacaacggcaccugcuaccccggcgacuucaucgacuacgaggagcugagagagcagcugagcagcgugagcagcuucgagagauucgagaucuuccccaagaccagcagcuggcccaaccacgacagcaacaagggcgugaccgccgccugcccccacgccggcgccaagagcuucuacaagaaccugaucuggcuggugaagaagggcaacagcuaccccaagcugagcaagagcuacaucaacgacaagggcaaggaggugcuggugcuguggggcauccaccaccccagcaccagcgccgaccagcagagccuguaccagaacgccgacgccuacguguucgugggcaccagcagauacagcaagaaguucaagcccgagaucgccaucagacccaaggugagagaccaggagggcagaaugaacuacuacuggacccugguggagcccggcgacaagaucaccuucgaggccaccggcaaccugguggugcccagauacgccuucgccauggagagaaacgccggcagcggcaucaucaucagcgacacccccgugcacgacugcaacaccaccugccagacccccaagggcgccaucaacaccagccugcccuuccagaacauccaccccaucaccaucggcaagugccccaaguacgugaagagcaccaagcugagacuggccaccggccugagaaacgugcccagcauccagagcagaggccuguucggcgccaucgccggcuucaucgagggcggcuggaccggcaugguggacggcugguacggcuaccaccaccagaacgagcagggcagcggcuacgccgccgaccugaagagcacccagcacgccaucgacgagaucaccaacaaggugaacagcgugaucgagaagaugaacacccaguucaccgccgugggcaaggaguucaaccaccuggagaagagaaucgagaaccugaacaagaagguggacgacggcuuccuggacaucuggaccuacaacgccgagcugcuggugcugcuggagaacgagagaacccuggacuaccacgacagcaacgugaagaaccuguacgagaaggugagaagccagcugaagaacaacgccaaggagaucggcaacggcugcuucgaguucuaccacaagugcgacaacaccugcauggagagcgugaagaacggcaccuacgacuaccccaaguacagcgaggaggccaagcugaacagagaggagaucaacggcgugaagcuggagagcaccagaaucuaccagauccuggccaucuacagcaccguggccagcagccuggugcugguggugagccugggcgccaucagcuucuggaugugcagcaacggcagccugcagugcagaaucugcaucuga

SEQ ID NO: 167439 - RNA, 1701 nt, Artificial Sequence; identical to SEQ ID NO: 163830
  derived and/or modified CDS sequence (opt4) from hemagglutinin__InfluenzaA__AEO01285

SEQ ID NO: 167440 - RNA, 1701 nt, Artificial Sequence; identical to SEQ ID NO: 163923
  derived and/or modified CDS sequence (opt4) from hemagglutinin__InfluenzaA__AEO01286

SEQ ID NO: 167441 - RNA, 1701 nt, Artificial Sequence
  derived and/or modified CDS sequence (opt4) from hemagglutinin__InfluenzaA__AEO01287
augaaggccauccugguggugcugcuguacaccuucgccaccgccaacagcgacacccugugcaucggcuaccacgccaacaacagcaccgacaccguggacaccgugcuggagaagaacgugaccgugacccacagcgugaaccugcuggaggacaagcacaacggcaagcugugcaagcugagaggcguggccccccugcaccugggcaagugcaacaucgccggcuggauccugggcaaccccgagugcgagagccugagcaccgccagcagcuggagcuacaucguggagaccagcagcagcgacaacggcaccugcuaccccggcgacuucaucgacuacgaggagcugagagagcagcugagcagcgugagcagcuucgagagauucgagaucuuccccaagaccagcagcuggcccaaccacgacagcaacaagggcgugaccgccgccugcccccacgccggcgccaagagcuucuacaagaaccugaucuggcuggugaagaagggcaacagcuaccccaagcugagcaagagcuacaucaacgacaagggcaaggaggugcuggugcuguggggcauccaccaccccagcaccagcgccgaccagcagagccuguaccagaacgccgacgccuacguguucgugggcaccagcagauacagcaagaaguucaagcccgagaucgccaucagacccaaggugagagaccaggagggcagaaugaacuacuacuggacccugguggagcccggcgacaagaucaccuucgaggccaccggcaaccugguggugcccagauacgccuucgccauggagagaaacgccggcagcggcaucaucaucagcgacacccccgugcacgacugcaacaccaccugccagacccccaagggcgccaucaacaccagccugcccuuccagaacauccaccccaucaccaucggcaagugccccaaguacgugaagagcaccaagcugagacuggccaccggccugagaaacgugcccagcauccagagcagaggccuguucggcgccaucgccggcuucaucgagggcggcuggaccggcaugguggacggcugguacggcuaccaccaccagaacgagcagggcagcggcuacgccgccgaccugaagagcacccagaacgccaucgacgagaucaccaacaaggugaacagcgugaucgagaagaugaacacccaguucaccgccgugggcaaggaguucaaccaccuggagaagagaaucgagaaccugaacaagaagguggacgacggcuuccuggacaucuggaccuacaacgccgagcugcuggugcugcuggagaacgagagaacccuggacuaccacgacagcaacgugaagaaccuguacgagaaggugagaagccagcugaagaacaacgccaaggagaucggcaacggcugcuucgaguucuaccacaagugcgacaacaccugcauggagagcgugaagaacggcaccuacgacuaccccaaguacagcgaggaggccaagcugaacagagaggagaucgacggcgugaagcuggagagcaccagaaucuaccagauccuggccaucuacagcaccguggccagcagccuggugcugguggugagccugggcgccaucagcuucuggaugugcagcaacggcagccugcagugcagaaucugcaucuga

SEQ ID NO: 167442 - RNA, 1701 nt, Artificial Sequence; identical to SEQ ID NO: 163082
  derived and/or modified CDS sequence (opt4) from hemagglutinin__InfluenzaA__AEO01288

SEQ ID NO: 167443 - RNA, 1701 nt, Artificial Sequence; identical to SEQ ID NO: 162729
  derived and/or modified CDS sequence (opt4) from hemagglutinin__InfluenzaA__AEO01289

SEQ ID NO: 167444 - RNA, 1701 nt, Artificial Sequence
  derived and/or modified CDS sequence (opt4) from hemagglutinin__InfluenzaA__AEO01290
augaaggccauccugguggugcugcuguacaccuucgccaccgccaacgccgacacccugugcaucggcuaccacgccaacaacagcaccgacaccguggacaccgugcuggagaagaacgugaccgugacccacagcgugaaccugcuggaggacaagcacaacggcaagcugugcaagcugagaggcguggccccccugcaccugggcaagugcaacaucgccggcuggauccugggcaaccccgagugcgagagccugagcaccgccagcagcuggagcuacaucguggagaccagcagcagcgacaacggcaccugcuaccccggcgacuucaucgacuacgaggagcugagagagcagcugagcagcgugagcagcuucgagagauucgagaucuuccccaagaccagcagcuggcccaaccacgacagcaacaagggcgugaccgccgccugcccccacgccggcgccaagagcuucuacaagaaccugaucuggcuggugaagaagggcaacagcuaccccaagcugagcaagagcuacaucaacgacaagggcaaggaggugcuggugcuguggggcauccaccaccccagcaccagcgccgaccagcagagccuguaccagaacgccgacgccuacguguucgugggcaccagcagauacagcaagaaguucaagcccgagaucgccaucagacccaaggugagagaccaggagggcagaaugaacuacuacuggacccugguggagcccggcgacaagaucaccuucgaggccaccggcaaccugguggugcccagauacgccuucgccauggagagaaacgccggcagcggcaucaucaucagcgacacccccgugcacgacugcaacaccaccugccagacccccaagggcgccaucaacaccagccugagcuuccagaacauccaccccaucaccaucggcaagugccccaaguacgugaagagcaccaagcugagacuggccaccggccugagaaacgugcccagcauccagagcagaggccuguucggcgccaucgccggcuucaucgagggcggcuggaccggcaugguggacggcugguacggcuaccaccaccagaacgagcagggcagcggcuacgccgccgaccugaagagcacccagaacgccaucgacgagaucaccaacaaggugaacagcgugaucgagaagaugaacacccaguucaccgccgugggcaaggaguucaaccaccuggagaagagaaucgagaaccugaacaagaagguggacgacggcuuccuggacaucuggaccuacaacgccgagcugcuggugcugcuggagaacgagagaacccuggacuaccacgacagcaacgugaagaaccuguacgagaaggugagaagccagcugaagaacaacgccaaggagaucggcaacggcugcuucgaguucuaccacaagugcgacaacaccugcauggagagcgugaagaacggcaccuacgacuaccccaaguacagcgaggaggccaagcugaacagagaggagaucgacggcgugaagcuggagagcaccagaaucuaccagauccuggccaucuacagcaccguggccagcagccuggugcugguggugagccugggcgccaucagcuucuggaugugcagcaacggcagccugcagugcagaaucugcaucuga

SEQ ID NO: 167445 - RNA, 1701 nt, Artificial Sequence; identical to SEQ ID NO: 162729
  derived and/or modified CDS sequence (opt4) from hemagglutinin__InfluenzaA__AEO01291

SEQ ID NO: 167446 - RNA, 1701 nt, Artificial Sequence; identical to SEQ ID NO: 162729
  derived and/or modified CDS sequence (opt4) from hemagglutinin__InfluenzaA__AEO01292

SEQ ID NO: 167447 - RNA, 1701 nt, Artificial Sequence
  derived and/or modified CDS sequence (opt4) from hemagglutinin__InfluenzaA__AEO01294
augaaggccauccugguggugcugcuguacaccuucgccaccgccaacgccgacacccugugcaucggcuaccacgccaacaacagcaccgacaccguggacaccgugcuggagaagaacgugaccgugacccacagcgugaaccugcuggaggacaagcacaacggcaagcugugcaagcugagaggcguggccccccugcaccugggcaagugcgacaucgccggcuggauccugggcaaccccgagugcgagagccugagcaccgccagcagcuggagcuacaucguggagaccagcagcagcgacaacggcaccugcuaccccggcgacuucaucgacuacgaggagcugagagagcagcugagcagcgugagcagcuucgagagauucgagaucuuccccaagaccagcagcuggcccaaccacgacagcaacaagggcgugaccgccgccugcccccacgccggcgccaagagcuucuacaagaaccugaucuggcuggugaagaagggcaacagcuaccccaagcugagcaagagcuacaucaacgacaagggcaaggaggugcuggugcuguggggcauccaccaccccagcaccagcgccgaccagcagagccuguaccagaacgccgacgccuacguguucgugggcaccagcagauacagcaagaaguucaagcccgagaucgccaucagacccaaggugagagaccaggagggcagaaugaacuacuacuggacccugguggagcccggcgacaagaucaccuucgaggccaccggcaaccugguggugcccagauacgccuucgccauggagagaaacgccggcagcggcaucaucaucagcgacacccccgugcacgacugcaacaccaccugccagacccccaagggcgccaucaacaccagccugcccuuccagaacauccaccccaucaccaucggcaagugccccaaguacgugaagagcaccaagcugagacuggccaccggccugagaaacgugcccagcauccagagcagaggccuguucggcgccaucgccggcuucaucgagggcggcuggaccggcaugguggacggcugguacggcuaccaccaccagaacgagcagggcagcggcuacgccgccgaccugaagagcacccagcacgccaucgacgagaucaccaacaaggugaacagcgugaucgagaagaugaacacccaguucaccgccgugggcaaggaguucaaccaccuggagaagagaaucgagaaccugaacaagaagguggacgacggcuuccuggacaucuggaccuacaacgccgagcugcuggugcugcuggagaacgagagaacccuggacuaccacgacagcaacgugaagaaccuguacgagaaggugagaagccagcugaagaacaacgccaaggagaucggcaacggcugcuucgaguucuaccacaagugcgacaacaccugcauggagagcgugaagaacggcaccuacgacuaccccaaguacagcgaggaggccaagcugaacagagaggagaucgacggcgugaagcuggagagcaccagaaucuaccagauccuggccaucuacagcaccguggccagcagccuggugcugguggugagccugggcgccaucagcuucuggaugugcagcaacggcagccugcagugcagaaucugcaucuga

SEQ ID NO: 167448 - RNA, 1701 nt, Artificial Sequence
  derived and/or modified CDS sequence (opt4) from hemagglutinin__InfluenzaA__AEO01295
augaaggccauccugguggugcugcuguacaccuucgccaccgccaacgccgacacccugugcaucggcuaccacgccaacaacagcaccgacaccguggacaccgugcuggagaagaacgugaccgugacccacagcgugaaccugcuggaggacaagcacaacggcaagcugugcaagcugagaggcguggccccccugcaccugggcaagugcaacaucgccggcuggauccugggcaaccccgagugcgagagccugagcaccgccagcagcuggagcuacaucguggagaccagcaacagcgacaacggcaccugcuaccccggcgacuucaucgacuacgaggagcugagagagcagcugagcagcgugagcagcuucgagagauucgagaucuuccccaagaccagcagcuggcccaaccacgacagcaacaagggcgugaccgccgccugcccccacgccggcgccaagagcuucuacaagaaccugaucuggcuggugaagaagggcaacagcuaccccaagcugagcaagagcuacaucaacgacaagggcaaggaggugcuggugcuguggggcauccaccaccccagcaccagcgccgaccagcagagccuguaccagaacgccgacgccuacguguucgugggcaccagcagauacagcaagaaguucaagcccgagaucgccaucagacccaaggugagagaccaggagggcagaaugaacuacuacuggacccugguggagcccggcgacaagaucaccuucgaggccaccggcaaccugguggugcccagauacgccuucgccauggagagaaacgccggcagcggcaucaucaucagcgacacccccgugcacuacugcaacaccaccugccagacccccaagggcgccaucaacaccagccugcccuuccagaacauccaccccaucaccaucggcaagugccccaaguacgugaagagcaccaagcugagacuggccaccggccugagaaacgugcccagcauccagagcagaggccuguucggcgccaucgccggcuucaucgagggcggcuggaccggcaugguggacggcugguacggcuaccaccaccagaacgagcagggcagcggcuacgccgccgaccugaagagcacccagaacgccaucgacaagaucaccaacaaggugaacagcgugaucgagaagaugaacacccaguucaccgccgugggcaaggaguucaaccaccuggagaagagaaucgagaaccugaacaagaagguggacgacggcuuccuggacaucuggaccuacaacgccgagcugcuggugcugcuggagaacgagagaacccuggacuaccacgacagcaacgugaagaaccuguacgagaaggugagaagccagcugaagaacaacgccaaggagaucggcaacggcugcuucgaguucuaccacaagugcgacaacaccugcauggagagcgugaagaacggcaccuacgacuaccccaaguacagcgaggaggccaagcugaacagagaggagaucgacggcgugaagcuggagagcaccagaaucuaccagauccuggccaucuacagcaccguggccagcagccuggugcugguggugagccugggcgccaucagcuucuggaugugcagcaacggcagccugcagugcagaaucugcaucuga

SEQ ID NO: 167449 - RNA, 1701 nt, Artificial Sequence; identical to SEQ ID NO: 162729
  derived and/or modified CDS sequence (opt4) from hemagglutinin__InfluenzaA__AEO01296

SEQ ID NO: 167450 - RNA, 1701 nt, Artificial Sequence; identical to SEQ ID NO: 164411
  derived and/or modified CDS sequence (opt4) from hemagglutinin__InfluenzaA__AEO01297

SEQ ID NO: 167451 - RNA, 1701 nt, Artificial Sequence; identical to SEQ ID NO: 164416
  derived and/or modified CDS sequence (opt4) from hemagglutinin__InfluenzaA__AEO01298

SEQ ID NO: 167452 - RNA, 1701 nt, Artificial Sequence; identical to SEQ ID NO: 162729
  derived and/or modified CDS sequence (opt4) from hemagglutinin__InfluenzaA__AEO01299

SEQ ID NO: 167453 - RNA, 1701 nt, Artificial Sequence; identical to SEQ ID NO: 162729
  derived and/or modified CDS sequence (opt4) from hemagglutinin__InfluenzaA__AEO01300

SEQ ID NO: 167454 - RNA, 1701 nt, Artificial Sequence; identical to SEQ ID NO: 162729
  derived and/or modified CDS sequence (opt4) from hemagglutinin__InfluenzaA__AEO01301

SEQ ID NO: 167455 - RNA, 1701 nt, Artificial Sequence; identical to SEQ ID NO: 162729
  derived and/or modified CDS sequence (opt4) from hemagglutinin__InfluenzaA__AEO01302

SEQ ID NO: 167456 - RNA, 1701 nt, Artificial Sequence; identical to SEQ ID NO: 164326
  derived and/or modified CDS sequence (opt4) from hemagglutinin__InfluenzaA__AEO01303

SEQ ID NO: 167457 - RNA, 1701 nt, Artificial Sequence
  derived and/or modified CDS sequence (opt4) from hemagglutinin__InfluenzaA__AEO01304
augaaggccauccugguggugcugcuguacaccuucgccaccgccaacgccgacacccugugcaucggcuaccacgccaacaacagcaccgacaccguggacaccgugcuggagaagaacgugaccgugacccacagcgugaaccugcuggaggacaagcacaacggcaagcugugcaagcugagaggcguggccccccugcaccugggcaagugcaacaucgccggcuggauccugggcaaccccgagugcgagagccugagcaccgccagcagcuggagcuacaucguggagaccagcagcagcgacaacggcaccugcuaccccggcgacuucaucgacuacgaggagcugagagagcagcugagcagcgugagcagcuucgagagauucgagaucuuccccaaggccagcagcuggcccaaccacgacagcaacaagggcgugaccgccgccugcccccacgccggcgccaagagcuucuacaagaaccugaucuggcuggugaagaagggcaacagcuaccccaagcugagcaagagcuacaucaacgacaagggcaagggcgugcuggugcuguggggcauccaccaccccagcaccagcgccgaccagcagagccuguaccagaacgccgacgccuacguguucgugggcaccagcagauacagcaagaaguucaagcccgagaucgccaucagacccaaggugagagaccaggagggcagaaugaacuacuacuggacccugguggagcccggcgacaagaucaccuucgaggccaccggcaaccugguggugcccagauacgccuucgccauggagagaaacgccggcagcggcaucaucaucagcgacacccccgugcacgacugcaacaccaccugccagacccccaagggcgccaucaacaccagccugcccuuccagaacauccaccccaucaccaucggcaagugccccaaguacgugaagagcaccaagcugagacuggccaccggccugagaaacgugcccagcauccagagcagaggccuguucggcgccaucgccggcuucaucgagggcggcuggaccggcaugguggacggcugguacggcuaccaccaccagaacgagcagggcagcggcuacgccgccgaccugaagagcacccagaacgccaucgacgagaucaccaacaaggugaacagcgugaucgagaagaugaacacccaguucaccgccgugggcaaggaguucaaccaccuggagaagagaaucgagaaccugaacaagaagguggacgacggcuuccuggacaucuggaccuacaacgccgagcugcuggugcugcuggagaacgagagaacccuggacuaccacgacagcaacgugaagaaccuguacgagaaggugagaagccagcugaagaacaacgccaaggagaucggcaacggcugcuucgaguucuaccacaagugcgacaacaccugcauggagagcgugaagaacggcaccuacgacuaccccaaguacagcgaggaggccaagcugaacagagaggagaucgacggcgugaagcuggagagcaccagaaucuaccagauccuggccaucuacagcaccguggccagcagccuggugcugguggugagccugggcgccaucagcuucuggaugugcagcaacggcagccugcagugcagaaucugcaucuga

SEQ ID NO: 167458 - RNA, 1701 nt, Artificial Sequence
  derived and/or modified CDS sequence (opt4) from hemagglutinin__InfluenzaA__AEO01305
augaaggccauccugguggugcugcuguacaccuucgccaccgccagcgccgacacccugugcaucggcuaccacgccaacaacagcaccgacaccguggacaccgugcuggagaagaacgugaccgugacccacagcgugaaccugcuggaggacaagcacaacggcaagcugugcaagcugagaggcguggccccccugcaccugggcaagugcaacaucgccggcuggauccugggcaaccccgagugcgagagccugagcaccgccagcagcuggagcuacaucguggagaccagcagcagcgacaacggcaccugcuaccccggcgacuucaucgacuacgaggagcugagagagcagcugagcagcgugagcagcuucgagagauucgagaucuuccccaagaccagcagcuggcccaaccacgacagcaacaagggcgugaccgccgccugcccccacgccggcgccaagagcuucuacaagaaccugaucuggcuggugaagaagggcaacagcuaccccaagcugagcaagagcuacaucaacgacaagggcaaggaggugcuggugcuguggggcauccaccaccccagcaccagcgccgaccagcagagccuguaccagaacgccgacgccuacguguucgugggcaccagcagauacagcaagaaguucaagcccgagaucgccaucagacccaaggugagagaccaggagggcagaaugaacuacuacuggacccugguggagcccggcgacaagaucaccuucgaggccaccggcaaccugguggugcccagauacgccuucgccauggagagaaacgccggcagcggcaucaucaucagcgacacccccgugcacgacugcaacaccaccugccagacccccaagggcgccaucaacaccagccugcccuuccagaacauccaccccaucaccaucggcaagugccccaaguacgugaagagcaccaagcugagacuggccaccggccugagaaacgugcccagcauccagagcagaggccuguucggcgccaucgccggcuucaucgagggcggcuggaccggcaugguggacggcugguacggcuaccaccaccagaacgagcagggcagcggcuacgccgccgaccugaagagcacccagaacgccaucgacgagaucaccaacaaggugaacagcgugaucgagaagaugaacacccaguucaccgccgugggcaaggaguucaaccaccuggagaagagaaucgagaaccugaacaagaagguggacgacggcuuccuggacaucuggaccuacaacgccgagcugcuggugcugcuggagaacgagagaacccuggacuaccacgacagcaacgugaagaaccuguacgagaaggugagaagccagcugaagaacaacgccaaggagaucggcaacggcugcuucgaguucuaccacaagugcgacaacaccugcauggagagcgugaagaacggcaccuacgacuaccccaaguacagcgaggaggccaagcugaacagagaggagaucgacggcgugaagcuggagagcaccagaaucuaccagauccuggccaucuacagcaccguggccagcagccuggugcugguggugagccugggcgccaucagcuucuggaugugcagcaacggcagccugcagugcagaaucugcaucuga

SEQ ID NO: 167459 - RNA, 1701 nt, Artificial Sequence; identical to SEQ ID NO: 162729
  derived and/or modified CDS sequence (opt4) from hemagglutinin__InfluenzaA__AEO01306

SEQ ID NO: 167460 - RNA, 1701 nt, Artificial Sequence; identical to SEQ ID NO: 162729
  derived and/or modified CDS sequence (opt4) from hemagglutinin__InfluenzaA__AEO01307

SEQ ID NO: 167461 - RNA, 1701 nt, Artificial Sequence; identical to SEQ ID NO: 162729
  derived and/or modified CDS sequence (opt4) from hemagglutinin__InfluenzaA__AEO01308

SEQ ID NO: 167462 - RNA, 1701 nt, Artificial Sequence
  derived and/or modified CDS sequence (opt4) from hemagglutinin__InfluenzaA__AEO01309
augaaggccauccugguggugcugcuguacaccuucgccaucgccaacgccgacacccugugcaucggcuaccacgccaacaacagcaccgacaccguggacaccgugcuggagaagaacgugaccgugacccacagcgugaaccugcuggaggacaagcacaacggcaagcugugcaagcugagaggcguggccccccugcaccugggcaagugcaacaucgccggcuggauccugggcaaccccgagugcgagagccugagcaccgccagcagcuggagcuacaucguggagaccagcagcagcgacaacggcaccugcuaccccggcgacuucaucgacuacgaggagcugagagagcagcugagcagcgugagcagcuucgagagauucgagaucuuccccaagaccagcagcuggcccaaccacgacagcaacaagggcgugaccgccgccugcccccacgccggcgccaagagcuucuacaagaaccugaucuggcuggugaagaagggcaacagcuaccccaagcugagcaagagcuacaucaacgacaagggcaaggaggugcuggugcuguggggcauccaccaccccagcaccagcgccgaccagcagagccuguaccagaacgccgacgccuacguguucgugggcaccagcagauacagcaagaaguucaagcccgagaucgccaucagacccaaggugagagaccaggagggcagaaugaacuacuacuggacccugguggagcccggcgacaagaucaccuucgaggccaccggcaaccugguggugcccagauacgccuucgccauggagagaaacgccggcagcggcaucaucaucagcgacacccccgugcacgacugcaacaccaccugccagacccccaagggcgccaucaacaccagccugcccuuccagaacauccaccccaucaccaucggcaagugccccaaguacgugaagagcaccaagcugagacuggccaccggccugagaaacgugcccagcauccagagcagaggccuguucggcgccaucgccggcuucaucgagggcggcuggaccggcaugguggacggcugguacggcuaccaccaccagaacgagcagggcagcggcuacgccgccgaccugaagagcacccagcacgccaucgacgagaucaccaacaaggugaacagcgugaucgagaagaugaacacccaguucaccgccgugggcaaggaguucaaccaccuggagaagagaaucgagaaccugaacaagaagguggacgacggcuuccuggacaucuggaccuacaacgccgagcugcuggugcugcuggagaacgagagaacccuggacuaccacgacagcaacgugaagaaccuguacgagaaggugagaagccagcugaagaacaacgccaaggagaucggcaacggcugcuucgaguucuaccacaagugcgacaacaccugcauggagagcgugaagaacggcaccuacgacuaccccaaguacagcaaggaggccaagcugaacagagaggagaucaacggcgugaagcuggagagcaccagaaucuaccagauccuggccaucuacagcaccguggccagcagccuggugcugguggugagccugggcgccaucagcuucuggaugugcagcaacggcagccugcagugcagaaucugcaucuga

SEQ ID NO: 167463 - RNA, 1701 nt, Artificial Sequence
  derived and/or modified CDS sequence (opt4) from hemagglutinin__InfluenzaA__AEO01310
augaaggccauccugguggugcugcuguacaccuucgccaccgccaacgccgacacccugugcaucggcuaccacgccaacaacagcaccgacaccguggacaccgugcuggagaagaacgugaccgugacccacagcgugaaccugcuggaggacaagcacaacggcaagcugugcaagcugagaggcguggccccccugcaccugggcaagugcaacaucgccggcuggauccugggcaaccccgagugcgagagccugagcaccgccagcagcuggagcuacaucguggagaccagcagcagcgacaacggcaccugcuaccccggcgacuucaucgacuacgaggagcugagagagcagcugagcagcgugagcagcuucgagagauucgagaucuuccccaagaccagcagcuggcccaaccacgacagcaacaagggcgugaccgccgccugcccccacgccggcgccaagagcuucuacaagaaccugaucuggcuggugaagaagggcaacagcuaccccaagcugagcaagagcuacaucaacgacagaggcaaggaggugcuggugcuguggggcauccaccaccccagcaccagcgccgaccagcagagccuguaccagaacgccgacgccuacguguucgugggcaccagcagauacagcaagaaguucaagcccgagaucgccaucagacccaaggugagagaccaggagggcagaaugaacuacuacuggacccugguggagcccggcgacaagaucaccuucgaggccaccggcaaccugguggugcccagauacgccuucgccauggagagaaacgccggcagcggcaucaucaucagcgacacccccgugcacgacugcaacaccaccugccagacccccaagggcgccaucaacaccagccugcccuuccagaacauccaccccaucaccaucggcaagugccccaaguacgugaagagcaccaagcugagacuggccaccggccugagaaacgugcccagcauccagagcagaggccuguucggcgccaucgccggcuucaucgagggcggcuggaccggcaugguggacggcugguacggcuaccaccaccagaacgagcagggcagcggcuacgccgccgaccugaagagcacccagaacgccaucgacgagaucaccaacaaggugaacagcgugaucgagaagaugaacacccaguucaccgccgugggcaaggaguucaaccaccuggagaagagaaucgagaaccugaacaagaagguggacgacggcuuccuggacaucuggaccuacaacgccgagcugcuggugcugcuggagaacgagagaacccuggacuaccacgacagcaacgugaagaaccuguacgagaaggugagaagccagcugaagaacaacgccaaggagaucggcaacggcugcuucgaguucuaccacaagugcgacaacaccugcauggagagcgugaagaacggcaccuacgacuaccccaaguacagcgaggaggccaagcugaacagagaggagaucgacggcgugaagcuggagagcaccagaaucuaccagauccuggccaucuacagcaccguggccagcagccuggugcugguggugagccugggcgccaucagcuucuggaugugcagcaacggcagccugcagugcagaaucugcaucuga

SEQ ID NO: 167464 - RNA, 1701 nt, Artificial Sequence; identical to SEQ ID NO: 162729
  derived and/or modified CDS sequence (opt4) from hemagglutinin__InfluenzaA__AEO01311

SEQ ID NO: 167465 - RNA, 1701 nt, Artificial Sequence
  derived and/or modified CDS sequence (opt4) from hemagglutinin__InfluenzaA__AEO01312
augaaggccauccugguggugcugcuguacaccuucgccaccgccaacgccgacacccugugcaucggcuaccacgccaacaacagcaccgacaccguggacaccgugcuggagaagaacgugaccgugacccacagcgugaaccugcuggaggacaagcacaacggcaagcugugcaagcugagaggcguggccccccugcaccugggcaagugcaacaucgccggcuggauccugggcaaccccgagugcgagagccugagcaccgccagcagcuggagcuacaucguggagaccagcagcagcgacaacggcaccugcuaccccggcgacuucaucgacuacgaggagcugagagagcagcugagcagcgugagcagcuucgagagauucgagaucuuccccaagaccagcagcuggcccaaccacgacagcaacaagggcgugaccgccgccugcccccacgccggcgccaagagcuucuacaagaaccugaucuggcuggugaagaagggcaacagcuaccccaagcugagcaagagcuacaucaacgacaagggcaaggaggugcuggugcuguggggcauccaccaccccagcaccagcgccgaccagcagagccuguaccagaacgccgacgccuacguguucgugggcaccagcagauacagcaagaaguucaagcccgagaucgccaucagacccaaggugagagaccaggagggcagaaugaacuacuacuggacccugguggagcccggcgacaagaucaccuucgaggccaccggcaaccugguggugcccagauacgccuucgccauggagagaaacgccggcagcggcaucaucaucagcgacacccccgugcacgacugcaacaccaccugccagacccccaagggcgccaucaacaccagccugcccuuccagaacauccaccccaucaccaucggcaagugccccaaguacgugaagagcaccaagcugagacuggccaccggccugagaaacgugcccagcauccagagcagaggccuguucggcgccaucgccggcuucaucgagggcggcuggaccggcaucguggacggcugguacggcuaccaccaccagaacgagcagggcagcggcuacgccgccgaccugaagagcacccagaacgccaucgacgagaucaccaacaaggugaacagcgugaucgagaagaugaacacccaguucaccgccgugggcaaggaguucaaccaccuggagaagagaaucgagaaccugaacaagaagguggacgacggcuuccuggacaucuggaccuacaacgccgagcugcuggugcugcuggagaacgagagaacccuggacuaccacgacagcaacgugaagaaccuguacgagaaggugagaagccagcugaagaacaacgccaaggagaucggcaacggcugcuucgaguucuaccacaagugcgacaacaccugcauggagagcgugaagaacggcaccuacgacuaccccaaguacagcgaggaggccaagcugaacagagaggagaucgacggcgugaagcuggagagcaccagaaucuaccagauccuggccaucuacagcaccguggccagcagccuggugcugguggugagccugggcgccaucagcuucuggaugugcagcaacggcagccugcagugcagaaucugcaucuga

SEQ ID NO: 167466 - RNA, 1701 nt, Artificial Sequence; identical to SEQ ID NO: 163082
  derived and/or modified CDS sequence (opt4) from hemagglutinin__InfluenzaA__AEO01313

SEQ ID NO: 167467 - RNA, 1701 nt, Artificial Sequence; identical to SEQ ID NO: 163893
  derived and/or modified CDS sequence (opt4) from hemagglutinin__InfluenzaA__AEO01314

SEQ ID NO: 167468 - RNA, 1701 nt, Artificial Sequence
  derived and/or modified CDS sequence (opt4) from hemagglutinin__InfluenzaA__AEO01315
augaaggccauccugguggugcugcuguacaccuucgccaccgccaacgccgacacccugugcaucggcuaccacgccaacaacagcaccgacaccguggacaccgugcuggagaagaacgugaccgugacccacagcgugaaccugcuggaggacaagcacaacagaaagcugugcaagcugagaggcguggccccccugcaccugggcaagugcaacaucgccggcuggauccugggcaaccccgagugcgagagccugagcaccgccagcagcuggagcuacaucguggagaccagcagcagcgacaacggcaccugcuaccccggcgacuucaucgacuacgaggagcugagagagcagcugagcagcgugagcagcuucgagagauucgagaucuuccccaagaccagcagcuggcccaaccacgacagcaacaagggcgugaccgccgccugcccccacgccggcgccaagagcuucuacaagaaccugaucuggcuggugaagaagggcaacagcuaccccaagcugagcaagagcuacaucaacgacaagggcaaggaggugcuggugcuguggggcauccaccaccccagcaccagcgccgaccagcagagccuguaccagaacgccgacgccuacguguucgugggcaccagcagauacagcaagaaguucaagcccgagaucgccaucagacccaaggugagagaccaggagggcagaaugaacuacuacuggacccugguggagcccggcgacaagaucaccuucgaggccaccggcaaccugguggugcccagauacgccuucgccauggagagaaacgccggcagcggcaucaucaucagcgacacccccgugcacgacugcaacaccaccugccagacccccaagggcgccaucaacaccagccugcccuuccagaacauccaccccaucaccaucggcaagugccccaaguacgugaagagcaccaagcugagacuggccaccggccugagaaacgugcccagcauccagagcagaggccuguucggcgccaucgccggcuucaucgagggcggcuggaccggcaugguggacggcugguacggcuaccaccaccagaacgagcagggcagcggcuacgccgccgaccugaagagcacccagaacgccaucgacgagaucaccaacaaggugaacagcgugaucgagaagaugaacacccaguucaccgccgugggcaaggaguucaaccaccuggagaagagaaucgagaaccugaacaagaagguggacgacggcuuccuggacaucuggaccuacaacgccgagcugcuggugcugcuggagaacgagagaacccuggacuaccacgacagcaacgugaagaaccuguacgagaaggugagaagccagcugaagaacaacgccaaggagaucggcaacggcugcuucgaguucuaccacaagugcgacaacaccugcauggagagcgugaagaacggcaccuacgacuaccccaaguacagcgaggaggccaagcugaacagagaggagaucgacggcgugaagcuggagagcaccagaaucuaccagauccuggccaucuacagcaccguggccagcagccuggugcugguggugagccugggcgccaucagcuucuggaugugcagcaacggcagccugcagugcagaaucugcaucuga

SEQ ID NO: 167469 - RNA, 1701 nt, Artificial Sequence; identical to SEQ ID NO: 162729
  derived and/or modified CDS sequence (opt4) from hemagglutinin__InfluenzaA__AEO01316

SEQ ID NO: 167470 - RNA, 1701 nt, Artificial Sequence; identical to SEQ ID NO: 162729
  derived and/or modified CDS sequence (opt4) from hemagglutinin__InfluenzaA__AEO01317

SEQ ID NO: 167471 - RNA, 1701 nt, Artificial Sequence; identical to SEQ ID NO: 162729
  derived and/or modified CDS sequence (opt4) from hemagglutinin__InfluenzaA__AEO01318

SEQ ID NO: 167472 - RNA, 1701 nt, Artificial Sequence; identical to SEQ ID NO: 162729
  derived and/or modified CDS sequence (opt4) from hemagglutinin__InfluenzaA__AEO01319

SEQ ID NO: 167473 - RNA, 1701 nt, Artificial Sequence
  derived and/or modified CDS sequence (opt4) from hemagglutinin__InfluenzaA__AEO01321
augaaggccauccugguggugcugcuguacaccuucgccaccgccaacgccgacacccugugcaucggcuaccacgccaacaacagcaccgacaccguggacaccgugcuggagaagaacgugaccgugacccacagcgugaacauccuggaggacaagcacaacggcaagcugugcaagcugagaggcguggccccccugcaccugggcaagugcaacaucgccggcuggauccugggcaaccccgagugcgagagccugagcaccgccagcagcuggagcuacaucguggagaccagcagcagcgacaacggcaccugcuaccccggcgacuucaucgacuacgaggagcugagagagcagcugagcagcgugagcagcuucgagagauucgagaucuuccccaagaccagcagcuggcccaaccacgacagcaacaagggcgugaccgccgccugcccccacgccggcgccaagagcuucuacaagaaccugaucuggcuggugaagaagggcaacagcuaccccaagcugagcaagagcuacaucaacgacaagggcaaggaggugcuggugcuguggggcauccaccaccccagcaccagcgccgaccagcagagccuguaccagaacgccgacgccuacguguucgugggcaccagcagauacagcaagaaguucaagcccgagaucgccaucagacccaaggugagagaccaggagggcagaaugaacuacuacuggacccugguggagcccggcgacaagaucaccuucgaggccaccggcaaccugguggugcccagauacgccuucgccauggagagaaacgccggcagcggcaucaucaucagcgacacccccgugcacgacugcaacaccaccugccagacccccaagggcgccaucaacaccagccugcccuuccagaacauccaccccaucaccaucggcaagugccccaaguacgugaagagcaccaagcugagacuggccaccggccugagaaacgugcccagcauccagagcagaggccuguucggcgccaucgccggcuucaucgagggcggcuggaccggcaugguggacggcugguacggcuaccaccaccagaacgagcagggcagcggcuacgccgccgaccugaagagcacccagaacgccaucgacgagaucaccaacaaggugaacagcgugaucgagaagaugaacacccaguucaccgccgugggcaaggaguucaaccaccuggagaagagaaucgagaaccugaacaagaagguggacgacggcuuccuggacaucuggaccuacaacgccgagcugcuggcccugcuggagaacgagagaacccuggacuaccacgacagcaacgugaagaaccuguacgagaaggugagaagccagcugaagaacaacgccaaggagaucggcaacggcugcuucgaguucuaccacaagugcgacaacaccugcauggagagcgugaagaacggcaccuacgacuaccccaaguacagcgaggaggccaagcugaacagagaggagaucgacggcgugaagcuggagagcaccagaaucuaccagauccuggccaucuacagcaccguggccagcagccuggugcugguggugagccugggcgccaucagcuucuggaugugcagcaacggcagccugcagugcagaaucugcaucuga

SEQ ID NO: 167474 - RNA, 1701 nt, Artificial Sequence; identical to SEQ ID NO: 162729
  derived and/or modified CDS sequence (opt4) from hemagglutinin__InfluenzaA__AEO01322

SEQ ID NO: 167475 - RNA, 1701 nt, Artificial Sequence; identical to SEQ ID NO: 164411
  derived and/or modified CDS sequence (opt4) from hemagglutinin__InfluenzaA__AEO01323

SEQ ID NO: 167476 - RNA, 1701 nt, Artificial Sequence; identical to SEQ ID NO: 164326
  derived and/or modified CDS sequence (opt4) from hemagglutinin__InfluenzaA__AEO01324

SEQ ID NO: 167477 - RNA, 1701 nt, Artificial Sequence; identical to SEQ ID NO: 162729
  derived and/or modified CDS sequence (opt4) from hemagglutinin__InfluenzaA__AEO01325

SEQ ID NO: 167478 - RNA, 1701 nt, Artificial Sequence
  derived and/or modified CDS sequence (opt4) from hemagglutinin__InfluenzaA__AEO01326
augaaggccauccugguggugcugcuguacaccuucgccaccgccaacgccgacacccugugcaucggcuaccacgccaacaacagcaccgacaccguggacaccgugcuggagaagaacgugaccgugacccacagcgugaaccugcuggaggacaagcacaacggcaagcugugcaagcugagaggcguggccccccugcaccugggcaagugcaacaucgccggcuggauccugggcaaccccgagugcgagagccugagcaccgccagcagcuggagcuacaucguggagaccagcagcagcgacaacggcaccugcuaccccggcgacuucaucgacuacgaggagcugagagagcagcugagcagcgugagcagcuucgagagauucgagaucuuccccaagaccagcagcuggcccaaccacgacagcaacaagggcgugaccgccgccugcccccacgccggcgccaagagcuucuacaagaaccugaucuggcuggugaagaagggcaacagcuaccccaagcugagcaagagcuacaucaacgacaagggcaaggaggugcuggugcuguggggcauccaccaccccagcaccagcgccgaccagcagagccuguaccaggacgccgacgccuacguguucgugggcaccagcagauacagcaagaaguucaagcccgagaucgccaucagacccaaggugagagaccaggagggcagaaugaacuacuacuggacccugguggagcccggcgacaagaucaccuucgaggccaccggcaaccugguggugcccagauacgccuucgccauggagagaaacgccggcagcggcaucaucaucagcgacacccccgugcacgacugcaacaccaccugccagacccccaagggcgccaucaacaccagccugcccuuccagaacauccaccccaucaccaucggcaagugccccaaguacgugaagagcaccaagcugagacuggccaccggccugagaaacgugcccagcauccagagcagaggccuguucggcgccaucgccggcuucaucgagggcggcuggaccggcaugguggacggcugguacggcuaccaccaccagaacgagcagggcagcggcuacgccgccgaccugaagagcacccagaacgccaucgacgagaucaccaacaaggugaacagcgugaucgagaagaugaacacccaguucaccgccgugggcaaggaguucaaccaccuggagaagagaaucgagaaccugaacaagaagguggacgacggcuuccuggacaucuggaccuacaacgccgagcugcuggugcugcuggagaacgagagaacccuggacuaccacgacagcaacgugaagaaccuguacgagaaggugagaagccagcugaagaacaacgccaaggagaucggcaacggcugcuucgaguucuaccacaagugcgacaacaccugcauggagagcgugaagaacggcaccuacgacuaccccaaguacagcgaggaggccaagcugaacagagaggagaucgacggcgugaagcuggagagcaccagaaucuaccagauccuggccaucuacagcaccguggccagcagccuggugcugguggugagccugggcgccaucagcuucuggaugugcagcaacggcagccugcagugcagaaucugcaucuga

SEQ ID NO: 167479 - RNA, 1701 nt, Artificial Sequence; identical to SEQ ID NO: 162729
  derived and/or modified CDS sequence (opt4) from hemagglutinin__InfluenzaA__AEO01327

SEQ ID NO: 167480 - RNA, 1701 nt, Artificial Sequence; identical to SEQ ID NO: 167438
  derived and/or modified CDS sequence (opt4) from hemagglutinin__InfluenzaA__AEO01328

SEQ ID NO: 167481 - RNA, 1701 nt, Artificial Sequence; identical to SEQ ID NO: 162729
  derived and/or modified CDS sequence (opt4) from hemagglutinin__InfluenzaA__AEO01330

SEQ ID NO: 167482 - RNA, 1701 nt, Artificial Sequence
  derived and/or modified CDS sequence (opt4) from hemagglutinin__InfluenzaA__AEO01331
augaaggccauccugguggugcugcuguacaccuucgccaccgccaacgccgacacccugugcaucggcuaccacgccaacaacagcaccgacaccguggacacccugcuggagaagaacgugaccgugacccacagcgugaaccugcuggaggacaagcacaacggcaagcugugcaagcugagaggcguggccccccugcaccugggcaagugcaacaucgccggcuggauccugggcaaccccgagugcgagagccugagcaccgccagcagcuggagcuacaucguggagaccagcagcagcgacaacggcaccugcuaccccggcgacuucaucgacuacgaggagcugagagagcagcugagcagcgugagcagcuucgagagauucgagaucuuccccaagaccagcagcuggcccaaccacgacagcaacaagggcgugaccgccgccugcccccacgccggcgccaagagcuucuacaagaaccugaucuggcuggugaagaagggcaacagcuaccccaagcugagcaagagcuacaucaacgacaagggcaaggaggugcuggugcuguggggcauccaccaccccagcaccagcgccgaccagcagagccuguaccagaacgccgacgccuacguguucgugggcaccagcagauacagcaagaaguucaagcccgagaucgccaucagacccaaggugagagaccaggagggcagaaugaacuacuacuggacccugguggagcccggcgacaagaucaccuucgaggccaccggcaaccugguggugcccagauacgccuucgccauggagagaaacgccggcagcggcaucaucaucagcgacacccccgugcacgacugcaacaccaccugccagacccccaagggcgccaucaacaccagccugcccuuccagaacauccaccccaucaccaucggcaagugccccaaguacgugaagagcaccaagcugagacuggccaccggccugagaaacgugcccagcauccagagcagaggccuguucggcgccaucgccggcuucaucgagggcggcuggaccggcaugguggacggcugguacggcuaccaccaccagaacgagcagggcagcggcuacgccgccgaccugaagagcacccagaacgccaucgacgagaucaccaacaaggugaacagcgugaucgagaagaugaacacccaguucaccgccgugggcaaggaguucaaccaccuggagaagagaaucgagaaccugaacaagaagguggacgacggcuuccuggacaucuggaccuacaacgccgagcugcuggugcugcuggagaacgagagaacccuggacuaccacgacagcaacgugaagaaccuguacgagaaggugagaagccagcugaagaacaacgccaaggagaucggcaacggcugcuucgaguucuaccacaagugcgacaacaccugcauggagagcgugaagaacggcaccuacgacuaccccaaguacagcgaggaggccaagcugaacagagaggagaucgacggcgugaagcuggagagcaccagaaucuaccagauccuggccaucuacagcaccguggccagcagccuggugcugguggugagccugggcgccaucagcuucuggaugugcagcaacggcagccugcagugcagaaucugcaucuga

SEQ ID NO: 167483 - RNA, 1701 nt, Artificial Sequence
  derived and/or modified CDS sequence (opt4) from hemagglutinin__InfluenzaA__AEO01332
augaaggccauccugguggugcugcuguacaccuucgccaccgccaacgccgacacccugugcaucggcuaccacgccaacaacagcaccgacaccguggacaccgugcuggagaagaacgugaccgugacccacagcgugaaccugcuggaggacaagcacaacggcaagcugugcaagcugagaggcguggccccccugcaccugggcaagugcaacaucgccggcuggauccugggcaaccccgagugcgagagccugagcaccgccagcagcuggagcuacaucguggagaccagcagcagcgacaacggcaccugcuaccccggcgacuucaucgacuacgaggagcugagagagcagcugagcagcgugagcagcuucgagagauucgagaucuuccccaagaccagcagcuggcccaaccacgacagcaacaagggcgugaccgccgccugcccccacgccggcgccaagagcuucuacaagaaccugaucuggcuggugaagaagggcaacagcuaccccaagcugagcaagagcuacaucaacgacaagggcaaggaggugcuggugcuguggggcauccaccaccccagcaccagcgccgaccagcagagccuguaccagaacgccgacgccuacguguucgugggccugagcagauacagcaagaaguucaagcccgagaucgccaucagacccaaggugagagagcaggagggcagaaugaacuacuacuggacccugguggagcccggcgacaagaucaccuucgaggccaccggcaaccugguggugcccagauacgccuucgccauggagagaaacgccggcagcggcaucgugaucagcgacacccccgugcacgacugcaacaccaccugccagacccccaagggcgccaucaacaccagccugcccuuccagaacauccaccccaucaccaucggcaagugccccaaguacgugaagagcaccaagcugagacuggccaccggccugagaaacgugcccagcauccagagcagaggccuguucggcgccaucgccggcuucaucgagggcggcuggaccggcaugguggacggcugguacggcuaccaccaccagaacgagcagggcagcggcuacgccgccgaccugaagagcacccagaacgccaucgacgagaucaccaacaaggugaacagcgugaucgagaagaugaacacccaguucaccgccgugggcaaggaguucaaccaccuggagaagagaauggagaaccugaacaagaagguggacgacggcuuccuggacaucuggaccuacaacgccgagcugcuggugcugcuggagaacgagagaacccuggacuaccacgacagcaacgugaagaaccuguacgagaaggugagaagccagcugaagaccaacgccaaggagaucggcaacggcugcuucgaguucuaccacaagugcgacaacaccugcauggagagcgugaagaacggcaccuacgacuaccccaaguacagcgaggaggccaagcugaacagagaggagaucgacggcgugaagcuggagagcaccagaaucuaccagauccuggccaucuacagcaccguggccagcagccuggugcugguggugagccugggcgccaucagcuucuggaugugcagcaacggcagccugcagugcagaaucugcaucuga

SEQ ID NO: 167484 - RNA, 1701 nt, Artificial Sequence; identical to SEQ ID NO: 164897
  derived and/or modified CDS sequence (opt4) from hemagglutinin__InfluenzaA__AEO01333

SEQ ID NO: 167485 - RNA, 1701 nt, Artificial Sequence
  derived and/or modified CDS sequence (opt4) from hemagglutinin__InfluenzaA__AEO01334
augaaggccauccugguggugcugcuguacaccuucgccaccgccaacgccgacacccugugcaucggcuaccacgccaacaacagcaccgacaccguggacaccauccuggagaagaacgugaccgugacccacagcgugaaccugcuggaggacaagcacaacggcaagcugugcaagcugagaggcguggccccccugcaccugggcaagugcaacaucgccggcuggauccugggcaaccccgagugcgagagccugagcaccgccagcagcuggagcuacaucguggagaccagcagcagcgacaacggcaccugcuaccccggcgacuucaucgacuacgaggagcugagagagcagcugagcagcgugagcagcuucgagagauucgagaucuuccccaagaccagcagcuggcccaaccacgacagcaacaagggcgugaccgccgccugcccccacgccggcgccaagagcuucuacaagaaccugaucuggcuggugaagaagggcaacagcuaccccaagcugagcaagagcuacaucaacgacaagggcaaggaggugcuggugcuguggggcauccaccaccccagcaccagcgccgaccagcagagccuguaccagaacgccgacgccuacguguucgugggcaccagcagauacagcaagaaguucaagcccgagaucgccaucagacccaaggugagagaccaggagggcagaaugaacuacuacuggacccugguggagcccggcgacaagaucaccuucgaggccaccggcaaccugguggugcccagauacgccuucgccauggagagaaacgccggcagcggcaucaucaucagcgacacccccgugcacgacugcaacaccaccugccagacccccaagggcgccaucaacaccagccugcccuuccagaacauccaccccaucaccaucggcaagugccccaaguacgugaagagcaccaagcugagacuggccaccggccugagaaacgugcccagcauccagagcagaggccuguucggcgccaucgccggcuucaucgagggcggcuggaccggcaugguggacggcugguacggcuaccaccaccagaacgagcagggcagcggcuacgccgccgaccugaagagcacccagaacgccaucgacgagaucaccaacaaggugaacagcgugaucgagaagaugaacacccaguucaccgccgugggcaaggaguucaaccaccuggagaagagaaucgagaaccugaacaagaagguggacgacggcuuccuggacaucuggaccuacaacgccgagcugcuggugcugcuggagaacgagagaacccuggacuaccacgacagcaacgugaagaaccuguacgagaaggugagaagccagcugaagaacaacgccaaggagaucggcaacggcugcuucgaguucuaccacaagugcgacaacaccugcauggagagcgugaagaacggcaccuacgacuaccccaaguacagcgaggaggccaagcugaacagagaggagaucgacggcgugaagcuggagagcaccagaaucuaccagauccuggccaucuacagcaccguggccagcagccuggugcugguggugagccugggcgccaucagcuucuggaugugcagcaacggcagccugcagugcagaaucugcaucuga

SEQ ID NO: 167486 - RNA, 1701 nt, Artificial Sequence; identical to SEQ ID NO: 164326
  derived and/or modified CDS sequence (opt4) from hemagglutinin__InfluenzaA__AEO01335

SEQ ID NO: 167487 - RNA, 1701 nt, Artificial Sequence
  derived and/or modified CDS sequence (opt4) from hemagglutinin__InfluenzaA__AEO01336
augaaggccauccugguggugcugcuguacaccuucgccaccgccaacgccgacacccugugcaucggcuaccacgccaacaacagcaccgacaccguggacaccgugcuggagaagaacgugaccgugacccacagcgugaaccugcuggaggacaagcacaacggcaagcugugcaagcugagaggcguggccccccugcaccugggcaagugcaacaucgccggcuggauccugggcaaccccgagugcgagagccugagcaccgccagcagcuggagcuacaucguggagaccagcagcagcgacaacggcaccugcuaccccggcgacuucaucgacuacgaggagcugagagagcagcugagcagcgugagcagcuucgagagauucgagaucuuccccaagaccagcagcuggcccaaccacgacagcaacaagggcgugaccgccgccugcccccacgccggcgccaagagcuucuacaagaaccugaucuggcuggugaagaagggcaacagcuaccccaagcugaacaagagcuacaucaacgacaagggcaaggaggugcuggugcuguggggcauccaccaccccagcaccagcgccgaccagcagagccuguaccagaacgccgacgccuacguguucgugggcaccagcagauacagcaagaaguucaagcccgagaucgccaucagacccaaggugagagaccaggagggcagaaugaacuacuacuggacccugguggagcccggcgacaagaucaccuucgaggccaccggcaaccugguggugcccagauacgccuucgccauggagagaaacgccggcagcggcaucaucaucagcgacacccccgugcacgacugcaacaccaccugccagacccccaagggcgccaucaacaccagccugcccuuccagaacauccaccccaucaccaucggcgagugccccaaguacgugaagagcaccaagcugagacuggccaccggccugagaaacgugcccagcauccagagcagaggccuguucggcgccaucgccggcuucaucgagggcggcuggaccggcaugguggacggcugguacggcuaccaccaccagaacgagcagggcagcggcuacgccgccgaccugaagagcacccagaacgccaucgacaagaucaccaacaaggugaacagcgugaucgagaagaugaacacccaguucaccgccgugggcaaggaguucaaccaccuggagaagagaaucgagaaccugaacaagaagguggacgacggcuuccuggacaucuggaccuacaacgccgagcugcuggugcugcuggagaacgagagaacccuggacuaccacgacagcaacgugaagaaccuguacgagaaggugagaagccagcugaagaacaacgccaaggagaucggcaacggcugcuucgaguucuaccacaagugcgacaacaccugcauggagagcgugaagaacggcaccuacgacuaccccaaguacagcgaggaggccaagcugaacagagaggagaucgacggcgugaagcuggagagcaccagaaucuaccagauccuggccaucuacagcaccguggccagcagccuggugcugguggugagccugggcgccaucagcuucuggaugugcagcaacggcagccugcagugcagaaucugcaucuga

SEQ ID NO: 167488 - RNA, 1701 nt, Artificial Sequence
  derived and/or modified CDS sequence (opt4) from hemagglutinin__InfluenzaA__AEO01337
augaaggccauccugguggugcugcuguacaccuucgccaccgccaacgccgacacccugugcaucggcuaccacgccaacaacagcaccgacaccguggacaccgugcuggagaagaacgugaccgugacccacagcgugaaccugcuggaggacaagcacaacggcaagcugugcaagcugagaggcguggccccccugcaccugggcaagugcaacaucgccggcuggauccugggcaaccccgagugcgagagccugagcaccgccagcagcuggagcuacaucguggagaccagcagcagcgacaacggcaccugcuaccccggcgacuucaucgacuacgaggagcugagagagcagcugagcagcgugagcagcuucgagagauucgagaucuuccccaagaccagcagcuggcccaaccacgacagcaacaagggcgugaccgccgccugcccccacgccggcgccaagagcuucuacaagaaccugaucuggcuggugaagaagggcaacagcuaccccaagcugagcaagagcuacaucaacgacaagggcaaggaggugcuggugcuguggggcauccaccaccccagcaccagcgccgaccagcagagccuguaccagaacgccgacgccuacguguucgugggcaccagcagauacagcaagaaguucaagcccgagaucgccaucagacccaaggugagagaccaggagggcagaaugaacuaccacuggacccugguggagcccggcgacaagaucaccuucgaggccaccggcaaccugguggugcccagauacgccuucgccauggagagaaacgccggcagcggcaucaucaucagcgacacccccgugcacgacugcaacaccaccugccagacccccaagggcgccaucaacaccagccugcccuuccagaacauccaccccaucaccaucggcaagugccccaaguacgugaagagcaccaagcugagacuggccaccggccugagaaacgugcccagcauccagagcagaggccuguucggcgccaucgccggcuucaucgagggcggcuggaccggcaugguggacggcugguacggcuaccaccaccagaacgagcagggcagcggcuacgccgccgaccugaagagcacccagcacgccaucgacgagaucaccaacaaggugaacagcgugaucgagaagaugaacacccaguucaccgccgugggcaaggaguucaaccaccuggagaagagaaucgagaaccugaacaagaagguggacgacggcuuccuggacaucuggaccuacaacgccgagcugcuggugcugcuggagaacgagagaacccuggacuaccacgacagcaacgugaagaaccuguacgagaaggugagaagccagcugaagaacaacgccaaggagaucggcaacggcugcuucgaguucuaccacaagugcgacaacaccugcauggagagcgugaagaacggcaccuacgacuaccccaaguacagcgaggaggccaagcugaacagagaggagaucgacggcgugaagcuggagagcaccagaaucuaccagauccuggccaucuacagcaccguggccagcagccuggugcugguggugagccugggcgccaucagcuucuggaugugcagcaacggcagccugcagugcagaaucugcaucuga

SEQ ID NO: 167489 - RNA, 1701 nt, Artificial Sequence; identical to SEQ ID NO: 162729
  derived and/or modified CDS sequence (opt4) from hemagglutinin__InfluenzaA__AEO01338

SEQ ID NO: 167490 - RNA, 1701 nt, Artificial Sequence; identical to SEQ ID NO: 166601
  derived and/or modified CDS sequence (opt4) from hemagglutinin__InfluenzaA__AEO01339

SEQ ID NO: 167491 - RNA, 1701 nt, Artificial Sequence; identical to SEQ ID NO: 167447
  derived and/or modified CDS sequence (opt4) from hemagglutinin__InfluenzaA__AEO01340

SEQ ID NO: 167492 - RNA, 1701 nt, Artificial Sequence; identical to SEQ ID NO: 167447
  derived and/or modified CDS sequence (opt4) from hemagglutinin__InfluenzaA__AEO01341

SEQ ID NO: 167493 - RNA, 1701 nt, Artificial Sequence; identical to SEQ ID NO: 162729
  derived and/or modified CDS sequence (opt4) from hemagglutinin__InfluenzaA__AEO01342

SEQ ID NO: 167494 - RNA, 1701 nt, Artificial Sequence
  derived and/or modified CDS sequence (opt4) from hemagglutinin__InfluenzaA__AEO01343
augaaggccauccugguggugcugcuguacaccuucgccaccgccaacgccgacacccugugcaucggcuaccacgccaacaacagcaccgacaccguggacaccgugcuggagaagaacgugaccgugacccacagcgugaaccugcuggaggacaagcacaacggcaagcugugcaagcugagaggcguggccccccugcaccugggcaagugcaacaucgccggcuggauccugggcaaccccgagugcgagagccugagcaccgccagcagcuggagcuacaucguggagaccagcaacagcgacaacggcaccugcuaccccggcgacuucaucgacuacgaggagcugagagagcagcugagcagcgugagcagcuucgagagauucgagaucuuccccaagaccagcagcuggcccaaccacgacagcaacaagggcgugaccgccgccugcccccacgccggcgccaagagcuucuacaagaaccugaucuggcuggugaagaagggcaacagcuaccccaagcugagcaagagcuacaucaacgacaagggcaaggaggugcuggugcuguggggcauccaccaccccagcaccagcgccgaccagcagagccuguaccagaacgccgacgccuacguguucgugggcaccagcagauacagcaagaaguucaagcccgagaucgccaucagacccaaggugagagaccaggagggcagaaugaacuacuacuggacccugguggagcccggcgacaagaucaccuucgaggccaccggcaaccugguggugcccagauacgccuucgccauggagagaaacgccggcagcggcaucaucaucagcgacacccccgugcacgacugcaacaccaccugccagacccccaagggcgccaucaacaccagccugcccuuccagaacauccaccccaucaccaucggcaagugccccaaguacgugaagagcaccaagcugagacuggccaccggccugagaaacgugcccagcauccagagcagaggccuguucggcgccaucgccggcuucaucgagggcggcuggaccggcaugguggacggcugguacggcuaccaccaccagaacgagcagggcagcggcuacgccgccgaccugaagagcacccagaacgccaucgacaagaucaccaacaaggugaacagcgugaucgagaagaugaacacccaguucaccgccgugggcaaggaguucaaccaccuggagaagagaaucgagaaccugaacaagaagguggacgacggcuuccuggacaucuggaccuacaacgccgagcugcuggugcugcuggagaacgagagaacccuggacuaccacgacagcaacgugaagaaccuguacgagaaggugagaagccagcugaagaacaacgccaaggagaucggcaacggcugcuucgaguucuaccacaagugcgacaacaccugcauggagagcgugaagaacggcaccuacgacuaccccaaguacagcgaggaggccaagcugaacagagaggagaucgacggcgugaagcuggagagcaccagaaucuaccagauccuggccaucuacagcaccguggccagcagccuggugcugguggugagccugggcgccaucagcuucuggaugugcagcaacggcagccugcagugcagaaucugcaucuga

SEQ ID NO: 167495 - RNA, 1701 nt, Artificial Sequence
  derived and/or modified CDS sequence (opt4) from hemagglutinin__InfluenzaA__AEO01344
augaaggccauccugguggugcugcuguacaccuucgccaccgccaacgccgacacccugugcaucggcuaccacgccaacaacagcaccgacaccguggacaccgugcuggagaagaacgugaccgugacccacagcgugaacauccuggaggacaagcacaacggcaagcugugcaagcugagaggcguggccccccugcaccugggcaagugcaacaucgccggcuggauccugggcaaccccgagugcgagagccugagcaccgccagcagcuggagcuacaucguggagaccagcagcagcgacaacggcaccugcuaccccggcgacuucaucgacuacgaggagcugagagagcagcugagcagcgugagcagcuucgagagauucgagaucuuccccaagaccagcagcuggcccaaccacgacagcaacaagggcgugaccgccgccugcccccacgccggcgccaagagcuucuacaagaaccugaucuggcuggugaagaagggcaacagcuaccccaagcugagcaagagcuacaucaacgacaagggcaaggaggugcuggugcuguggggcauccaccaccccagcaccagcgccgaccagcagagccuguaccagaacgccgacgccuacguguucgugggcaccagcaaguacagcaagaaguucaagcccgagaucgccaucagacccaaggugagagaccaggagggcagaaugaacuacuacuggacccugguggagcccggcgacaagaucaccuucgaggccaccggcaaccugguggugcccagauacgccuucgccauggagagaaacgccggcagcggcaucaucaucagcgacacccccgugcacgacugcaacaccaccugccagacccccaagggcgccaucaacaccagccugcccuuccagaacauccaccccaucaccaucggcaagugccccaaguacgugaagagcaccaagcugagacuggccaccggccugagaaacgugcccagcauccagagcagaggccuguucggcgccaucgccggcuucaucgagggcggcuggaccggcaugguggacggcugguacggcuaccaccaccagaacgagcagggcagcggcuacgccgccgaccugaagagcacccagaacgccaucgacgagaucaccaacaaggugaacagcgugaucgagaagaugaacacccaguucaccgccgugggcaaggaguucaaccaccuggagaagagaaucgagaaccugaacaagaagguggacgacggcuuccuggacaucuggaccuacaacgccgagcugcuggugcugcuggagaacgagagaacccuggacuaccacgacagcaacgugaagaaccuguacgagaaggugagaagccagcugaagaacaacgccaaggagaucggcaacggcugcuucgaguucuaccacaagugcgacaacaccugcauggagagcgugaagaacggcaccuacgacuaccccaaguacagcgaggaggccaagcugaacagagaggagaucgacggcgugaagcuggagagcaccagaaucuaccagauccuggccaucuacagcaccguggccagcagccuggugcugguggugagccugggcgccaucagcuucuggaugugcagcaacggcagccugcagugcagaaucugcaucuga

SEQ ID NO: 167496 - RNA, 1701 nt, Artificial Sequence; identical to SEQ ID NO: 166601
  derived and/or modified CDS sequence (opt4) from hemagglutinin__InfluenzaA__AEO01345

SEQ ID NO: 167497 - RNA, 1701 nt, Artificial Sequence; identical to SEQ ID NO: 162729
  derived and/or modified CDS sequence (opt4) from hemagglutinin__InfluenzaA__AEO01346

SEQ ID NO: 167498 - RNA, 1701 nt, Artificial Sequence
  derived and/or modified CDS sequence (opt4) from hemagglutinin__InfluenzaA__AEO01347
augaaggccauccugguggugcugcuguacaccuucgccaccgccaacgccgacacccugugcaucggcuaccacgccaacaacagcaccgacaccguggacaccgugcuggagaagaacgugaccgugacccacagcgugaaccugcuggaggacaagcacaacggcaagcugugcaagcugagaggcguggccccccugcaccugggcaagugcaacaucgccggcuggauccugggcaaccccgagugcgagagccugagcaccgccagcagcuggagcuacaucguggagaccagcagcagcgacaacggcaccugcuaccccggcgacuucaucgacuacgaggagcugagagagcagcugagcagcgugagcagcuucgagagauucgagaucuuccccaagaccagcagcuggcccaaccacgacagcaacaagggcgugaccgccgccugcccccacgccggcgccaagagcuucuacaagaaccugaucuggcuggugaagaagggcaacagcuaccccaagcugagcaagagcuacaucaacgacaagggcaaggaggugcuggugcuguggggcauccaccaccccagcaccagcgccgaccagcagagccuguaccagaacgccgacgccuacguguucgugggcaccagcagauacagcaagaaguucaagcccgagaucgccaucagacccaaggugagagaccaggagggcagaaugaacuacuacuggacccugguggagcccggcgacaagaucaccuucgaggccaccggcaaccugguggugcccagauacgccuucgccauggagagaaacgccggcagcggcaucaucaucagcgacacccccgugcacgacugcaacaccaccugccagacccccaagggcgccaucaacaccagccugcccuuccagaacauccaccccaucaccaucggcgagugccccaaguacgugaagagcaccaagcugagacuggccaccggccugagaaacgugcccagcauccagagcagaggccuguucggcgccaucgccggcuucaucgagggcggcuggaccggcaugguggacggcugguacggcuaccaccaccagaacgagcagggcagcggcuacgccgccgaccugaagagcacccagaacgccaucgacaagaucaccaacaaggugaacagcgugaucgagaagaugaacacccaguucaccgccgugggcaaggaguucaaccaccuggagaagagaaucgagaaccugaacaagaagguggacgacggcuuccuggacaucuggaccuacaacgccgagcugcuggugcugcuggagaacgagagaacccuggacuaccacgacagcaacgugaagaaccuguacgagaaggugagaagccagcugaagaacaacgccaaggagaucggcaacggcugcuucgaguucuaccacaagugcgacaacaccugcauggagagcgugaagaacggcaccuacgacuaccccaaguacagcgaggaggccaagcugaacagagaggagaucgacggcgugaagcuggagagcaccagaaucuaccagauccuggccaucuacagcaccguggccagcagccuggugcugguggugagccugggcgccaucagcuucuggaugugcagcaacggcagccugcagugcagaaucugcaucuga

SEQ ID NO: 167499 - RNA, 1701 nt, Artificial Sequence
  derived and/or modified CDS sequence (opt4) from hemagglutinin__InfluenzaA__AEO01348
augaaggccauccugguggugcugcuguacaccuucgccaucgccaacgccgacacccugugcaucggcuaccacgccaacaacagcaccgacaccguggacaccgugcuggagaagaacgugaccgugacccacagcgugaaccugcuggaggacaagcacaacggcaagcugugcaagcugagaggcguggccccccugcaccugggcaagugcaacaucgccggcuggauccugggcaaccccgagugcgagagccugagcaccgccagcagcuggagcuacaucguggagaccagcagcagcgacaacggcaccugcuaccccggcgacuucaucgacuacgaggagcugagagagcagcugagcagcgugagcagcuucgagagauucgagaucuuccccaagaccagcagcuggcccaaccacgacagcaacaagggcgugaccgccgccugcccccacgccggcgccaagagcuucuacaagaaccugaucuggcuggugaagaagggcaacagcuaccccaagcugagcaagagcuacaucaacgacaagggcaaggaggugcuggugcuguggggcauccaccaccccagcaccagcgccgaccagcagagccuguaccagaacgccgacgccuacguguucgugggcaccagcagauacagcaagaaguucaagcccgagaucgccaucagacccaaggugagagagcaggagggcagaaugaacuacuacuggacccugguggagcccggcgacaagaucaccuucgaggccaccggcaaccugguggugcccagauacgccuucgccauggagagaaacgccggcagcggcaucaucaucagcgacacccccgugcacgacugcaacaccaccugccagacccccaagggcgccaucaacaccagccugcccuuccagaacauccaccccaucaccaucggcaagugccccaaguacgugaagagcaccaagcugagacuggccaccggccugagaaacgugcccagcauccagagcagaggccuguucggcgccaucgccggcuucaucgagggcggcuggaccggcaugguggacggcugguacggcuaccaccaccagaacgagcagggcagcggcuacgccgccgaccugaagagcacccagaacgccaucgacgagaucaccaacaaggugaacagcgugaucgagaagaugaacacccaguucaccgccgugggcaaggaguucaaccaccuggagaagagaaucgagaaccugaacaagaagguggacgacggcuuccuggacaucuggaccuacaacgccgagcugcuggugcugcuggagaacgagagaacccuggacuaccacgacagcaacgugaagaaccuguacgagaaggugagaagccagcugaagaacaacgccaaggagaucggcaacggcugcuucgaguucuaccacaagugcgacaacaccugcauggagagcgugaagaacggcaccuacgacuaccccaaguacagcgaggaggccaagcugaacagagaggagaucgacggcgugaagcuggagagcaccagaaucuaccagauccuggccaucuacagcaccguggccagcagccuggugcugguggugagccugggcgccaucagcuucuggaugugcagcaacggcagccugcagugcagaaucugcaucuga

SEQ ID NO: 167500 - RNA, 1701 nt, Artificial Sequence
  derived and/or modified CDS sequence (opt4) from hemagglutinin__InfluenzaA__AEO01349
augaaggccauccugguggugcugcuguacaccuucgccaccgccaacgccgacacccugugcaucggcuaccacgccaacaacagcaccgacaccguggacaccgugcuggagaagaacgugaccgugacccacagcgugaaccugcuggaggacaagcacaacggcaagcugugcaagcugagaggcguggccccccugcaccugggcaagugcaacaucgccggcuggauccugggcaaccccgagugcgagagccugagcaccgccagcagcuggagcuacaucguggagaccagcagcagcgagaacggcaccugcuaccccggcgacuucaucgacuacgaggagcugagagagcagcugagcagcgugagcagcuucgagagauucgagaucuuccccaagaccagcagcuggcccaaccacgacagcaacaagggcgugaccgccgccugcccccacgccggcgccaagagcuucuacaagaaccugaucuggcuggugaagaagggcaacagcuaccccaagcugagcaagagcuacaucaacgacaagggcaaggaggugcuggugcuguggggcauccaccaccccagcaccagcgccgaccagcagagccuguaccagaacgccgacgccuacguguucgugggcaccagcagauacagcaagaaguucaagcccgagaucgccaucagacccaaggugagagaccaggagggcagaaugaacuacuacuggacccugguggagcccggcgacaagaucaccuucgaggccaccggcaaccugguggugcccagauacgccuucgccauggagagaaacgccggcagcggcaucaucaucagcgacacccccgugcacgacugcaacaccaccugccagacccccaagggcgccaucaacaccagccugcccuuccagaacauccaccccaucaccaucggcaagugccccaaguacgugaagagcaccaagcugagacuggccaccggccugagaaacgugcccagcauccagagcagaggccuguucggcgccaucgccggcuucaucgagggcggcuggaccggcaugguggacggcugguacggcuaccaccaccagaacgagcagggcagcggcuacgccgccgaccugaagagcacccagaacgccaucgacgagaucaccaacaaggugaacagcgugaucgagaagaugaacacccaguucaccgccgugggcaaggaguucaaccaccuggagaagagaaucgagaaccugaacaagaagguggacgacggcuuccuggacaucuggaccuacaacgccgagcugcuggugcugcuggagaacgagagaacccuggacuaccacgacagcaacgugaagaaccuguacgagaaggugagaagccagcugaagaacaacgccaaggagaucggcaacggcugcuucgaguucuaccacaagugcgacaacaccugcauggagagcgugaagaacggcaccuacgacuaccccaaguacagcaaggaggccaagcugaacagagaggagaucgacggcgugaagcuggagagcaccagaaucuaccagauccuggccaucuacagcaccguggccagcagccuggugcugguggugagccugggcgccaucagcuucuggaugugcagcaacggcagccugcagugcagaaucugcaucuga

SEQ ID NO: 167501 - RNA, 1701 nt, Artificial Sequence
  derived and/or modified CDS sequence (opt4) from hemagglutinin__InfluenzaA__AEO01350
augaaggccauccugguggugcugcuguacaccuucgccaccaccaacgccgacacccugugcaucggcuaccacgccaacaacagcaccgacaccguggacaccgugcuggagaagaacgugaccgugacccacagcgugaaccugcuggaggacaagcacaacggcaagcugugcaagcugagaggcguggccccccugcaccugggcaagugcaacaucgccggcuggauccugggcaaccccgagugcgagagccugagcaccgccagcagcuggagcuacaucguggagaccagcagcagcgacaacggcaccugcuaccccggcgacuucaucgacuacgaggagcugagagagcagcugagcagcgugagcagcuucgagagauucgagaucuuccccaagaccagcagcuggcccaaccacgacagcaacaagggcgugaccgccgccugcccccacgccggcgccaagagcuucuacaagaaccugaucuggcuggugaagaagggcaacagcuaccccaagcugagcaagagcuacaucaacgacaagggcaaggaggugcuggugcuguggggcauccaccaccccagcaccagcgccgaccagcagagccuguaccagaacgccgacgccuacguguucgugggcaccagcagauacagcaagaaguucaagcccgagaucgccaucagacccaaggugagagaccaggagggcagaaugaacuacuacuggacccugguggagcccggcgacaagaucaccuucgaggccaccggcaaccugguggugcccagauacgccuucgccauggagagaaacgccggcagcggcaucaucaucagcgacacccccgugcacgacugcaacaccaccugccagacccccaagggcgccaucaacaccagccugcccuuccagaacauccaccccaucaccaucggcaagugccccaaguacgugaagagcaccaagcugagacuggccaccggccugagaaacgugcccagcauccagagcagaggccuguucggcgccaucgccggcuucaucgagggcggcuggaccggcaugguggacggcugguacggcuaccaccaccagaacgagcagggcagcggcuacgccgccgaccugaagagcacccagcacgccaucgacgagaucaccaacaaggugaacagcgugaucgagaagaugaacacccaguucaccgccgugggcaaggaguucaaccaccuggagaagagaaucgagaaccugaacaagaagguggacgacggcuuccuggacaucuggaccuacaacgccgagcugcuggugcugcuggagaacgagagaacccuggacuaccacgacagcaacgugaagaaccuguacgagaaggugagaagccagcugaagaacaacgccaaggagaucggcaacggcugcuucgaguucuaccacaagugcgacaacaccugcauggagagcgugaagaacggcaccuacgacuaccccaaguacagcgaggaggccaagcugaacagagaggagaucgacggcgugaagcuggagagcaccagaaucuaccagauccuggccaucuacagcaccguggccagcagccuggugcugguggugagccugggcgccaucagcuucuggaugugcagcaacggcagccugcagugcagaaucugcaucuga

SEQ ID NO: 167502 - RNA, 1701 nt, Artificial Sequence; identical to SEQ ID NO: 162729
  derived and/or modified CDS sequence (opt4) from hemagglutinin__InfluenzaA__AEO01351

SEQ ID NO: 167503 - RNA, 1701 nt, Artificial Sequence; identical to SEQ ID NO: 163893
  derived and/or modified CDS sequence (opt4) from hemagglutinin__InfluenzaA__AEO01352

SEQ ID NO: 167504 - RNA, 1701 nt, Artificial Sequence
  derived and/or modified CDS sequence (opt4) from hemagglutinin__InfluenzaA__AEO01353
augaaggccauccugguggugcugcuguacaccuucgccaccgccaacgccgacacccugugcaucggcuaccacgccaacaacagcaccgacaccguggacaccgugcuggagaagaacgugaccgugacccacagcgugaaccugcuggaggacaagcacaacggcaagcugugcaagcugagaggcguggccccccugcaccugggcaagugcaacaucgccggcuggauccugggcaaccccgagugcgagagccugagcaccgccagcagcuggagcuacaucguggagaccagcagcagcgacaacggcaccugcuaccccggcgacuucaucgacuacgaggagcugagagagcagcugagcagcgugagcagcuucgagagauucgagaucuuccccaagaccagcagcuggcccaaccacgacagcaacaagggcgugaccgccgccugcccccacgccggcgccaagagcuucuacaagaaccugaucuggcuggugaagaagggcaacagcuaccccaagcugagcaagagcuacaucaacgacaagggcaaggaggugcuggugcuguggggcauccaccaccccagcaccagcgccgaccagcagagccuguaccagaacgccgacgccuacguguucgugggcaccagcagauacagcaagaaguucaagcccgagaucgccaucagacccaaggugagagaccaggagggcagaaugaacuacuacuggacccugguggagcccggcgacaagaucaccuucgaggccaccggcaaccugguggugcccagauacgccuucgccauggagagaaacgccggcagcggcaucaucaucagcgacacccccgugcacgacugcaacaccaccugccagacccccaagggcgccaucaacaccagccugcccuuccagaacauccaccccaucaccaucggcaagugccccaaguacgugaagagcaccaagcugagacuggccaccggccugagaaacgugcccagcauccagagcagaggccuguucggcgccaucgccggcuucaucgagggcggcuggaccggcaugguggacggcugguacggcuaccaccaccagaacgagcagggcagcggcuacgccgccgaccugaagagcacccagaacgccaucgacgagaucaccaacaaggugaacagcgugaucgagaagaugaacacccaguucaccgccgugggcaaggaguucaaccaccuggagaagagaaucgagaaccugaacaagaagguggacgacggcuuccuggacaucuggaccuacaacgccgagcugcuggugcugcuggagaacgagagaacccuggacuaccacgacagcaacgugaagaaccuguacgagaaggugagaagccagcugaagaacaacgccaaggagaucggcaacggcugcuucgaguucuaccacaagugcgacaacaccugcauggagagcgugaagaacggcaccuacgacuaccccaaguacagcgaggaggccaagcugaacagagaggagaucgacggcgugaagcuggagagcaccagaaucuaccagauccuggccaucuacagcaccguggccagcagccuggugcuggugguguuccugggcgccaucagcuucuggaugugcagcaacggcagccugcagugcagaaucugcaucuga

SEQ ID NO: 167505 - RNA, 1701 nt, Artificial Sequence
  derived and/or modified CDS sequence (opt4) from hemagglutinin__InfluenzaA__AEO01354
augaaggccauccugguggugcugcuguacaaguucgccaccgccaacgccgacacccugugcaucggcuaccacgccaacaacagcaccgacaccguggacaccgugcuggagaagaacgugaccgugacccacagcgugaaccugcuggaggacaagcacaacggcaagcugugcaagcugagaggcguggccccccugcaccugggcaagugcaacaucgccggcuggauccugggcaaccccgagugcgagagccugagcaccgccagcagcuggagcuacaucguggagaccagcagcagcgacaacggcaccugcuaccccggcgacuucaucgacuacgaggagcugagagagcagcugagcagcgugagcagcuucgagagauucgagaucuuccccaagaccagcagcuggcccaaccacgacagcaacaagggcgugaccgccgccugcccccacgccggcgccaagagcuucuacaagaaccugaucuggcuggugaagaagggcaacagcuaccccaagcugagcaagagcuacaucaacgacaagggcaaggaggugcuggugcuguggggcauccaccaccccagcaccagcgccgaccagcagagccuguaccagaacgccgacgccuacguguucgugggcaccagcagauacagcaagaaguucaagcccgagaucgccaucagacccaaggugagagaccaggagggcagaaugaacuacuacuggacccugguggagcccggcgacaagaucaccuucgaggccaccggcaaccugguggugcccagauacgccuucgccauggagagaaacgccggcagcggcaucaucaucagcgacacccccgugcacgacugcaacaccaccugccagacccccaagggcgccaucaacaccagccugcccuuccagaacauccaccccaucaccaucggcaagugccccaaguacgugaagagcaccaagcugagacuggccaccggccugagaaacgugcccagcauccagagcagaggccuguucggcgccaucgccggcuucaucgagggcggcuggaccggcaugguggacggcugguacggcuaccaccaccagaacgagcagggcagcggcuacgccgccgaccugaagagcacccagaacgccaucgacgagaucaccaacaaggugaacagcgugaucgagaagaugaacacccaguucaccgccgugggcaaggaguucaaccaccuggagaagagaaucgagaaccugaacaagaagguggacgacggcuuccuggacaucuggaccuacaacgccgagcugcuggugcugcuggagaacgagagaacccuggacuaccacgacagcaacgugaagaaccuguacgagaaggugagaagccagcugaagaacaacgccaaggagaucggcaacggcugcuucgaguucuaccacaagugcgacaacaccugcauggagagcgugaagaacggcaccuacgacuaccccaaguacagcgaggaggccaagcugaacagagaggagaucgacggcgugaagcuggagagcaccagaaucuaccagauccuggccaucuacagcaccguggccagcagccuggugcugguggugagccugggcgccaucagcuucuggaugugcagcaacggcagccugcagugcagaaucugcaucuga

SEQ ID NO: 167506 - RNA, 1701 nt, Artificial Sequence; identical to SEQ ID NO: 164149
  derived and/or modified CDS sequence (opt4) from hemagglutinin__InfluenzaA__AEO01355

SEQ ID NO: 167507 - RNA, 1701 nt, Artificial Sequence; identical to SEQ ID NO: 162729
  derived and/or modified CDS sequence (opt4) from hemagglutinin__InfluenzaA__AEO01356

SEQ ID NO: 167508 - RNA, 1701 nt, Artificial Sequence
  derived and/or modified CDS sequence (opt4) from hemagglutinin__InfluenzaA__AEO01358
augaaggccauccugguggugcugcuguacaccuucgccaccgccaacgccgacacccugugcgugggcuaccacgccaacaacagcaccgacaccguggacaccgugcuggagaagaacgugaccgugacccacagcgugaaccugcuggaggacaagcacaacggcaagcugugcaagcugagaggcguggccccccugcaccugggcaagugcaacaucgccggcuggauccugggcaaccccgagugcgagagccugagcaccgccagcagcuggagcuacaucguggagaccagcagcagcgacaacggcaccugcuaccccggcgacuucaucgacuacgaggagcugagagagcagcugagcagcgugagcagcuucgagagauucgagaucuuccccaagaccagcagcuggcccaaccacgacagcaacaagggcgugaccgccgccugcccccacgccggcgccaagagcuucuacaagaaccugaucuggcuggugaagaagggcaacagcuaccccaagcugagcaagagcuacaucaacgacaagggcaaggaggugcuggugcuguggggcauccaccaccccagcaccagcgccgaccagcagagccuguaccagaacgccgacgccuacguguucgugggcaccagcagauacagcaagaaguucaagcccgagaucgccaucagacccaaggugagagaccaggagggcagaaugaacuacuacuggacccugguggagcccggcgacaagaucaccuucgaggccaccggcaaccugguggugcccagauacgccuucgccauggagagaaacgccggcagcggcaucaucaucagcgacacccccgcccacgacugcaacaccaccugccagacccccaagggcgccaucaacaccagccugcccuuccagaacauccaccccaucaccaucggcaagugccccaaguacgugaagagcaccaagcugagacuggccaccggccugagaaacgugcccagcauccagagcagaggccuguucggcgccaucgccggcuucaucgagggcggcuggaccggcaugguggacggcugguacggcuaccaccaccagaacgagcagggcagcggcuacgccgccgaccugaagagcacccagaacgccaucgacgagaucaccaacaaggugaacagcgugaucgagaagaugaacacccaguucaccgccgugggcaaggaguucaaccaccuggagaagagaaucgagaaccugaacaagaagguggacgacggcuuccuggacaucuggaccuacaacgccgagcugcuggugcugcuggagaacgagagaacccuggacuaccacgacagcaacgugaagaaccuguacgagaaggugagaagccagcugaagaacaacgccaaggagaucggcaacggcugcuucgaguucuaccacaagugcgacaacaccugcauggagagcgugaagaacggcaccuacgacuaccccaaguacagcgaggaggccaagcugaacagagaggagaucgacggcgugaagcuggagagcaccagaaucuaccagauccuggccaucuacagcaccguggccagcagccuggugcugguggugagccugggcgccaucagcuucuggaugugcagcaacggcagccugcagugcagaaucugcaucuga

SEQ ID NO: 167509 - RNA, 1701 nt, Artificial Sequence; identical to SEQ ID NO: 164149
  derived and/or modified CDS sequence (opt4) from hemagglutinin__InfluenzaA__AEO01359

SEQ ID NO: 167510 - RNA, 1701 nt, Artificial Sequence; identical to SEQ ID NO: 167482
  derived and/or modified CDS sequence (opt4) from hemagglutinin__InfluenzaA__AEO01360

SEQ ID NO: 167511 - RNA, 1701 nt, Artificial Sequence; identical to SEQ ID NO: 163082
  derived and/or modified CDS sequence (opt4) from hemagglutinin__InfluenzaA__AEO01361

SEQ ID NO: 167512 - RNA, 1701 nt, Artificial Sequence; identical to SEQ ID NO: 167482
  derived and/or modified CDS sequence (opt4) from hemagglutinin__InfluenzaA__AEO01362

SEQ ID NO: 167513 - RNA, 1701 nt, Artificial Sequence; identical to SEQ ID NO: 163893
  derived and/or modified CDS sequence (opt4) from hemagglutinin__InfluenzaA__AEO01363

SEQ ID NO: 167514 - RNA, 1701 nt, Artificial Sequence
  derived and/or modified CDS sequence (opt4) from hemagglutinin__InfluenzaA__AEO01365
augaaggccauccugguggugcugcuguacaccuucgccaccgccaacgccgacacccugugcaucggcuaccacgccaacaacagcaccgacaccguggacaccgugcugaagaagaacgugaccgugacccacagcgugaacauccuggaggacaagcacaacggcaagcugugcaagcugagaggcguggccccccugcaccugggcaagugcaacaucgccggcuggauccugggcaaccccgagugcgagagccugagcaccgccagcagcuggagcuacaucguggagaccagcagcagcgacaacggcaccugcuaccccggcgacuucaucgacuacgaggagcugagagagcagcugagcagcgugagcagcuucgagagauucgagaucuuccccaagaccagcagcuggcccaaccacgacagcaacaagggcgugaccgccgccugcccccacgccggcgccaagagcuucuacaagaaccugaucuggcuggugaagaagggcaacagcuaccccaagcugagcaagagcuacaucaacgacaagggcaaggaggugcuggugcuguggggcauccaccaccccagcaccagcgccgaccagcagagccuguaccagaacgccgacgccuacguguucgugggcaccagcagauacagcaagaaguucaagcccgagaucgccaucagacccaaggugagagaccaggagggcagaaugaacuacuacuggacccugguggagcccggcgacaagaucaccuucgaggccaccggcaaccugguggugcccagauacgccuucgccauggagagaagcgccggcagcggcaucaucaucagcgacacccccgugcacgacugcaacaccaccugccagacccccaagggcgccaucaacaccagccugcccuuccagaacauccaccccaucaccaucggcaagugccccaaguacgugaagagcaccaagcugagacuggccaccggccugagaaacgugcccagcauccagagcagaggccuguucggcgccaucgccggcuucaucgagggcggcuggaccggcaugguggacggcugguacggcuaccaccaccagaacgagcagggcagcggcuacgccgccgaccugaagagcacccagaacgccaucgacgagaucaccaacaaggugaacagcgugaucgagaagaugaacacccaguucaccgccgugggcaaggaguucaaccaccuggagaagagaaucgagaaccugaacaagaagguggacgacggcuuccuggacaucuggaccuacaacgccgagcugcuggugcugcuggagaacgagagaacccuggacuaccacgacagcaacgugaagaaccuguacgagaaggugagaagccagcugaagaacaacgccaaggagaucggcaacggcugcuucgaguucuaccacaagugcgacaacaccugcauggagagcgugaagaacggcaccuacgacuaccccaaguacagcgaggaggccaagcugaacagagaggagaucgacggcgugaagcuggagagcaccagaaucuaccagauccuggccaucuacagcaccguggccagcagccuggugcugguggugagccugggcgccaucagcuucuggaugugcagcaacggcagccugcagugcagaaucugcaucuga

SEQ ID NO: 167515 - RNA, 1701 nt, Artificial Sequence
  derived and/or modified CDS sequence (opt4) from hemagglutinin__InfluenzaA__AEO01366
augaaggccauccugguggugcugcuguacaccuucgccaccgccaacgccgacacccugugcaucggcuaccacgccaacaacagcaccgacaccguggacaccgugcuggagaagaacgugaccgugacccacagcgugaaccugcuggaggacaagcacaacggcaagcugugcaagcugagaggcguggccccccugcaccugggcaagugcaacaucgccggcuggauccugggcaaccccgagugcgagagccugagcaccgccagcagcuggagcuacaucguggagaccagcagcagcgacaacggcaccugcuaccccggcgacuucaucgacuacgaggagcugagagagcagcugagcagcgugagcagcuucgagagauucgagaucuuccccaagaccagcagcuggcccaaccacgacagcaacaagggcgugaccgccgccugcccccacgccggcgccaagagcuucuacaagaaccugaucuggcuggugaagaagggcaacagcuaccccaagcugagcaagagcuacaucaacgacaagggcaaggaggugcuggugcuguggggcauccaccaccccagcaccagcgccgaccagcagagccuguaccagaacgccgacgccuacguguucgugggcaccagcagauacagcaagaaguucaagcccgagaucgccaucagacccaaggugagagaccaggagggcagaaugaacuacuacuggacccugguggagcccggcgacaagaucaccuucgaggccaccggcaaccugguggugcccagauacgccuucgccauggagagaaacgccggcagcggcaucaucaucagcgacacccccgugcacgacugcagcaccaccugccagacccccaagggcgccaucaacaccagccugcccuuccagaacgugcaccccaucaccaucggcaagugccccaaguacgugaagagcaccaagcugagacuggccaccggccugagaaacgugcccagcauccagagcagaggccuguucggcgccaucgccggcuucaucgagggcggcuggaccggcaugguggacggcugguacggcuaccaccaccagaacgagcagggcagcggcuacgccgccgaccugaagagcacccagaacgccaucgacgagaucaccaacaaggugaacagcgugaucgagaagaugaacacccaguucaccgccgugggcaaggaguucaaccaccuggagaagagaaucgagaaccugaacaagaagguggacgacggcuuccuggacaucuggaccuacaacgccgagcugcuggugcugcuggagaacgagagaacccuggacuaccacgacagcaacgugaagaaccuguacgagaaggugagaagccagcugaagaacaacgccaaggagaucggcaacggcugcuucgaguucuaccacaagugcgacaacaccugcauggagagcgugaagaacggcaccuacgacuaccccaaguacagcgaggaggccaagcugaacagagaggagaucgacggcgugaagcuggagagcaccagaaucuaccagauccuggccaucuacagcaccguggccagcagccuggugcugguggugagccugggcgccaucagcuucuggaugugcagcaacggcagccugcagugcagaaucugcaucuga

SEQ ID NO: 167516 - RNA, 1701 nt, Artificial Sequence; identical to SEQ ID NO: 167487
  derived and/or modified CDS sequence (opt4) from hemagglutinin__InfluenzaA__AEO01367

SEQ ID NO: 167517 - RNA, 1701 nt, Artificial Sequence
  derived and/or modified CDS sequence (opt4) from hemagglutinin__InfluenzaA__AEO01368
augaaggccauccugguggugcugcuguacaccuucgccaccgccaacgccgacacccugugcaucggcuaccacgccaacaacagcaccgacaccguggacaccgugcuggagaagaacgugaccgugacccacagcgugaaccugcuggaggacaagcacaacggcaagcugugcaagcugagaggcguggccccccugcaccugggcaagugcaacaucgccggcuggauccugggcaaccccgagugcgagagccugagcaccgccagcagcuggagcuacaucguggagaccagcagcagcgacaacggcaccugcuaccccggcgacuucaucgacuacgaggagcugagagagcagcugagcagcgugagcagcuucgagagauucgagaucuuccccaacaccagcagcuggcccaaccacgacagcaacaagggcgugaccgccgccugcccccacgccggcgccaagagcuucuacaagaaccugaucuggcuggugaagaagggcaacagcuaccccaagcugagcaagagcuacaucaacgacaagggcaaggaggugcuggugcuguggggcauccaccaccccagcaccagcgccgaccagcagagccuguaccagaacgccgacgccuacguguucgugggcaccagcagauacagcaagaaguucaagcccgagaucgccaucagacccaaggugagagaccaggagggcagaaugaacuacuacuggacccugguggagcccggcgacaagaucaccuucgaggccaccggcaaccugguggugcccagauacgccuucgccauggagagaaacgccggcagcggcaucaucaucagcgacacccccgugcacgacugcaacaccaccugccagacccccaagggcgccaucaacaccagccugcccuuccagaacauccaccccaucaccaucggcaagugccccaaguacgugaagagcaccaagcugagacuggccaccggccugagaaacgugcccagcauccagagcagaggccuguucggcgccaucgccggcuucaucgagggcggcuggaccggcaugguggacggcugguacggcuaccaccaccagaacgagcagggcagcggcuacgccgccgaccugaagagcacccagaacgccaucgacaagaucaccaacaaggugaacagcgugaucgagaagaugaacacccaguucaccgccgugggcaaggaguucaaccaccuggagaagagaaucgagaaccugaacaagaagguggacgacggcuuccuggacaucuggaccuacaacgccgagcugcuggugcugcuggagaacgagagaacccuggacuaccacgacagcaacgugaagaaccuguacgagaaggugagaagccagcugaagaacaacgccaaggagaucggcaacggcugcuucgaguucuaccacaagugcgacaacaccugcauggagagcgugaagaacggcaccuacgacuaccccaaguacagcgaggaggccaagcugaacagagaggagaucgacggcgugaagcuggagagcaccagaaucuaccagauccuggccaucuacagcaccguggccagcagccuggugcugguggugagccugggcgccaucagcuucuggaugugcagcaacggcagccugcagugcagaaucugcaucuga

SEQ ID NO: 167518 - RNA, 1701 nt, Artificial Sequence; identical to SEQ ID NO: 162729
  derived and/or modified CDS sequence (opt4) from hemagglutinin__InfluenzaA__AEO01369

SEQ ID NO: 167519 - RNA, 1701 nt, Artificial Sequence; identical to SEQ ID NO: 167447
  derived and/or modified CDS sequence (opt4) from hemagglutinin__InfluenzaA__AEO01370

SEQ ID NO: 167520 - RNA, 1701 nt, Artificial Sequence; identical to SEQ ID NO: 167494
  derived and/or modified CDS sequence (opt4) from hemagglutinin__InfluenzaA__AEO01371

SEQ ID NO: 167521 - RNA, 1701 nt, Artificial Sequence; identical to SEQ ID NO: 164326
  derived and/or modified CDS sequence (opt4) from hemagglutinin__InfluenzaA__AEO01372

SEQ ID NO: 167522 - RNA, 1701 nt, Artificial Sequence; identical to SEQ ID NO: 164326
  derived and/or modified CDS sequence (opt4) from hemagglutinin__InfluenzaA__AEO01373

SEQ ID NO: 167523 - RNA, 1701 nt, Artificial Sequence
  derived and/or modified CDS sequence (opt4) from hemagglutinin__InfluenzaA__AEO01374
augaaggccauccugguggugcugcuguacaccuucgccaccgccaacgccgacacccugugcaucggcuaccacgccaacaacagcaccgacaccguggacaccgugcuggagaagaacgugaccgugacccacagcgugaaccugcuggaggacaagcacaacggcaagcugugcaagcugagaggcguggccccccugcaccugggcaagugcgacaucgccggcuggauccugggcaaccccgagugcgagagccugagcaccgccagcagcuggagcuacaucguggagaccagcagcagcgacaacggcaccugcuaccccggcgacuucaucgacuacgaggagcugagagagcagcugagcagcgugagcagcuucgagagauucgagaucuuccccaagaccagcagcuggcccaaccacgacagcaacaagggcgugaccgccgccugcccccacgccggcgccaagagcuucuacaagaaccugaucuggcuggugaagaagggcaacagcuaccccaagcugagcaagagcuacaucaacgacaagggcaaggaggugcuggugcuguggggcauccaccaccccagcaccagcgccgaccagcagagccuguaccagaacgccgacgccuacguguucgugggcaccagcagauacagcaagaaguucaagcccgagaucgccaucagacccaaggugagagaccaggagggcagaaugaacuacuacuggacccugguggagcccggcgacaagaucaccuucgaggccaccggcaaccugguggugcccagauacgccuucgccauggagagaaacgccggcagcggcaucaucaucagcgacacccccgugcacgacugcaacaccaccugccagacccccaagggcgccaucaacaccagccugcccuuccagaacauccaccccaucaccaucggcaagugccccaaguacaucaagagcaccaagcugagacuggccaccggccugagaaacgugcccagcauccagagcagaggccuguucggcgccaucgccggcuucaucgagggcggcuggaccggcaugguggacggcugguacggcuaccaccaccagaacgagcagggcagcggcuacgccgccgaccugaagagcacccagcacgccaucgacgagaucaccaacaaggugaacagcgugaucgagaagaugaacacccaguucaccgccgugggcaaggaguucaaccaccuggagaagagaaucgagaaccugaacaagaagguggacgacggcuuccuggacaucuggaccuacaacgccgagcugcuggugcugcuggagaacgagagaacccuggacuaccacgacagcaacgugaagaaccuguacgagaaggugagaagccagcugaagaacaacgccaaggagaucggcaacggcugcuucgaguucuaccacaagugcgacaacaccugcauggagagcgugaagaacggcaccuacgacuaccccaaguacagcgaggaggccaagcugaacagagaggagaucgacggcgugaagcuggagagcaccagaaucuaccagauccuggccaucuacagcaccguggccagcagccuggugcugguggugagccugggcgccaucagcuucuggaugugcagcaacggcagccugcagugcagaaucugcaucuga

SEQ ID NO: 167524 - RNA, 1701 nt, Artificial Sequence; identical to SEQ ID NO: 167498
  derived and/or modified CDS sequence (opt4) from hemagglutinin__InfluenzaA__AEO01375

SEQ ID NO: 167525 - RNA, 1701 nt, Artificial Sequence; identical to SEQ ID NO: 162729
  derived and/or modified CDS sequence (opt4) from hemagglutinin__InfluenzaA__AEO01376

SEQ ID NO: 167526 - RNA, 1701 nt, Artificial Sequence; identical to SEQ ID NO: 164897
  derived and/or modified CDS sequence (opt4) from hemagglutinin__InfluenzaA__AEO01377

SEQ ID NO: 167527 - RNA, 1701 nt, Artificial Sequence
  derived and/or modified CDS sequence (opt4) from hemagglutinin__InfluenzaA__AEO01378
augaaggccauccugguggugcugcuguacaccuucgccaccgccaacgccgacacccugugcaucggcuaccacgccaacaacagcaccgacaccguggacaccgugcuggagaagaacgugaccgugacccacagcgugaaccugcuggaggacaagcacaacggcaagcugugcaagcugagaggcguggccccccugcaccugggcaagugcaacaucgccggcuggauccugggcaaccccgagugcgagagccugagcaccgccagcagcuggagcuacaucguggagacccccagcagcgacaacggcaccugcuaccccggcgacuucaucgacuacgaggagcugagagagcagcugagcagcgugagcagcuucgagagauucgagaucuuccccaagaccagcagcuggcccaaccacgacagcaacaagggcgugaccgccgccugcccccacgccggcgccaagagcuucuacaagaaccugaucuggcuggugaagaagggcaacagcuaccccaagcugagcaagagcuacaucaacgacaagggcaaggaggugcuggugcuguggggcauccaccaccccagcaccagcgccgaccagcagagccuguaccagaacgccgacgccuacguguucgugggcaccagcagauacagcaagaaguucaagcccgagaucgccaucagacccaaggugagagaccaggagggcagaaugaacuacuacuggacccugguggagcccggcgacaagaucaccuucgaggccaccggcaaccugguggugcccagauacgccuucgccauggagagaaacgccggcagcggcaucaucaucagcgacacccccgugcacgacugcaacaccaccugccagacccccaagggcgccaucaacaccagccugcccuuccagaacauccaccccaucaccaucggcaagugccccaaguacgugaagagcaccaagcugagacuggccaccggccugagaaacgugcccagcauccagagcagaggccuguucggcgccaucgccggcuucaucgagggcggcuggaccggcaugguggacggcugguacggcuaccaccaccagaacgagcagggcagcggcuacgccgccgaccugaagagcacccagaacgccaucgacgagaucaccaacaaggugaacagcgugaucgagaagaugaacacccaguucaccgccgugggcaaggaguucaaccaccuggagaagagaaucgagaaccugaacaagaagguggacgacggcuuccuggacaucuggaccuacaacgccgagcugcuggugcugcuggagaacgagagaacccuggacuaccacgacagcaacgugaagaaccuguacgagaaggugagaagccagcugaagaacaacgccaaggagaucggcaacggcugcuucgaguucuaccacaagugcgacaacaccugcauggagagcgugaagaacggcaccuacgacuaccccaaguacagcgaggaggccaagcugaacagagaggagaucgacggcgugaagcuggagagcaccagaaucuaccagauccuggccaucuacagcaccguggccagcagccuggugcugguggugagccugggcgccaucagcuucuggaugugcagcaacggcagccugcagugcagaaucugcaucuga

SEQ ID NO: 167528 - RNA, 1701 nt, Artificial Sequence; identical to SEQ ID NO: 163893
  derived and/or modified CDS sequence (opt4) from hemagglutinin__InfluenzaA__AEO01379

SEQ ID NO: 167529 - RNA, 1701 nt, Artificial Sequence; identical to SEQ ID NO: 167498
  derived and/or modified CDS sequence (opt4) from hemagglutinin__InfluenzaA__AEO01380

SEQ ID NO: 167530 - RNA, 1701 nt, Artificial Sequence; identical to SEQ ID NO: 167498
  derived and/or modified CDS sequence (opt4) from hemagglutinin__InfluenzaA__AEO01381

SEQ ID NO: 167531 - RNA, 1701 nt, Artificial Sequence; identical to SEQ ID NO: 163893
  derived and/or modified CDS sequence (opt4) from hemagglutinin__InfluenzaA__AEO01382

SEQ ID NO: 167532 - RNA, 1701 nt, Artificial Sequence; identical to SEQ ID NO: 164326
  derived and/or modified CDS sequence (opt4) from hemagglutinin__InfluenzaA__AEO01383

SEQ ID NO: 167533 - RNA, 1701 nt, Artificial Sequence
  derived and/or modified CDS sequence (opt4) from hemagglutinin__InfluenzaA__AEO01384
augaaggccauccugguggugcugcuguacaccuucgccaccgccaacgccgacacccugugcaucggcuaccacgccaacaacagcaccgacaccguggacaccgugcuggagaagaacgugaccgugacccacagcgugaaccugcuggaggacaagcacaacggcaagcugugcaagcugagaggcgugagcccccugcaccugggcaagugcaacaucgccggcuggauccugggcaaccccgagugcgagagccugagcaccgccagcagcuggagcuacaucguggagaccagcagcagcgacaacggcaccugcuaccccggcgacuucaucgacuacgaggagcugagagagcagcugagcagcgugagcagcuucgagagauucgagaucuuccccaagaccagcagcuggcccaaccacgacagcaacaagggcgugaccgccgccugcccccacgccggcgccaagagcuucuacaagaaccugaucuggcuggugaagaagggcaacagcuaccccaagcugagcaagagcuacaucaacgacaagggcaaggaggugcuggugcuguggggcauccaccaccccagcaccagcgccgaccagcagagccuguaccagaacgccgacgccuacguguucgugggcaccagcagauacagcaagaaguucaagcccgagaucgccaucagacccaaggugagagaccaggagggcagaaugaacuacuacuggacccugguggagcccggcgacaagaucaccuucgaggccaccggcaaccugguggugcccagauacgccuucgccauggagagaaacgccggcagcggcaucaucaucagcgacacccccgugcacgacugcaacaccaccugccagacccccaagggcgccaucaacaccagccugcccuuccagaacauccaccccaucaccaucggcaagugccccaaguacgugaagagcaccaagcugagacuggccaccggccugagaaacgugcccagcauccagagcagaggccuguucggcgccaucgccggcuucaucgagggcggcuggaccggcaugguggacggcugguacggcuaccaccaccagaacgagcagggcagcggcuacgccgccgaccugaagagcacccagaacgccaucgacgagaucaccaacaaggugaacagcgugaucgagaagaugaacacccaguucaccgccgugggcaaggaguucaaccaccuggagaagagaaucgagaaccugaacaagaagguggacgacggcuuccuggacaucuggaccuacaacgccgagcugcuggugcugcuggagaacgagagaacccuggacuaccacgacagcaacgugaagaaccuguacgagaaggugagaagccagcugaagaacaacgccaaggagaucggcaacggcugcuucgaguucuaccacaagugcgacaacaccugcauggagagcgugaagaacggcaccuacgacuaccccaaguacagcgaggaggccaagcugaacagagaggagaucgacggcgugaagcuggagagcaccagaaucuaccagauccuggccaucuacagcaccguggccagcagccuggugcugguggugagccugggcgccaucagcuucuggaugugcagcaacggcagccugcagugcagaaucugcaucuga

SEQ ID NO: 167534 - RNA, 1701 nt, Artificial Sequence
  derived and/or modified CDS sequence (opt4) from hemagglutinin__InfluenzaA__AEO01385
augaaggccauccugguggugcugcuguacaccuucgccaccgccaacgccgacacccugugcaucggcuaccacgccaacaacagcaccgacaccguggacaccgugcuggagaagaacgugaccgugacccacagcgugaacauccuggaggacaagcacaacggcaagcugugcaagcugagaggcguggccccccugcaccugggcaagugcaacaucgccggcuggauccugggcaaccccgagugcgagagccugagcaccgccagcagcuggagcuacaucguggagaccagcagcagcgacaacggcaccugcuaccccggcgacuucaucgacuacgaggagcugagagagcagcugagcagcgugagcagcuucgagagauucgagaucuuccccaagaccagcagcuggcccaaccacgacagcaacaagggcgugaccgccgccugcccccacgccggcgccaagagcuucuacaagaaccugaucuggcuggugaagaagggcaacagcuaccccaagcugagcaagagcuacaucaacgacaagggcaaggaggugcuggugcuguggggcauccaccaccccagcaccagcgccgaccagcagagccuguaccagaacgccaacgccuacguguucgugggcaccagcagauacagcaagaaguucaagcccgagaucgccaucagacccaaggugagagaccaggagggcagaaugaacuacuacuggacccugguggagcccggcgacaagaucaccuucgaggccaccggcaaccugguggugcccagauacgccuucgccauggagagaaacgccggcagcggcaucaucaucagcgacacccccgugcacgacugcaacaccaccugccagacccccaagggcgccaucaacaccagccugcccuuccagaacauccaccccaucaccaucggcaagugccccaaguacgugaagagcaccaagcugagacuggccaccggccugagaaacgugcccagcauccagagcagaggccuguucggcgccaucgccggcuucaucgagggcggcuggaccggcaugguggacggcugguacggcuaccaccaccagaacgagcagggcagcggcuacgccgccgaccugaagagcacccagaacgccaucgacgagaucaccaacaaggugaacagcgugaucgagaagaugaacacccaguucaccgccgugggcaaggaguucaaccaccuggagaagagaaucgagaaccugaacaagaagguggacgacggcuuccuggacaucuggaccuacaacgccgagcugcuggugcugcuggagaacgagagaacccuggacuaccacgacagcaacgugaagaaccuguacgagaaggugagaagccagcugaagaacaacgccaaggagaucggcaacggcugcuucgaguucuaccacaagugcgacaacaccugcauggagagcgugaagaacggcaccuacgacuaccccaaguacagcgaggaggccaagcugaacagagaggagaucgacggcgugaagcuggagagcaccagaaucuaccagauccuggccaucuacagcaccguggccagcagccuggugcugguggugagccugggcgccaucagcuucuggaugugcagcaacggcagccugcagugcagaaucugcaucuga

SEQ ID NO: 167535 - RNA, 1701 nt, Artificial Sequence; identical to SEQ ID NO: 167438
  derived and/or modified CDS sequence (opt4) from hemagglutinin__InfluenzaA__AEO01386

SEQ ID NO: 167536 - RNA, 1701 nt, Artificial Sequence
  derived and/or modified CDS sequence (opt4) from hemagglutinin__InfluenzaA__AEO01387
augaaggccauccugguggugcugcuguacaccuucgccaccgccaacgccgacacccugugcaucggcuaccacgccaacaacagcaccgacaccguggacaccgugcuggagaagaacgugaccgugacccacagcgugaacauccuggaggacaagcacaacggcaagcugugcaagcugagaggcguggccccccugcaccugggcaagugcaacaucgccggcuggauccugggcaaccccgagugcgagagccugagcaccgccagcagcuggagcuacaucguggagaccagcagcagcgacaacggcaccugcuaccccggcgacuucaucgacuacgaggagcugagagagcagcugagcagcgugagcagcuucgagagauucgagaucuuccccaagaccagcagcuggcccaaccacgacagcaacaagggcgugaccgccgccugcccccacgccggcgccaagagcuucuacaagaaccugaucuggcuggugaagaagggcaacagcuaccccaagcugagcaagagcuacaucaacgacaagggcaaggaggugcuggugcuguggggcauccaccaccccagcaccagcgccgaccagcagagccuguaccagaacgccgacgccuacguguucgugggcaccagcagauacagcaagaaguucaagcccgagaucgccaucagacccaaggugagagaccaggagggcagaaugaacuacuacuggacccugguggagcccggcgacaagaucaccuucgaggccaccggcaaccugguggugcccagauacgccuucgccauggagagaaacgccggcagcggcaucaucaucagcgacacccccgugcacgacugcaacaccaccugccagacccccaagggcgccaucaacaccagccugcccuuccagaacauccaccccaucaccaucggcaagugccccaaguacgugaagagcaccaagcugagacuggccaccggccugagaaacgugcccagcauccagagcagaggccuguucggcgccaucgccggcuucaucgagggcggcuggaccggcaugguggacggcugguacggcuaccaccaccagaacgagcagggcagcggcuacgccgccgaccugaagagcacccagaacgccaucgacgagaucaccaacaaggugaacagcgugaucgagaagaugaacauccaguucaccgccgugggcaaggaguucaaccaccuggagaagagaaucgagaaccugaacaagaagguggacgacggcuuccuggacaucuggaccuacaacgccgagcugcuggugcugcuggagaacgagagaacccuggacuaccacgacagcaacgugaagaaccuguacgagaaggugagaagccagcugaagaacaacgccaaggagaucggcaacggcugcuucgaguucuaccacaagugcgacaacaccugcauggagagcgugaagaacggcaccuacgacuaccccaaguacagcgaggaggccaagcugaacagagaggagaucgacggcgugaagcuggagagcaccagaaucuaccagauccuggccaucuacagcaccguggccagcagccuggugcugguggugagccugggcgccaucagcuucuggaugugcagcaacggcagccugcagugcagaaucugcaucuga

SEQ ID NO: 167537 - RNA, 1701 nt, Artificial Sequence
  derived and/or modified CDS sequence (opt4) from hemagglutinin__InfluenzaA__AEO01388
augaaggccauccugguggugcugcuguacaccuucgccaccgccaacgccgacacccugugcaucggcuaccacgccaacaacagcaccgacaccguggacaccgugcuggagaagaacgugaccgugacccacagcgugaaccugcuggaggacaagcacaacggcaagcugugcaagcugagaggcguggccccccugcaccugggcaagugcaacaucgccggcuggauccugggcaaccccgagugcgagagccugagcaccgccagcagcuggagcuacaucguggagaccagcagcagcgacaacggcaccugcuaccccggcgacuucaucgacuacgaggagcugagagagcagcugagcagcgugagcagcuucgagaaguucgagaucuuccccaagaccagcagcuggcccaaccacgacagcaacaagggcgugaccgccgccugcccccacgccggcgccaagagcuucuacaagaaccugaucuggcuggugaagaagggcaacagcuaccccaagcugagcaagagcuacaucaacgacaagggcaaggaggugcuggugcuguggggcauccaccaccccagcaccagcgccgaccagcagagccuguaccagaacgccgacgccuacguguucgugggcaccagcagauacagcaagaaguucaagcccgagaucgccaucagacccaaggugagagaccaggagggcagaaugaacuacuacuggacccugguggagcccggcgacaagaucaccuucgaggccaccggcaaccugguggugcccagauacgccuucgccauggagagaaacgccggcagcggcaucaucaucagcgacacccccgugcacgacugcaacaccaccugccagacccccaagggcgccaucaacaccagccugcccuuccagaacauccaccccaucaccaucggcaagugccccaaguacgugaagagcaccaagcugagacuggccaccggccugagaaacgugcccagcauccagagcagaggccuguucggcgccaucgccggcuucaucgagggcggcuggaccggcaugguggacggcugguacggcuaccaccaccagaacgagcagggcagcggcuacgccgccgaccugaagagcacccagaacgccaucgacaagaucaccaacaaggugaacagcgugaucgagaagaugaacacccaguucaccgccgugggcaaggaguucaaccaccuggagaagagaaucgagaaccugaacaagaagguggacgacggcuuccuggacaucuggaccuacaacgccgagcugcuggugcugcuggagaacgagagaacccuggacuaccacgacagcaacgugaagaaccuguacgagaaggugagaagccagcugaagaccaacgccaaggagaucggcaacggcugcuucgaguucuaccacaagugcgacaacaccugcauggagagcgugaagaacggcaccuacgacuaccccaaguacagcgaggaggccaagcugaacagagaggagaucgacggcgugaagcuggagagcaccagaaucuaccagauccuggccaucuacagcaccguggccagcagccuggugcugguggugagccugggcgccaucagcuucuggaugugcagcaacggcagccugcagugcagaaucugcaucuga

SEQ ID NO: 167538 - RNA, 1701 nt, Artificial Sequence
  derived and/or modified CDS sequence (opt4) from hemagglutinin__InfluenzaA__AEO01389
augaaggccauccugguggugcugcuguacaccuucgccaccgccaacgccgacacccugugcaucggcuaccacgccaacaacagcaccgacaccguggacaccgugcuggagaagaacgugaccgugacccacagcgugaaccugcuggaggacaagcacaacggcaagcugugcaagcugagaggcguggccccccugcaccugggcaagugcaacaucgccggcuggauccugggcaaccccgagugcgagagccugagcaccgccagcagcuggagcuacaucguggagaccagcagcagcgacaacggcaccugcuaccccggcgacuucaucgacuacgaggagcugagagagcagcugagcagcgugagcagcuucgagagauucgagaucuuccccaagaccagcagcuggcccaaccacgacagcaacaagggcgugaccgccgccugcccccacgccggcaccaagagcuucuacaagaaccugaucuggcuggugaagaagggcaacagcuaccccaagcugagcaagagcuacaucaacgacaagggcaaggaggugcuggugcuguggggcauccaccaccccagcaccagcgccgaccagcagagccuguaccagaacgccgacgccuacguguucgugggcaccagcagauacagcaagaaguucaagcccgagaucgccaucagacccaaggugagagaccaggagggcagaaugaacuacuacuggacccugguggagcccggcgacaagaucaccuucgaggccaccggcaaccugguggugcccagauacgccuucgccauggagagaaacgccggcagcggcaucaucaucagcgacacccccgugcacgacugcaacaccaccugccagacccccaagggcgccaucaacaccagccugcccuuccagaacauccaccccaucaccaucggcaagugccccaaguacgugaagagcaccaagcugagacuggccaccggccugagaaacgugcccagcauccagagcagaggccuguucggcgccaucgccggcuucaucgagggcggcuggaccggcaugguggacggcugguacggcuaccaccaccagaacgagcagggcagcggcuacgccgccgaccugaagagcacccagaacgccaucgacaagaucaccaacaaggugaacagcgugaucgagaagaugaacacccaguucaccgccgugggcaaggaguucaaccaccuggagaagagaaucgagaaccugaacaagaagguggacgacggcuuccuggacaucuggaccuacaacgccgagcugcuggugcugcuggagaacgagagaacccuggacuaccacgacagcaacgugaagaaccuguacgagaaggugagaagccagcugaagaacaacgccaaggagaucggcaacggcugcuucgaguucuaccacaagugcgacaacaccugcauggagagcgugaagaacggcaccuacgacuaccccaaguacagcgaggaggccaagcugaacagagaggagaucgacggcgugaagcuggagagcaccagaaucuaccagauccuggccaucuacagcaccguggccagcagccuggugcugguggugagccugggcgccaucagcuucuggaugugcagcaacggcagccugcagugcagaaucugcaucuga

SEQ ID NO: 167539 - RNA, 1701 nt, Artificial Sequence
  derived and/or modified CDS sequence (opt4) from hemagglutinin__InfluenzaA__AEO01390
augaaggccauccugguggugcugcuguacaccuucgccaucgccaacgccgacacccugugcaucggcuaccacgccaacaacagcaccgacaccguggacaccgugcuggagaagaacgugaccgugacccacagcgugaaccugcuggaggacaagcacaacggcaagcugugcaagcugagaggcguggccccccugcaccugggcaagugcaacaucgccggcuggauccugggcaaccccgagugcgagagccugagcaccgccagcagcuggagcuacaucguggagaccagcagcagcgacaacggcaccugcuaccccggcgacuucaucgacuacgaggagcugagagagcagcugagcagcgugagcagcuucgagagauucgagaucuuccccaagaccagcagcuggcccaaccacgacagcaacaagggcgugaccgccgccugcccccacgccggcgccaagagcuucuacaagaaccugaucuggcuggugaagaagggcaacagcuaccccaagcugagcaagagcuacaucaacgacaagggcaaggaggugcuggugcuguggggcauccaccaccccagcaccagcgccgaccagcagagccuguaccagaacgccgacgccuacguguucguggagaccagcagauacagcaagaaggugaagcccgagaucgccaucagacccagagugagagaccaggagggcagaaugaacuacuacuggacccugguggagcccggcgacaagaucaccuucgaggccaccggcaaccugguggugcccagauacgccuucgccauggagagaaacgccggcagcggcaucaucaucagcgacacccccgugcacgacugcaacaccaccugccagacccccaagggcgccaucaacaccagccugcccuuccagaacauccaccccaucaccaucggcaagugccccaaguacgugaagagcaccaagcugagacuggccaccggccugagaaacgugcccagcauccagagcagaggccuguucggcgccaucgccggcuucaucgagggcggcuggaccggcaugguggacggcugguacggcuaccaccaccagaacgagcagggcagcggcuacgccgccgaccugaagagcacccagcacgccaucgacgagaucaccaacaaggugaacagcgugaucgagaagaugaacacccaguucaccgccgugggcaaggaguucaaccaccuggagaagagaaucgagaaccugaacaagaagguggacgacggcuuccuggacaucuggaccuacaacgccgagcugcuggugcugcuggagaacgagagaacccuggacuaccacgacagcaacgugaagaaccuguacgagaaggugagaagccagcugaagaacaacgccaaggagaucggcaacggcugcuucgaguucuaccacaagugcgacaacaccugcauggagagcgugaagaacggcaccuacgacuaccccaaguacagcgagguggccaagcugaacagagaggagaucaacggcgugaagcuggagagcaccagaaucuaccagauccuggccaucuacagcaccguggccagcagccuggugcugguggugagccugggcgccaucagcuucuggaugugcagcaacggcagccugcagugcagaaucugcaucuga

SEQ ID NO: 167540 - RNA, 1701 nt, Artificial Sequence; identical to SEQ ID NO: 167438
  derived and/or modified CDS sequence (opt4) from hemagglutinin__InfluenzaA__AEO01391

SEQ ID NO: 167541 - RNA, 1701 nt, Artificial Sequence; identical to SEQ ID NO: 167447
  derived and/or modified CDS sequence (opt4) from hemagglutinin__InfluenzaA__AEO01392

SEQ ID NO: 167542 - RNA, 1701 nt, Artificial Sequence; identical to SEQ ID NO: 164326
  derived and/or modified CDS sequence (opt4) from hemagglutinin__InfluenzaA__AEO01393

SEQ ID NO: 167543 - RNA, 1701 nt, Artificial Sequence; identical to SEQ ID NO: 163830
  derived and/or modified CDS sequence (opt4) from hemagglutinin__InfluenzaA__AEO01394

SEQ ID NO: 167544 - RNA, 1701 nt, Artificial Sequence
  derived and/or modified CDS sequence (opt4) from hemagglutinin__InfluenzaA__AEO01395
augaaggccauccugguggugcugcuguacaccuucgccaccgccaacgccgacacccugugcaucggcuaccacgccaacaacagcaccgacaccguggacaccgugcuggagaagaacgugaccgugacccacagcgugaaccugcuggaggacaagcacaacggcaagcugugcaagcugagaggcguggccccccugcaccugggcaagugcaacaucgccggcuggauccugggcaaccccgagugcgagagccugagcaccgccagcagcuggagcuacaucguggagaccagcagcagcgacaacggcaccugcuaccccggcgacuuccuggacuacgaggagcugagagagcagcugagcagcgugagcagcuucgagagauucgagaucuuccccaagaccagcagcuggcccaaccacgacagcaacaagggcgugaccgccgccugcccccacgccggcgccaagagcuucuacaagaaccugaucuggcuggugaagaagggcaacagcuaccccaagcugagcaagagcuacaucaacgacaagggcaaggaggugcuggugcuguggggcauccaccaccccagcaccagcgccgaccagcagagccuguaccagaacgccgacgccuacguguucgugggcaccagcagauacagcaagaaguucaagcccgagaucgccaucagacccaaggugagagagcaggagggcagaaugaacuacuacuggacccugguggagcccggcgacaagaucaccuucgaggccaccggcaaccugguggugcccagauacgccuucgccauggagagaaacgccggcagcggcaucaucaucagcgacacccccgugcacgacugcaacaccaccugccagacccccaagggcgccaucaacaccagccugcccuuccagaacauccaccccaucaccaucggcaagugccccaaguacgugaagagcaccaagcugagacuggccaccggccugagaaacgugcccagcauccagagcagaggccuguucggcgccaucgccggcuucaucgagggcggcuggaccggcaugguggacggcugguacggcuaccaccaccagaacgagcagggcagcggcuacgccgccgaccugaagagcacccagaacgccaucgacgagaucaccaacaaggugaacagcgugaucgagaagaugaacacccaguucaccgccgugggcaaggaguucaaccaccuggagaagagaaucgagaaccugaacaagaagguggacgacggcuuccuggacaucuggaccuacaacgccgagcugcuggugcugcuggagaacgagagaacccuggacuaccacgacagcaacgugaagaaccuguacgagaaggugagaagccagcugaagaacaacgccaaggagaucggcaacggcugcuucgaguucuaccacaagugcgacaacaccugcauggagagcgugaagaacggcaccuacgacuaccccaaguacagcgaggaggccaagcugaacagagaggagaucgacggcgugaagcuggagagcaccagaaucuaccagauccuggccaucuacagcaccguggccagcagccuggugcugguggugagccugggcgccaucagcuucuggaugugcagcaacggcagccugcagugcagaaucugcaucuga

SEQ ID NO: 167545 - RNA, 1701 nt, Artificial Sequence; identical to SEQ ID NO: 163830
  derived and/or modified CDS sequence (opt4) from hemagglutinin__InfluenzaA__AEO01396

SEQ ID NO: 167546 - RNA, 1701 nt, Artificial Sequence
  derived and/or modified CDS sequence (opt4) from hemagglutinin__InfluenzaA__AEO01397
augaaggccauccugguggugcugcuguacaccuucgccaccgccaacgccgacacccugugcaucggcuaccacgccaacaacagcaccgacaccguggacaccgugcuggagaagaacgugaccgugacccacagcgugaacauccuggaggacaagcacaacggcaagcugugcaagcugagaggcguggccccccugcaccugggcaagugcaacaucgccggcuggauccugggcaaccccgagugcgagagccugagcaccgccagcagcuggagcuacaucguggagaccagcagcagcgacaacggcaccugcuaccccggcgacuucaucgacuacgaggagcugagagagcagcugagcagcgugagcagcuucgagagauucgagaucuuccccaagaccagcagcuggcccaaccacgacagcaacaagggcgugaccgccgccugcccccacgccggcgccaagagcuucuacaagaaccugaucuggcuggugaagaagggcaacagcuaccccaagcugagcaagagcuacaucaacgacaagggcaaggaggugcuggugcuguggggcauccaccaccccagcaccagcgccgaccagcagagccuguaccagaacaccgacgccuacguguucgugggcaccagcagauacagcaagaaguucaagcccgagaucgccaucagacccaaggugagagaccaggagggcagaaugaacuacuacuggacccugguggagcccggcgacaagaucaccuucgaggccaccggcaaccugguggugcccagauacgccuucgccauggagagaaacgccggcagcggcaucaucaucagcgacacccccgugcacgacugcaacaccaccugccagacccccaagggcgccaucaacaccagccugcccuuccagaacauccaccccaucaccaucggcaagugccccaaguacgugaagagcaccaagcugagacuggccaccggccugagaaacgugcccagcauccagagcagaggccuguucggcgccaucgccggcuucaucgagggcggcuggaccggcaugguggacggcugguacggcuaccaccaccagaacgagcagggcagcggcuacgccgccgaccugaagagcacccagaacgccaucgacgagaucaccaacaaggugaacagcgugaucgagaagaugaacacccaguucaccgccgugggcaaggaguucaaccaccuggagaagagaaucgagaaccugaacaagaagguggacgacggcuuccuggacaucuggaccuacaacgccgagcugcuggugcugcuggagaacgagagaacccuggacuaccacgacagcaacgugaagaaccuguacgagaaggugagaagccagcugaagaacaacgccaaggagaucggcaacggcugcuucgaguucuaccacaagugcgacaacaccugcauggagagcgugaagaacggcaccuacgacuaccccaaguacagcgaggaggccaagcugaacagagaggagaucgacggcgugaagcuggagagcaccagaaucuaccagauccuggccaucuacagcaccguggccagcagccuggugcugguggugagccugggcgccaucagcuucuggaugugcagcaacggcagccugcagugcagaaucugcaucuga

SEQ ID NO: 167547 - RNA, 1701 nt, Artificial Sequence
  derived and/or modified CDS sequence (opt4) from hemagglutinin__InfluenzaA__AEO01398
augaaggccauccugguggugcugcuguacaccuucgccaccgccaacgccgacacccugugcaucggcuaccacgccaacaacagcaccgacaccguggacaccgugcuggagaagaacgugaccgugacccacagcgugaaccugcuggaggacaagcacaacggcaagcugugcaagcugagaggcguggccccccugcaccugggcaagugcaacaucgccggcuggauccugggcaaccccgagugcgagagccugagcaccgccagcagcuggagcuacaucguggagaccagcagcagcgacaacggcaccugcuaccccggcgacuucaucgacuacgaggagcugagagagcagcugagcagcgugagcagcuucgagagauucgagaucuuccccaagaccagcagcuggcccaaccacgacagcaacaagggcgugaccgccgccugcccccacgccggcgccaagagcuucuacaagaaccugaucuggcuggugaagaagggcaacagcuaccccaagcugagcaagagcuacaucaacgacaagggcaaggaggugcuggugcuguggggcauccaccaccccagcaccagcgccgaccagcagagccuguaccagaacgccgacgccaacguguucgugggcaccagcagauacagcaagaaguucaagcccgagaucgccaucagacccaaggugagaggccaggagggcagaaugaacuacuacuggacccugguggagcccggcgacaagaucaccuucgaggccaccggcaaccugguggugcccagauacgccuucgccauggagagaaacgccggcagcggcaucaucaucagcgacacccccgugcacgacugcaacaccaccugccagacccccaagggcgccaucaacaccagccugcccuuccagaacauccaccccaucaccaucggcaagugccccaaguacgugaagagcaccaagcugagacuggccaccggccugagaaacgugcccagcauccagagcagaggccuguucggcgccaucgccggcuucaucgagggcggcuggaccggcaugguggacggcugguacggcuaccaccaccagaacgagcagggcagcggcuacgccgccgaccugaagagcacccagaacgccaucgacgagaucaccaacaaggugaacagcgugaucgagaagaugaacacccaguucaccgccgugggcaaggaguucaaccaccuggagaagagaaucgagaaccugaacaagaagguggacgacggcuuccuggacaucuggaccuacaacgccgagcugcuggugcugcuggagaacgagagaacccuggacuaccacgacagcaacgugaagaaccuguacgagaaggugagaaaccagcugaagaacaacgccaaggagaucggcaacggcugcuucgaguucuaccacaagugcgacaacaccugcauggagagcgugaagaacggcaccuacgacuaccccaaguacagcgaggaggccaagcugaacagagaggagaucgacggcgugaagcuggagagcaccagaaucuaccagauccuggccaucuacagcaccguggccagcagccuggugcugguggugagccugggcgccaucagcuucuggaugugcagcaacggcagccugcagugcagaaucugcaucuga

SEQ ID NO: 167548 - RNA, 1701 nt, Artificial Sequence; identical to SEQ ID NO: 167447
  derived and/or modified CDS sequence (opt4) from hemagglutinin__InfluenzaA__AEO01399

SEQ ID NO: 167549 - RNA, 1701 nt, Artificial Sequence; identical to SEQ ID NO: 162729
  derived and/or modified CDS sequence (opt4) from hemagglutinin__InfluenzaA__AEO01402

SEQ ID NO: 167550 - RNA, 1701 nt, Artificial Sequence; identical to SEQ ID NO: 163893
  derived and/or modified CDS sequence (opt4) from hemagglutinin__InfluenzaA__AEO01403

SEQ ID NO: 167551 - RNA, 1701 nt, Artificial Sequence; identical to SEQ ID NO: 162729
  derived and/or modified CDS sequence (opt4) from hemagglutinin__InfluenzaA__AEO01404

SEQ ID NO: 167552 - RNA, 1701 nt, Artificial Sequence
  derived and/or modified CDS sequence (opt4) from hemagglutinin__InfluenzaA__AEO01405
augaaggccauccugguggugcugcuguacaccuucgccaccgccaacgccgacacccugugcaucggcuaccacgccaacaacagcaccgacaccguggacaccgugcuggagaagaacgugaccgugacccacagcgugaaccugcuggaggacaagcacaacggcaagcugugcaagcugagaggcguggccccccugcaccugggcaagugcaacaucgccggcuggauccugggcaaccccgagugcgagagccugagcaccgccagcagcuggagcuacaucguggagaccagcagcagcgacaacggcaccugcuaccccggcgacuucaucgacuacgaggagcugagagagcagcugagcagcgugagcagcuucgagagauucgagaucuuccccaagaccagcagcuggcccaaccacgacagcaacaagggcgugaccgccgccugcccccacgccggcgccaagagcuucuacaagaaccugaucuggcuggugaagaagggcaacagcuaccccaagcugagcaagagcuacaucaacgacaagggcaaggaggugcuggugcuguggggcauccaccaccccagcaccagcgccgaccagcagagccuguaccagaacgccgacgccuacguguucgugggcaccagcagauacagcaagaaguucaagcccgagaucgccaucagacccaaggugagagaccaggagggcagaaugaacuacuacuggacccugguggagcccggcgacaagaucaccuucgaggccaccggcaaccugguggugcccagauacgccuucgccauggagagaaacgccggcagcggcaucaucaucagcgacacccccgugcacgacugcaacaccaccugccagacccccaagggcgccaucaacaccagccugcccuuccagaacauccaccccaucaccaucggcaagugccccaaguacgugaagagcaccaagcugagacuggccaccggccugagaaacgugcccagcauccagagcagaggccuguucggcgccaucgccggcuucaucgagggcggcuggaccggcaugguggacggcugguacggcuaccaccaccagaacgagcagggcagcggcuacgccgccgaccugaagagcacccagaacgccaucgacgagaucaccaacaaggugaacagcgugaucgagaagaugaacacccaguucaccgccgugggcaaggaguucaaccaccuggagaagagaaucgagaaccugaacaagaagguggacgacggcuuccuggacaucuggaccuacaacgccgagcugcuggugcugcuggagaacgagagaacccuggacuaccacgacagcaacgugaagaaccuguacgagaaggugagaagccagcugaagaacaacgccaaggagaucggcaacggcugcuucgaguucuaccacaagugcgacaacaccugcauggagagcgugaagaacggcaccuacgacuaccccaaguacagcgaggaggccaagcugaacagagaggagaucgacggcgugaagcuggagagcaccaugaucuaccagauccuggccaucuacagcaccguggccagcagccuggugcugguggugagccugggcgccaucagcuucuggaugugcagcaacggcagccugcagugcagaaucugcaucuga

SEQ ID NO: 167553 - RNA, 1701 nt, Artificial Sequence
  derived and/or modified CDS sequence (opt4) from hemagglutinin__InfluenzaA__AEO01407
augaaggccauccugguggugcugcuguacaccuucgccaccgccaacgccgacacccugugcaucggcuaccacgccaacaacagcaccgacaccguggacaccgugcuggagaagaacgugaccgugacccacagcgugaaccugcuggaggacaagcacaacggcaagcugugcaagcugagaggcguggccccccugcaccugggcaagugcaacaucgccggcuggauccugggcaaccccgagugcgagagccugagcaccgccagcagcuggagcuacaucguggagaccagcagcagcgacaacggcaccugcuaccccggcgacuucaucgacuacgaggagcugagagagcagcugagcagcgugagcagcuucgagagauucgagaucuuccccaagaccagcagcuggcccaaccacgacagcaacaagggcgugaccgccgccugcccccacgccggcgccaagagcuucuacaagaaccugaucuggcuggugaagaagggcaacagcuaccccaagcugagcaagagcuacaucaacgacaagggcaaggaggugcuggugcuguggggcauccaccaccccagcaccagcgccgaccagcagagccuguaccagaacgccgacgccuacguguucgugggcaccagcagauacagcaagaaguucaagcccgagaucgccaucagacccaaggugagagaccaggagggcagaaugaacuacuacuggacccugguggagcccggcgacaagaucaccuucgaggccaccggcaaccugguggugcccagauacgccuucgccauggagagaaacgccggcagcggcaucaucaucagcgacacccccgugcacgacugcaacaccaccugccagacccccaagggcgccaucaacaccagccugcccuuccagaacauccaccccaucaccaucggcaagugccccaaguacgugaagagcaccaagcugagacuggccaccggccugagaaacgugcccagcauccagagcagaggccuguucggcgccaucgccggcuucaucgagggcggcuggaccggcaugguggacggcugguacggcuaccaccaccagaacgagcagggcagcggcuacgccgccgaccugaagagcacccagcacgccaucgacgagaucaccaacaaggugaacagcgugaucgagaagaugaacacccaguucaccgccgugggcaaggaguucaaccaccuggagaagagaaucgagaaccugaacaagaagguggacgacggcuuccuggacaucuggaccuacaacgccgagcugcuggugcugcuggagaacgagagaacccuggacuaccacgacagcaacgugaagaaccuguacgagaaggugagaagccagcugaagaacaacgccaaggagaucggcaacggcugcuucgaguucuaccacaagugcgacaacaccugcauggagagcgugaagaacggcaccuacgacuaccccaaguacagcgaggaggccaagcugaacagagaggagaucaacggcgugaagcuggagagcaccagaaucuaccagauccuggccaucuacagcaccguggccagcagccuggugcugguggugagccugggcgccaucagcuucuggaugugcagcaacggcagccugcagugcagaaucugcaucuga

SEQ ID NO: 167554 - RNA, 1701 nt, Artificial Sequence
  derived and/or modified CDS sequence (opt4) from hemagglutinin__InfluenzaA__AEO01408
augaaggccauccugguggugcugcuguacaccuucgccaccgccaacgccgacacccugugcaucggcuaccacgccaacaacagcaccgacaccguggacaccgugcuggagaagaacgugaccgugacccacagcgugaaccugcuggaggacaagcacaacggcaagcugugcaagcugagaggcguggccccccugcaccugggcaagugcaacaucgccggcuggauccugggcaaccccgagugcgagagccugagcaccgccagcagcuggagcuacaucguggagaccagcagcagcgacaacggcaccugcuaccccggcgacuucaucgacuacgaggagcugagagagcagcugagcagcgugagcagcuucgagagauucgagaucuuccccaagaccagcagcuggcccaaccacgacagcaacaagggcgugaccgccgccugcccccacgccggcgccaagagcuucuacaagaaccugaucuggcuggugaagaagggcaacagcuaccccaagcugagcaagagcuacaucaacgacaagggcaaggaggugcuggugcuguggggcauccaccaccccagcaccagcgccgaccagcagagccuguaccagaacgccgacgccuacguguucgugggcaccagcagauacagcaagaaguucaagcccgagaucgccaucagacccaaggugagagagcaggagggcagaaugaacuacuacuggacccugguggagcccggcgacaagaucaccuucgaggccaccggcaaccugguggugcccagauacgccuucgccauggagagaaacgccggcagcggcaucaucaucagcgacacccccgugcacgacugcaacaccaccugccagacccccaagggcgccaucaacaccagccugcccuuccagaacauccaccccaucaccaucggcaagugccccaaguacgugaagagcaccaagcugagacuggccaccggccugagaaacgugcccagcauccagagcagaggccuguucggcgccaucgccggcuucaucgagggcggcuggaccggcaugguggacggcugguacggcuaccaccaccagaacgagcagggcagcggcuacgccgccgaccugaagagcacccagaacgccaucgacgagaucaccaacaaggugaacagcgugaucgagaagaugaacacccaguucaccgccgugggcaaggaguucaaccaccuggagaagagaaucgagaaccugaacaagaagaucgacgacggcuuccuggacaucuggaccuacaacgccgagcugcuggugcugcuggagaacgagagaacccuggacuaccacgacagcaacgugaagaaccuguacgagaaggugagaagccagcugaagaacaacgccaaggagaucggcaacggcugcuucgaguucuaccacaagugcgacaacaccugcauggagagcgugaagaacggcaccuacgacuaccccaaguacagcgaggaggccaagcugaacagagaggagaucgacggcgugaagcuggagagcaccagaaucuaccagauccuggccaucuacagcaccguggccagcagccuggugcugguggugagccugggcgccaucagcuucuggaugugcagcaacggcagccugcagugcagaaucugcaucuga

SEQ ID NO: 167555 - RNA, 1701 nt, Artificial Sequence; identical to SEQ ID NO: 163831
  derived and/or modified CDS sequence (opt4) from hemagglutinin__InfluenzaA__AEO01409

SEQ ID NO: 167556 - RNA, 1701 nt, Artificial Sequence; identical to SEQ ID NO: 167447
  derived and/or modified CDS sequence (opt4) from hemagglutinin__InfluenzaA__AEO01410

SEQ ID NO: 167557 - RNA, 1701 nt, Artificial Sequence; identical to SEQ ID NO: 166148
  derived and/or modified CDS sequence (opt4) from hemagglutinin__InfluenzaA__AEO01411

SEQ ID NO: 167558 - RNA, 1701 nt, Artificial Sequence; identical to SEQ ID NO: 163082
  derived and/or modified CDS sequence (opt4) from hemagglutinin__InfluenzaA__AEO01412

SEQ ID NO: 167559 - RNA, 1701 nt, Artificial Sequence
  derived and/or modified CDS sequence (opt4) from hemagglutinin__InfluenzaA__AEO01413
augaaggccauccugguggugcugcuguacaccuucgccaccgccaacgccgacacccugugcaucggcuaccacgccaacaacagcaccgacaccguggacaccgugcuggagaagaacgugaccgugacccacagcgugaaccugcuggaggacaagcacaacggcaagcugugcaagcugagaggcguggccccccugcaccugggcaagugcaacaucgccggcuggauccugggcaaccccgagugcgagagccugagcaccgccagcagcuggagcuacaucguggagaccagcagcagcgacaacggcaccugcuaccccggcgacuucaucgacuacgaggagcugagagagcagcugagcagcgugagcagcuucgagagauucgagaucuuccccaagaccagcagcuggcccaaccacgacagcaacaagggcgugaccgccgccugcccccacgccggcgccaagagcuucuacaagaaccugaucuggcuggugaagaagggcaacagcuaccccaagcugagcaagagcuacaucaacgacaagggcaaggaggugcuggugcuguggggcauccaccaccccagcaccagcgccgaccagcagagccuguaccagaacgccgacgccuacguguucgugggcaccagcagauacagcaagaaguucaagcccgagaucgccaucagacccaaggugagagaccaggagggcagaaugaacuacuacuggacccugguggagcccggcgacaagaucaccuucgaggccaccggcaaccugguggugcccagauacgccuucgccauggagagaaacgccggcagcggcaucaucaucagcgacacccccgugcacgacugcaacaccaccugccagacccccaagggcgccaucaacaccagccugcccuuccagaacauccaccccaucaccaucggcaagugccccaaguacgugaagagcaccaagcugagacuggccaccggccugagaaacgugcccagcauccagagcagaggccuguucggcgccaucgccggcuucaucgagggcggcuggaccggcaugguggacggcugguacggcuaccaccaccagaacgagcagggcagcggcuacgccgccgaccugaagagcacccagaacgccaucgacaagaucaccaacaaggugaacagcgugaucgagaagaugaacacccaguucaccgccgugggcaaggaguucaaccaccuggagaagagaaucgagaaccugaacaagaagguggacgacggcuuccuggacaucuggaccuacaacgccgagcugcuggugcugcuggagaacgagagaacccuggacuaccacgacagcaacgugaagaaccuguacgagaaggugagaagccagcugaagagcaacgccaaggagaucggcaacggcugcuucgaguucuaccacaagugcgacaacaccugcauggagagcgugaagaacggcaccuacgacuaccccaaguacagcgaggaggccaagcugaacagagaggagaucgacggcgugaagcuggagagcaccagaaucuaccagauccuggccaucuacagcaccguggccagcagccuggugcugguggugagccugggcgccaucagcuucuggaugugcagcaacggcagccugcagugcagaaucugcaucuga

SEQ ID NO: 167560 - RNA, 1701 nt, Artificial Sequence
  derived and/or modified CDS sequence (opt4) from hemagglutinin__InfluenzaA__AEO01414
augaaggccauccugguggugcugcuguacaccuucgccaccgccaacgccgacacccugugcaucggcuaccacgccaacaacagcaccgacaccguggacaccgugcuggagaagaacgugaccgugacccacagcgugaaccugcuggaggacaagcacaacggcaagcugugcaagcugagaggcguggccccccugcaccugggcaagugcaacaucgccggcuggauccugggcaaccccgagugcgagagccugagcaccgccagcagcuggagcuacaucguggagaccagcagcagcgacaacggcaccugcuaccccggcgacuucaucgacuacgaggagcugagagagcagcugagcagcgugagcagcuucgagagauucgagaucuuccccaagaccagcagcuggcccaaccacgacagcaacaagggcgugaccgccgccugcccccacgccggcgccaagagcuucuacaagaaccugaucuggcuggugaagaagggcaacagcuaccccaagcugagcaagagcuacaucaacgacaagggcaaggaggugcuggugcuguggggcauccaccaccccagcaccagcgccgaccagcagagccuguaccagaacgccgacgccuacguguucgugggcaccagcagauacagcaagaaguucaagcccgagaucgccaucagacccaaggugagagaccaggagggcagaaugaacuacuacuggacccugguggagcccggcgacaagaucaccuucgaggccaccggcaaccugguggugcccagauacgccuucgccauggagagaaacaccggcagcggcaucaucaucagcgacacccccgugcacgacugcagcaccaccugccagacccccaagggcgccaucaacaccagccugcccuuccagaacgugcaccccaucaccaucggcaagugccccaaguacgugaagagcaccaagcugagacuggccaccggccugagaaacgugcccagcauccagagcagaggccuguucggcgccaucgccggcuucaucgagggcggcuggaccggcaugguggacggcugguacggcuaccaccaccagaacgagcagggcagcggcuacgccgccgaccugaagagcacccagaacgccaucgacgagaucaccaacaaggugaacagcgugaucgagaagaugaacacccaguucaccgccgugggcaaggaguucaaccaccuggagaagagaaucgagaaccugaacaagaagguggacgacggcuuccuggacaucuggaccuacaacgccgagcugcuggugcugcuggagaacgagagaacccuggacuaccacgacagcaacgugaagaaccuguacgagaaggugagaagccagcugaagaacaacgccaaggagaucggcaacggcugcuucgaguucuaccacaagugcgacaacaccugcauggagagcgugaagaacggcaccuacgacuaccccaaguacagcgaggaggccaagcugaacagagaggagaucgacggcgugaagcuggagagcaccagaaucuaccagauccuggccaucuacagcaccguggccagcagccuggugcugguggugagccugggcgccaucagcuucuggaugugcagcaacggcagccugcagugcagaaucugcaucuga

SEQ ID NO: 167561 - RNA, 1701 nt, Artificial Sequence; identical to SEQ ID NO: 166360
  derived and/or modified CDS sequence (opt4) from hemagglutinin__InfluenzaA__AEO01416

SEQ ID NO: 167562 - RNA, 1701 nt, Artificial Sequence; identical to SEQ ID NO: 163893
  derived and/or modified CDS sequence (opt4) from hemagglutinin__InfluenzaA__AEO01418

SEQ ID NO: 167563 - RNA, 1701 nt, Artificial Sequence; identical to SEQ ID NO: 163893
  derived and/or modified CDS sequence (opt4) from hemagglutinin__InfluenzaA__AEO01419

SEQ ID NO: 167564 - RNA, 1701 nt, Artificial Sequence
  derived and/or modified CDS sequence (opt4) from hemagglutinin__InfluenzaA__AEO01420
augaaggccauccugguggugcugcuguacaccuucgccaccgccaacgccgacacccugugcaucggcuaccacgccaacaacagcaccgacaccguggacaccgugcuggagaagaacgugaccgugacccacagcgugaaccugcuggaguacaagcacaacggcaagcugugcaagcugagaggcguggccccccugcaccugggcaagugcaacaucgccggcuggauccugggcaaccccgagugcgagagccugagcaccgccagcagcuggagcuacaucguggagaccagcaacagcgacaacggcaccugcuaccccggcgacuucaucgacuacgaggagcugagagagcagcugagcagcgugagcagcuucgagagauucgagaucuuccccaagaccagcagcuggcccaaccacgacagcaacaagggcgugaccgccgccugcccccacgccggcgccaagagcuucuacaagaaccugaucuggcuggugaagaagggcaacagcuaccccaagcugagcaagagcuacaucaacgacaagggcaaggaggugcuggugcuguggggcauccaccaccccagcaccagcgccgaccagcagagccuguaccagaacgccgacgccuacguguucgugggcaccagcagauacagcaagaaguucaagcccgagaucgccaucagacccaaggugagagaccaggagggcagaaugaacuacuacuggacccugguggagcccggcgacaagaucaccuucgaggccaccggcaaccugguggugcccagauacgccuucgccauggagagaaacgccggcagcggcaucaucaucagcgacacccccgugcacgacugcaacaccaccugccagacccccaagggcgccaucaacaccagccugcccuuccagaacauccaccccaucaccaucggcaagugccccaaguacgugaagagcaccaagcugagacuggccaccggccugagaaacgugcccagcauccagagcagaggccuguucggcgccaucgccggcuucaucgagggcggcuggaccggcaugguggacggcugguacggcuaccaccaccagaacgagcagggcagcggcuacgccgccgaccugaagagcacccagaacgccaucgacgagaucaccaacaaggugaacagcgugaucgagaagaugaacacccaguucaccgccgugggcaaggaguucaaccaccuggagaagagaaucgagaaccugaacaagaagguggacgacggcuuccuggacaucuggaccuacaacgccgagcugcuggugcugcuggagaacgagagaacccuggacuaccacgacagcaacgugaagaaccuguacgagaaggugagaagccagcugaagaacaacgccaaggagaucggcaacggcugcuucgaguucuaccacaagugcgacaacaccugcauggagagcgugaagaacggcaccuacgacuaccccaaguacagcgaggaggccaagcugaacagagaggagaucgacggcgugaagcuggagagcaccagaaucuaccagauccuggccaucuacagcaccguggccagcagccuggugcugguggugagccugggcgccaucagcuucuggaugugcagcaacggcagccugcagugcagaaucugcaucuga

SEQ ID NO: 167565 - RNA, 1701 nt, Artificial Sequence
  derived and/or modified CDS sequence (opt4) from hemagglutinin__InfluenzaA__AEO01421
augaaggccauccugguggugcugcuguacaccuucgccaccgccaacgccgacacccugugcaucggcuaccacgccaacaacagcaccgacaccguggacaccgugcuggagaagaacgugaccgugacccacagcgugaaccugcuggaggacaagcacaacggcaagcugugcaagcugagaggcguggccccccugcaccugggcaagugcaacaucgccggcuggauccugggcaaccccgagugcgagagccugagcaccgccagcagcuggagcuacaucguggagaccagcagcagcgacaacggcaccugcuaccccggcgacuucaucgacuacgaggagcugagagagcagcugagcagcgugagcagcuucgagaaguucgagaucuuccccaagaccagcagcuggcccaaccacgacagcaacaagggcgugaccgccgccugcccccacgccggcgccaagagcuucuacaagaaccugaucuggcuggugaagaagggcaacagcuaccccaagcugagcaagagcuacaucaacgacaagggcaaggaggugcuggugcuguggggcauccaccaccccagcaccagcgccgaccagcagagccuguaccagaacgccgacgccuacguguucgugggcaccagcagauacagcaagaaguucaagcccgagaucgccaucagacccaaggugagagaccaggagggcagaaugaacuacuacuggacccugguggagcccggcgacaagaucaccuucgaggccaccggcaaccugguggugcccagauacgccuucgccauggagagaaacgccggcagcggcaucaucaucagcgacacccccgugcacgacugcaacaccaccugccagacccccaagggcgccaucaacaccagccugcccuuccagaacauccaccccaucaccaucggcaagugccccaaguacgugaagagcaccaagcugagacuggccaccggccugagaaacgugcccagcauccagagcagaggccuguucggcgccaucgccggcuucaucgagggcggcuggaccggcaugguggacggcugguacggcuaccaccaccagaacgagcagggcagcggcuacgccgccgaccugaagagcacccagaacgccaucgacaagaucaccaacaaggugaacagcgugaucgagaagaugaacacccaguucaccgccgugggcaaggaguucaaccaccuggagaagagaaucgagaaccugaacaagaagguggacgacggcuuccuggacaucuggaccuacaacgccgagcugcuggugcugcuggagaacgagagaacccuggacuaccacgacagcaacgugaagaaccuguacgagaaggugagaagccagcugaagaacaacgccaaggagaucggcaacggcugcuucgaguucuaccacaagugcgacaacaccugcauggagagcgugaagaacggcaccuacgacuaccccaaguacagcgaggaggccaagcugaacagagaggagaucgacggcgugaagcuggagagcaccagaaucuaccagauccuggccaucuacagcaccguggccagcagccuggugcugguggugagccugggcgccaucagcuucuggaugugcagcaacggcagccugcagugcagaaucugcaucuga

SEQ ID NO: 167566 - RNA, 1701 nt, Artificial Sequence
  derived and/or modified CDS sequence (opt4) from hemagglutinin__InfluenzaA__AEO01422
augaaggccauccugguggugcugcuguacaccuucgccaucgccaacgccgacacccugugcaucggcuaccacgccaacaacagcaccgacaccguggacaccgugcuggagaagaacgugaccgugacccacagcgugaaccugcuggaggacaagcacaacggcaagcugugcaagcugagaggcguggccccccugcaccugggcaagugcaacaucgccggcuggauccugggcaaccccgagugcgagagccugagcaccgccagcagcuggagcuacaucguggagaccagcagcagcgacaacggcaccugcuaccccggcgacuucaucgacuacgaggagcugagagagcagcugagcagcgugagcagcuucgagagauucgagaucuuccccaagaccagcagcuggcccaaccacgacagcaacaagggcgugaccgccgccugcccccacgccggcgccaagagcuucuacaagaaccugaucuggcuggugaagaagggcaaccuguaccccaagcugagcaagagcuacaucaacgacaagggcaaggaggugcuggugcuguggggcauccaccaccccagcaccagcgccgaccagcagagccuguaccagaacgccgacgccuacguguucgugggcaccagcagauacagcaagaaguucaagcccgagaucgccaucagacccaaggugagagaccaggagggcagaaugaacuacuacuggacccugguggagcccggcgacaagaucaccuucgaggccaccggcaaccugguggugcccagauacgccuucgccauggagagaaacgccggcagcggcaucaucaucagcgacacccccgugcacgacugcaacaccaccugccagacccccaagggcgccaucaacaccagccugcccuuccagaacauccaccccaucaccaucggcaagugccccaaguacgugaagagcaccaagcugagacuggccaccggccugagaaacgugcccagcauccagagcagaggccuguucggcgccaucgccggcuucaucgagggcggcuggaccggcaugguggacggcugguacggcuaccaccaccagaacgagcagggcagcggcuacgccgccgaccugaagagcacccagcacgccaucgacgagaucaccaacaaggugaacagcgugaucgagaagaugaacacccaguucaccgccgugggcaaggaguucaaccaccuggagaagagaaucgagaaccugaacaagaagguggacgacggcuuccuggacaucuggaccuacaacgccgagcugcuggugcugcuggagaacgagagaacccuggacuaccacgacagcaacgugaagaaccuguacgagaaggugagaagccagcugaagaacaacgccaaggagaucggcaacggcugcuucgaguucuaccacaagugcgacaacaccugcauggagagcgugaagaacggcaccuacgacuaccccaaguacagcgaggaggccaagcugaacagagaggagaucaacggcgugaagcuggagagcaccagaaucuaccagauccuggccaucuacagcaccguggccagcagccuggugcugguggugagccugggcgccaucagcuucuggaugugcagcaacggcagccugcagugcagaaucugcaucuga

SEQ ID NO: 167567 - RNA, 1701 nt, Artificial Sequence
  derived and/or modified CDS sequence (opt4) from hemagglutinin__InfluenzaA__AEO01423
augaaggccauccugaucgugcugcuguacaccuucgccaccgccaacgccgacacccugugcaucggcuaccacgccaacaacagcaccgacaccguggacaccgugcuggagaagaacgugaccgugacccacagcgugaaccugcuggaggacaagcacaacggcaagcugugcaagcugagaggcguggccccccugcaccugggcaagugcaacaucgccggcuggauccugggcaaccccgagugcgagagccugagcaccgccagcagcuggagcuacaucguggagaccagcagcagcgacaacggcaccugcuaccccggcgacuucaucgacuacgaggagcugagagagcagcugagcagcgugagcagcuucgagagauucgagaucuuccccaagaccagcagcuggcccaaccacgacagcaacaagggcgugaccgccgccugcccccacgccggcgccaagagcuucuacaagaaccugaucuggcuggugaagaagggcaacagcuaccccaagcugagcaagagcuacaucaacgacaagggcaaggaggugcuggugcuguggggcauccaccaccccagcaccagcgccgaccagcagagccuguaccagaacgccgacgccuacguguucgugggcaccagcagauacagcaagaaguucaagcccgagaucaccaucagacccaaggugagagaccaggagggcagaaugaacuacuacuggacccugguggagcccggcgacaagaucaccuucgaggccaccggcaaccugguggugcccagauacgccuucgccauggagagaaacgccggcagcggcaucaucaucagcgacacccccgugcacgacugcaacaccaccugccagacccccaagggcgccaucaacaccagccugcccuuccagaacauccaccccaucaccaucggcaagugccccaaguacgugaagagcaccaagcugagacuggccaccggccugagaaacgugcccagcauccagagcagaggccuguucggcgccaucgccggcuucaucgagggcggcuggaccggcaugguggacggcugguacggcuaccaccaccagaacgagcagggcagcggcuacgccgccgaccugaagagcacccagaacgccaucgacgagaucaccaacaaggugaacagcgugaucgagaagaugaacacccaguucaccgccgugggcaaggaguucaaccaccuggagaagagaaucgagaaccugaacaagaagguggacgacggcuuccuggacaucuggaccuacaacgccgagcugcuggugcugcuggagaacgagagaacccuggacuaccacgacagcaacgugaagaaccuguacgagaaggugagaagccagcugaagaacaacgccaaggagaucggcaacggcugcuucgaguucuaccacaagugcgacaacaccugcauggagagcgugaagaacggcaccuacgacuaccccaaguacagcgaggaggccaagcugaacagagaggagaucgacggcgugaagcuggagagcaccagaaucuaccagauccuggccaucuacagcaccguggccagcagccuggugcugguggugagccugggcgccaucagcuucuggaugugcagcaacggcagccugcagugcagaaucugcaucuga

SEQ ID NO: 167568 - RNA, 1701 nt, Artificial Sequence; identical to SEQ ID NO: 167565
  derived and/or modified CDS sequence (opt4) from hemagglutinin__InfluenzaA__AEO01424

SEQ ID NO: 167569 - RNA, 1701 nt, Artificial Sequence; identical to SEQ ID NO: 167565
  derived and/or modified CDS sequence (opt4) from hemagglutinin__InfluenzaA__AEO01425

SEQ ID NO: 167570 - RNA, 1701 nt, Artificial Sequence; identical to SEQ ID NO: 162729
  derived and/or modified CDS sequence (opt4) from hemagglutinin__InfluenzaA__AEO01426

SEQ ID NO: 167571 - RNA, 1701 nt, Artificial Sequence
  derived and/or modified CDS sequence (opt4) from hemagglutinin__InfluenzaA__AEO01427
augaaggccauccugguggugcugcuguacaccuucgccaccgccaacagcgacacccugugcaucggcuaccacgccaacaacagcaccgacaccguggacaccgugcuggagaagaacgugaccgugacccacagcgugaaccugcuggaggacaagcacaacggcaagcugugcaagcugagaggcguggccccccugcaccugggcaagugcaacaucgccggcuggauccugggcaaccccgagugcgagagccugagcaccgccagcagcuggagcuacaucguggagaccagcagcagcgacaacggcaccugcuaccccggcgacuucaucgacuacgaggagcugagagagcagcugagcagcgugagcagcuucgagagauucgagaucuuccccaagaccagcagcuggcccaaccacgacagcaacaagggcgugaccgccgccugcccccacgccggcgccaagagcuucuacaagaaccugaucuggcuggugaagaagggcaacagcuaccccaagcugagcaagagcuacaucaacgacaagggcaaggaggugcuggugcuguggggcauccaccaccccagcaccagcgccgaccagcagagccuguaccagaacgccgacgccuacguguucgugggcaccagcagauacagcaagaaguucaagcccgagaucgccaucagacccaaggugagagaccaggagggcagaaugaacuacuacuggacccugguggagcccggcgacaagaucaccuucgaggccaccggcaaccugguggugcccagauacgccuucgccauggagagaaacgccggcagcggcaucaucaucagcgacacccccgugcacgacugcaacaccaccugccagacccccaagggcgccaucaacaccagccugcccuuccagaacauccaccccaucaccaucggcaagugccccaaguacgugaagagcaccaagcugagacuggccaccggccugagaaacgugcccagcauccagagcagaggccuguucggcgccaucgccggcuucaucgagggcggcuggaccggcaugguggacggcugguacggcuaccaccaccagaacgagcagggcagcggcuacgccgccgaccugaagagcacccagaacgccaucgacaagaucaccaacaaggugaacagcgugaucgagaagaugaacacccaguucaccgccgugggcaaggaguucaaccaccuggagaagagaaucgagaaccugaacaagaagguggacgacggcuuccuggacaucuggaccuacaacgccgagcugcuggugcugcuggagaacgagagaacccuggacuaccacgacagcaacgugaagaaccuguacgagaaggugagaagccagcugaagaacaacgccaaggagaucggcaacggcugcuucgaguucuaccacaagugcgacaacaccugcauggagagcgugaagaacggcaccuacgacuaccccaaguacagcgaggaggccaagcugaacagagaggagaucgacggcgugaagcuggagagcaccagaaucuaccagauccuggccaucuacagcaccguggccagcagccuggugcugguggugagccugggcgccaucagcuucuggaugugcagcaacggcagccugcagugcagaaucugcaucuga

SEQ ID NO: 167572 - RNA, 1701 nt, Artificial Sequence
  derived and/or modified CDS sequence (opt4) from hemagglutinin__InfluenzaA__AEO01428
augaaggccauccugguggugcugcuguacaccuucgccaccgccaacgccgacacccugugcaucggcuaccacgccaacaacagcaccgacaccguggacaccgugcuggagaagaacgugaccgugacccacagcgugaaccugcuggaggacaagcacaacggcaagcugugcaagcugagaggcguggccccccugcaccugggcaagugcaacaucgccggcuggauccugggcaaccccgagugcgagagccugagcaccgccagcagcuggagcuacaucguggagaccagcagcagcgacaacggcaccugcuaccccggcgacuucaucgacuacgaggagcugagagagcagcugagcagcgugagcagcuucgagagauucgagaucuuccccaagaccagcagcuggcccgaccacgacagcaacaagggcgugaccgccgccugcccccacgccggcgccaagagcuucuacaagaaccugaucuggcuggugaagaagggcaacagcuaccccaagcugagcaagagcuacaucaacgacaagggcaaggaggugcuggugcuguggggcauccaccaccccagcaccagcgccgaccagcagagccuguaccagaacgccgacgccuacguguucgugggcaccagcagauacagcaagaaguucaagcccgagaucgccaucagacccaaggugagagaccaggagggcagaaugaacuacuacuggacccugguggagcccggcgacaagaucaccuucgaggccaccggcaaccugguggugcccagauacgccuucgccauggagagaaacgccggcagcggcaucaucaucagcgacacccccgugcacgacugcaacaccaccugccagacccccaagggcgccaucaacaccagccugcccuuccagaacauccaccccaucaccaucggcaagugccccaaguacgugaagagcaccaagcugagaauggccaccggccugagaaacgugcccagcauccagagcagaggccuguucggcgccaucgccggcuucaucgagggcggcuggaccggcaugguggacggcugguacggcuaccaccaccagaacgagcagggcagcggcuacgccgccgaccugaagagcacccagaacgccaucgacgagaucaccaacaaggugaacagcgugaucgagaagaugaacacccaguucaccgccgugggcaaggaguucaaccaccuggagaagagaaucgagaaccugaacaagaagguggacgacggcuuccuggacaucuggaccuacaacgccgagcugcuggugcugcuggagaacgagagaacccuggacuaccacgacagcaacgugaagaaccuguacgagaaggugagaagccagcugaagaacaacgccaaggagaucggcaacggcugcuucgaguucuaccacaagugcgacaacaccugcauggagagcgugaagaacggcaccuacgacuaccccaaguacagcgaggaggccaagcugaacagagaggagaucgacggcgugaagcuggagagcaccagaaucuaccagauccuggccaucuacagcaccguggccagcagccuggugcugguggugagccugggcgccaucagcuucuggaugugcagcaacggcagccugcagugcagaaucugcaucuga

SEQ ID NO: 167573 - RNA, 1701 nt, Artificial Sequence; identical to SEQ ID NO: 163893
  derived and/or modified CDS sequence (opt4) from hemagglutinin__InfluenzaA__AEO01429

SEQ ID NO: 167574 - RNA, 1701 nt, Artificial Sequence
  derived and/or modified CDS sequence (opt4) from hemagglutinin__InfluenzaA__AEO01430
augaaggccauccugguggugcugcuguacaccuucgccaccgccaacgccgacacccugugcaucggcuaccacgccaacaacagcaccgacaccguggacaccgugcuggagaagaacgugaccgugacccacagcgugaaccugcuggaggacaagcacaacggcaagcugugcaagcugagaggcguggccccccugcaccugggcaagugcaacaucgccggcuggauccugggcaaccccgagugcgagagccugagcaccgccagcagcuggagcuacaucguggagaccagcagcagcgacaacggcaccugcuaccccggcgacuucaucgacuacgaggagcugagagagcagcugagcagcgugagcagcuucgagagauucgagaucuuccccaagaccagcagcuggcccaaccacgacagcaacaagggcgugaccgccgccugcccccacgacggcgccaagagcuucuacaagaaccugaucuggcuggugaagaagggcaacagcuaccccaagcugagcaagagcuacaucaacgacaagggcaaggaggugcuggugcuguggggcauccaccaccccagcaccagcgccgaccagcagagccuguaccagaacgccgacgccuacguguucgugggcaccagcagauacagcaagaaguucaagcccgagaucgccaucagacccaaggugagagaccaggagggcagaaugaacuacuacuggacccugguggagcccggcgacaagaucaccuucgaggccaccggcaaccugguggugcccagauacgccuucgccauggagagaaacgccggcagcggcaucaucaucagcgacacccccgugcacgacugcaacaccaccugccagacccccaagggcgccaucaacaccagccugcccuuccagaacauccaccccaucaccaucggcaagugccccaaguacgugaagagcaccaagcugagacuggccaccggccugagaaacgugcccagcauccagagcagaggccuguucggcgccaucgccggcuucaucgagggcggcuggaccggcaugguggacggcugguacggcuaccaccaccagaacgagcagggcagcggcuacgccgccgaccugaagagcacccagaacgccaucgacgagaucaccaacaaggugaacagcgugaucgagaagaugaacacccaguucaccgccgugggcaaggaguucaaccaccuggagaagagaaucgagaaccugaacaagaagguggacgacggcuuccuggacaucuggaccuacaacgccgagcugcuggugcugcuggagaacgagagaacccuggacuaccacgacagcaacgugaagaaccuguacgagaaggugagaagccagcugaagaacaacgccaaggagaucggcaacggcugcuucgaguucuaccacaagugcgacaacaccugcauggagagcgugaagaacggcaccuacgacuaccccaaguacagcgaggaggccaagcugaacagagaggagaucgacggcgugaagcuggagagcaccagaaucuaccagauccuggccaucuacagcaccguggccagcagccuggugcugguggugagccugggcgccaucagcuucuggaugugcagcaacggcagccugcagugcagaaucugcaucuga

SEQ ID NO: 167575 - RNA, 1701 nt, Artificial Sequence; identical to SEQ ID NO: 167447
  derived and/or modified CDS sequence (opt4) from hemagglutinin__InfluenzaA__AEO01431

SEQ ID NO: 167576 - RNA, 1701 nt, Artificial Sequence; identical to SEQ ID NO: 162729
  derived and/or modified CDS sequence (opt4) from hemagglutinin__InfluenzaA__AEO01432

SEQ ID NO: 167577 - RNA, 1701 nt, Artificial Sequence
  derived and/or modified CDS sequence (opt4) from hemagglutinin__InfluenzaA__AEO01434
augaaggccauccugguggugcugcuguacaccuucgccaccgccaacgccgacacccugugcaucggcuaccacgccaacaacagcaccgacaccguggacaccgugcuggagaagaacgugaccgugacccacagcgugaaccugcuggaggacaagcacaacggcaagcugugcaagcugagaggcguggccccccugcaccugggcgagugcaacaucgccggcuggauccugggcaaccccgagugcgagagccugagcaccgccagcagcuggagcuacaucguggagaccagcagcagcgacaacggcaccugcuaccccggcgacuucaucgacuacgaggagcugagagagcagcugagcagcgugagcagcuucgagagauucgagaucuuccccaagaccagcagcuggcccaaccacgacagcaacaagggcgugaccgccgccugcccccacgccggcgccaagagcuucuacaagaaccugaucuggcuggugaagaagggcaacagcuaccccaagcugaacaagagcuacaucaacgacaagggcaaggaggugcuggugcuguggggcauccaccaccccagcaccagcgccgaccagcagagccuguaccagaacgccgacgccuacguguucgugggcaccagcagauacagcaagaaguucaagcccgagaucgccaucagacccaaggugagagaccaggagggcagaaugaacuacuacuggacccugguggagcccggcgacaagaucaccuucgaggccaccggcaaccugguggugcccagauacgccuucgccauggagagaaacgccggcagcggcaucaucaucagcgacacccccgugcacgacugcaacaccaccugccagacccccaagggcgccaucaacaccagccugcccuuccagaacauccaccccaucaccaucggcgagugccccaaguacgugaagagcaccaagcugagacuggccaccggccugagaaacgugcccagcauccagagcagaggccuguucggcgccaucgccggcuucaucgagggcggcuggaccggcaugguggacggcugguacggcuaccaccaccagaacgagcagggcagcggcuacgccgccgaccugaagagcacccagaacgccaucgacaagaucaccaacaaggugaacagcgugaucgagaagaugaacacccaguucaccgccgugggcaaggaguucaaccaccuggagaagagaaucgagaaccugaacaagaagguggacgacggcuuccuggacaucuggaccuacaacgccgagcugcuggugcugcuggagaacgagagaacccuggacuaccacgacagcaacgugaagaaccuguacgagaaggugagaagccagcugaagaacaacgccaaggagaucggcaacggcugcuucgaguucuaccacaagugcgacaacaccugcauggagagcgugaagaacggcaccuacgacuaccccaaguacagcgaggaggccaagcugaacagagaggagaucgacggcgugaagcuggagagcaccagaaucuaccagauccuggccaucuacagcaccguggccagcagccuggugcugguggugagccugggcgccaucagcuucuggaugugcagcaacggcagccugcagugcagaaucugcaucuga

SEQ ID NO: 167578 - RNA, 1701 nt, Artificial Sequence
  derived and/or modified CDS sequence (opt4) from hemagglutinin__InfluenzaA__AEO01435
augaaggccauccugguggugcugcuguacaccuucgccaccgccaacgccgacacccugugcaucggcuaccacgccaacaacagcaccgacaccguggacaccgugcuggagaagaacgugaccgugacccacagcgugaaccugcuggaggacaagcacaacggcaagcugugcaagcugagaggcguggccccccugcaccugggcaagugcaacaucgccggcuggauccugggcaaccccgagugcgagagccugagcaccgccagcagcuggagcuacaucguggagaccagcagcagcgacaacggcaccugcuaccccggcgacuucaucgacuacgaggagcugagagagcagcugagcagcgugagcagcuucgagagauucgagaucuuccccaagaccagcagcuggcccaaccacgacagcaacaagggcgugaccgccgccugcccccacgccggcgccaagagcuucuacaagaaccugaucuggcuggugaagaagggcaacagcuaccccaagcugagcaagagcuacaucaacgacaagggcaaggaggugcuggugcuguggggcauccaccaccccagcaccagcgccgaccagcagagccuguaccagaacgccgacgccuacguguucgugggcaccagcagauacagcaagaaguucaagcccgagaucgccaucagacccaaggugagagaccaggagggcagaaugaacuacuacuggacccugguggagcccggcgacaagaucaccuucgaggccaccggcaaccugguggugcccagauacgccuucgccauggagagaaacgccggcagcggcaucaucaucagcgacacccccguguacgacugcaacaccaccugccagacccccaagggcgccaucaacaccagccugcccuuccagaacauccaccccaucaccaucggcaagugccccaaguacgugaagagcaccaagcugagacuggccaccggccugagaaacgugcccagcauccagagcagaggccuguucggcgccaucgccggcuucaucgagggcggcuggaccggcaugguggacggcugguacggcuaccaccaccagaacgagcagggcagcggcuacgccgccgaccugaagagcacccagaacgccaucgacaagaucaccaacaaggugaacagcgugaucgagaagaugaacacccaguucaccgccgugggcaaggaguucaaccaccuggagaagagaaucgagaaccugaacaagaagguggacgacggcuuccuggacaucuggaccuacaacgccgagcugcuggugcugcuggagaacgagagaacccuggacuaccacgacagcaacgugaagaaccuguacgagaaggugagaaaccagcugaagaacaacgccaaggagaucggcaacggcugcuucgaguucuaccacaagugcgacaacaccugcauggagagcgugaagaacggcaccuacgacuaccccaaguacagcgaggaggccaagcugaacagagaggagaucgacggcgugaagcuggagagcaccagaaucuaccagauccuggccaucuacagcaccguggccagcagccuggugcugguggugagccugggcgccaucagcuucuggaugugcagcaacggcagccugcagugcagaaucugcaucuga

SEQ ID NO: 167579 - RNA, 1701 nt, Artificial Sequence; identical to SEQ ID NO: 167565
  derived and/or modified CDS sequence (opt4) from hemagglutinin__InfluenzaA__AEO01436

SEQ ID NO: 167580 - RNA, 1701 nt, Artificial Sequence; identical to SEQ ID NO: 167447
  derived and/or modified CDS sequence (opt4) from hemagglutinin__InfluenzaA__AEO01437

SEQ ID NO: 167581 - RNA, 1701 nt, Artificial Sequence; identical to SEQ ID NO: 167498
  derived and/or modified CDS sequence (opt4) from hemagglutinin__InfluenzaA__AEO01438

SEQ ID NO: 167582 - RNA, 1701 nt, Artificial Sequence; identical to SEQ ID NO: 163082
  derived and/or modified CDS sequence (opt4) from hemagglutinin__InfluenzaA__AEO01440

SEQ ID NO: 167583 - RNA, 1701 nt, Artificial Sequence
  derived and/or modified CDS sequence (opt4) from hemagglutinin__InfluenzaA__AEO01441
augaaggccauccugguggugcugcuguacaccuucgccaccgccaacgccgacacccugugcaucggcuaccacgccaacaacagcaccgacaccguggacaccgugcuggagaagaacgugaccgugacccacagcgugaaccugcuggaggacaagcacaacggcaagcugugcaagcugagaggcguggccccccugcaccugggcaagugcaacaucgccggcuggauccugggcaaccccgagugcgagagccugagcaccgccagcagcuggagcuacaucguggagaccagcagcagcgacaacggcaccugcuaccccggcgacuucaucgacuacgaggagcugagagagcagcugagcagcgugagcagcuucgagagauucgagaucuuccccaagaccagcagcuggcccaaccacgacagcaacaagggcgugaccgccgccugcccccacgccggcgccaagagcuucuacaagaaccugaucuggcuggugaagaagggcaacagcuaccccaagcugagcaagagcuacaucaacgacaagggcaaggaggugcuggugcuguggggcauccaccaccccagcaccagcgccgaccagcagagccuguaccagaacgccgacgccuacguguucgugggcaccagcagauacagcaagaaguucaagcccgagaucgccaucagacccaaggugagagaccaggagggcagaaugaacuacuacuggacccugguggagcccggcgacaagaucaccuucgaggccaccggcaaccugguggugcccagauacgccuucgccauggagagaaacgacggcagcggcaucaucaucagcgacacccccgugcacgacugcaacaccaccugccagacccccaagggcgccaucaacaccagccugcccuuccagaacauccaccccaucaccaucggcaagugccccaaguacgugaagagcaccaagcugagacuggccaccggccugagaaacgugcccagcauccagagcagaggccuguucggcgccaucgccggcuucaucgagggcggcuggaccggcaugguggacggcugguacggcuaccaccaccagaacgagcagggcagcggcuacgccgccgaccugaagagcacccagaacgccaucgacaagaucaccaacaaggugaacagcgugaucgagaagaugaacacccaguucaccgccgugggcaaggaguucaaccaccuggagaagagaaucgagaaccugaacaagaagguggacgacggcuuccuggacaucuggaccuacaacgccgagcugcuggugcugcuggagaacgagagaacccuggacuaccacgacagcaacgugaagaaccuguacgagaaggugagaagccagcugaagaacaacgccaaggagaucggcaacggcugcuucgaguucuaccacaagugcgacaacaccugcauggagagcgugaagaacggcaccuacgacuaccccaaguacagcgaggaggccaagcugaacagagaggagaucgacggcgugaagcuggagagcaccagaaucuaccagauccuggccaucuacagcaccguggccagcagccuggugcugguggugagccugggcgccaucagcuucuggaugugcagcaacggcagccugcagugcagaaucugcaucuga

SEQ ID NO: 167584 - RNA, 1701 nt, Artificial Sequence; identical to SEQ ID NO: 164149
  derived and/or modified CDS sequence (opt4) from hemagglutinin__InfluenzaA__AEO01442

SEQ ID NO: 167585 - RNA, 1701 nt, Artificial Sequence
  derived and/or modified CDS sequence (opt4) from hemagglutinin__InfluenzaA__AEO01443
augaaggccauccugguggugcugcuguacaccuucgccaccgccaacgccgacacccugugcaucggcuaccacgccaacaacagcaccgacaccguggacaccgugcuggagaagaacgugaccgugacccacagcgugaaccugcuggaggacaagcacaacggcaagcugugcaagcugagaggcguggccccccugcaccugggcaagugcaacaucgccggcuggauccugggcaaccccgagugcgagagccugagcaccgccagcagcuggagcuacaucguggagaccagcagcagcgacaacggcaccugcuaccccggcgacuucaucgacuacgaggagcugagagagcagcugagcagcgugagcagcuucgagagauucgagaucuuccccaagaccagcagcuggcccaaccacgacagcaacaagggcgugaccgccgccugcccccacgccggcgccaagagcuucuacaagaaccugaucuggcuggugaagaaggagaacagcuaccccaagcugagcaagagcuacaucaacgacaagggcaaggaggugcuggugcuguggggcauccaccaccccagcaccagcgccgaccagcagagccuguaccagaacgccgacgccuacguguucgugggcaccagcagauacagcaagaaguucaagcccgagaucgccaucagacccaaggugagagaccaggagggcagaaugaacuacuacuggacccugguggagcccggcgacaagaucaccuucgaggccaccggcaaccugguggugcccagauacgccuucgccauggagagaaacgccggcagcggcaucaucaucagcgacacccccgugcacgacugcaacaccaccugccagacccccaagggcgccaucaacaccagccugcccuuccagaacauccaccccaucaccaucggcaagugccccaaguacgugaagagcaccaagcugagacuggccaccggccugagaaacgugcccagcauccagagcagaggccuguucggcgccaucgccggcuucaucgagggcggcuggaccggcaugguggacggcugguacggcuaccaccaccagaacgagcagggcagcggcuacgccgccgaccugaagagcacccagaacgccaucgacaagaucaccaacaaggugaacagcgugaucgagaagaugaacacccaguucaccgccgugggcaaggaguucaaccaccuggagaagagaaucgagaaccugaacaagaagguggacgacggcuuccuggacaucuggaccuacaacgccgagcugcuggugcugcuggagaacgagagaacccuggacuaccacgacagcaacgugaagaaccuguacgagaaggugagaagccagcugaagaacaacgccaaggagaucggcaacggcugcuucgaguucuaccacaagugcgacaacaccugcauggagagcgugaagaacggcaccuacgacuaccccaaguacagcgaggaggccaagcugaacagagaggagaucgacggcgugaagcuggagagcaccagaaucuaccagauccuggccaucuacagcaccguggccagcagccuggugcugguggugagccugggcgccaucagcuucuggaugugcagcaacggcagccugcagugcagaaucugcaucuga

SEQ ID NO: 167586 - RNA, 1701 nt, Artificial Sequence
  derived and/or modified CDS sequence (opt4) from hemagglutinin__InfluenzaA__AEO01444
augaaggccauccugguggugcugcuguacaccuucgccaccgccaacgccgacacccugugcaucggcuaccacgccaacaacagcaccgacaccguggacaccgugcuggagaagaacgugaccgugacccacagcgugaaccugcuggaggacaagcacaacggcaagcugugcaagcugagaggcguggccccccugcaccugggcaagugcaacaucgccggcuggauccugggcaaccccgagugcgagagccugagcaccgccagcagcuggagcuacaucguggagaccagcaacagcgacaacggcaccugcuaccccggcgacuucaucgacuacgaggagcugagagagcagcugagcagcgugagcagcuucgagagauucgagaucuuccccaagaccagcagcuggcccaaccacgacagcgacaagggcgugaccgccgccugcccccacgccggcgccaagagcuucuacaagaaccugaucuggcuggugaagaagggcaacagcuaccccaagcugagcaagagcuacaucaacgacaagggcaaggaggugcuggugcuguggggcauccaccaccccagcaccagcgccgaccagcagagccuguaccagaacgccgacgccuacguguucgugggcaccagcagauacagcaagaaguucaagcccgagaucgccaucagacccaaggugagagaccaggagggcagaaugaacuacuacuggacccugguggagcccggcgacaagaucaccuucgaggccaccggcaaccugguggugcccagauacgccuucgccauggagagaaacgccggcagcggcaucaucaucagcgacacccccgugcacgacugcaacaccaccugccagacccccaagggcgccaucaacaccagccugcccuuccagaacauccaccccaucaccaucggcaagugccccaaguacgugaagagcaccaagcugagacuggccaccggccugagaaacgugcccagcauccagagcagaggccuguucggcgccaucgccggcuucaucgagggcggcuggaccggcaugguggacggcugguacggcuaccaccaccagaacgagcagggcagcggcuacgccgccgaccugaagagcacccagaacgccaucgacaagaucaccaacaaggugaacagcgugaucgagaagaugaacacccaguucaccgccgugggcaaggaguucaaccaccuggagaagagaaucgagaaccugaacaagaagguggacgacggcuuccuggacaucuggaccuacaacgccgagcugcuggugcugcuggagaacgagagaacccuggacuaccacgacagcaacgugaagaaccuguacgagaaggugagaagccagcugaagaacaacgccaaggagaucggcaacggcugcuucgaguucuaccacaagugcgacaacaccugcauggagagcgugaagaacggcaccuacgacuaccccaaguacagcgaggaggccaagcugaacagagaggagaucgacggcgugaagcuggagagcaccagaaucuaccagauccuggccaucuacagcaccguggccagcagccuggugcugguggugagccugggcgccaucagcuucuggaugugcagcaacggcagccugcagugcagaaucugcaucuga

SEQ ID NO: 167587 - RNA, 1701 nt, Artificial Sequence; identical to SEQ ID NO: 164897
  derived and/or modified CDS sequence (opt4) from hemagglutinin__InfluenzaA__AEO01445

SEQ ID NO: 167588 - RNA, 1701 nt, Artificial Sequence; identical to SEQ ID NO: 167447
  derived and/or modified CDS sequence (opt4) from hemagglutinin__InfluenzaA__AEO01446

SEQ ID NO: 167589 - RNA, 1701 nt, Artificial Sequence
  derived and/or modified CDS sequence (opt4) from hemagglutinin__InfluenzaA__AEO01447
augaaggccauccugguggugcugcuguacaccuucgccaccgccaacgccgacacccugugcaucggcuaccacgccaacaacagcaccgacaccguggacaccgugcuggagaagaacgugaccgugacccacagcgugaaccugcuggaggacaagcacaacggcaagcugugcaagcugagaggcguggccccccugcaccugggcaagugcaacaucgccggcuggauccugggcaaccccgagugcgagagccugagcaccgccagcagcuggagcuacaucguggagaccagcagcagcgacaacggcaccugcuaccccggcgacuucaucgacuacgaggagcugagagagcagcugagcagcgugagcagcuucgagagauucgagaucuuccccaagaccagcagcuggcccaaccacgacagcaacaagggcgugaccgccgccugcccccacgccggcgccaagagcuucuacaagaaccugaucuggcuggugaagaagggcaacagcuaccccaagcugagcaagagcuacaucaacgacaagggcaaggaggugcuggugcuguggggcauccaccaccccagcaccagcgccgaccagcagagccuguaccagaacgccgacgccuacguguucgugggcaccagcagauacagcaagaaguucaagcccgagaucgccaucagacccaaggugagagaccaggagggcagaaugaacuacuacuggacccugguggagcccggcgacaagaucaccuucgaggccaccggcaaccugguggugcccagauacgccuucgccauggagagaaacgccggcagcggcaucaucaucagcgacacccccgugcacgacugcaacaccaccugccagacccccaagggcgccaucaacaccagccugcccuuccagaacauccaccccaucaccaucggcaagugccccaaguacgugaagagcaccaagcugagacuggccaccggccugagaaacgugcccagcauccagagcagaggccuguucggcgccaucgccggcuucaucgagggcggcuggaccggcaugguggacggcugguacggcuaccaccaccagaacgagcagggcagcggcuacgccgccgaccugaagagcacccagaacgccaucgacgagaucaccaacaaggugaacagcgugaucgagaagaugaacacccaguucaccgccgugggcaaggaguucaaccaccuggagaagagaaucgagaaccugaacaagaagguggacgacggcuuccuggacaucuggaccuacaacgccgagcugcuggugcugcuggagaacgagagaacccuggacuaccacgacagcaacgugaagaaccuguacgagaaggugagaagccagcugaagaacaacgccaaggagaucggcaacggcugcuucgaguucuaccacaagugcgacaacaccugcauggagagcgugaagaacggcaccuacgacuaccccaaguacagcgaggaggccaagcugaacagagaggagaucgacggcgugaagcuggagagcaccagaaucuaccagauccuggccaucuacagcaccaucgccagcagccuggugcugguggugagccugggcgccaucagcuucuggaugugcagcaacggcagccugcagugcagaaucugcaucuga

SEQ ID NO: 167590 - RNA, 1701 nt, Artificial Sequence; identical to SEQ ID NO: 163082
  derived and/or modified CDS sequence (opt4) from hemagglutinin__InfluenzaA__AEO01448

SEQ ID NO: 167591 - RNA, 1701 nt, Artificial Sequence; identical to SEQ ID NO: 167565
  derived and/or modified CDS sequence (opt4) from hemagglutinin__InfluenzaA__AEO01449

SEQ ID NO: 167592 - RNA, 1701 nt, Artificial Sequence
  derived and/or modified CDS sequence (opt4) from hemagglutinin__InfluenzaA__AEO01450
augaaggccauccugguggugcugcuguacaccuucgccaccgccaacgccgacacccugugcaucggcuaccacgccaacaacagcaccgacaccguggacaccgugcuggagaagaacgugaccgugacccacagcgugaaccugcuggaggacaagcacaacggcaagcugugcaagcugagaggcguggccccccugcaccugggcaagugcaacaucgccggcuggauccugggcaaccccgagugcgagagccugagcaccgccagcagcuggagcuacaucguggagaccagcagcagcgacaacggcaccugcuaccccggcgacuucaucgacuacgaggagcugagagagcagcugagcagcgugagcagcuucgagagauucgagaucuuccccaagaccagcagcuggcccaaccacgacagcaacaagggcgugaccgccgccugcccccacgccggcgccaagagcuucuacaagaaccugaucuggcuggugaagaagggcaacagcuaccccaagcugagcaagagcuacaucaacgacaagggcaaggaggugcuggugcuguggggcauccaccaccccagcaccagcaccgaccagcagagccuguaccagaacgccgacgccuacguguucgugggcaccagcagauacagcaagaaguucaagcccgagaucgccaucagacccaaggugagagaccaggagggcagaaugaacuacuacuggacccugguggagcccggcgacaagaucaccuucgaggccaccggcaaccugguggugcccagauacgccuucgccauggagagaaacgccggcagcggcaucaucaucagcgacacccccgugcacgacugcaacaccaccugccagacccccaagggcgccaucaacaccagccugcccuuccagaacauccaccccaucaccaucggcaagugccccaaguacgugaagagcaccaagcugagacuggccaccggccugagaaacgugcccagcauccagagcagaggccuguucggcgccaucgccggcuucaucgagggcggcuggaccggcaugguggacggcugguacggcuaccaccaccagaacgagcagggcagcggcuacgccgccgaccugaagagcacccagcacgccaucgacgagaucaccaacaaggugaacagcgugaucgagaagaugaacacccaguucaccgccgugggcaaggaguucaaccaccuggagaagagaaucgagaaccugaacaagaagguggacgacggcuuccuggacaucuggaccuacaacgccgagcugcuggugcugcuggagaacgagagaacccuggacuaccacgacagcaacgugaagaaccuguacgagaaggugagaagccagcugaagaacaacgccaaggagaucggcaacggcugcuucgaguucuaccacaagugcgacaacaccugcauggagagcgugaagaacggcaccuacgacuaccccaaguacagcgaggaggccaagcugaacagagaggagaucgacggcgugaagcuggagagcaccagaaucuaccagauccuggccaucuacagcaccguggccagcagccuggugcugguggugagccugggcgccaucagcuucuggaugugcagcaacggcagccugcagugcagaaucugcaucuga

SEQ ID NO: 167593 - RNA, 1701 nt, Artificial Sequence; identical to SEQ ID NO: 162729
  derived and/or modified CDS sequence (opt4) from hemagglutinin__InfluenzaA__AEO01451

SEQ ID NO: 167594 - RNA, 1701 nt, Artificial Sequence
  derived and/or modified CDS sequence (opt4) from hemagglutinin__InfluenzaA__AEO01452
augaaggccauccugguggugcugcuguacaccuucgccaccgccaacgccgacacccugugcaucggcuaccacgccaacaacagcaccgacaccguggacaccgugcuggagaagaacgugaccgugacccacagcgugaaccugcuggaggacaagcacaacggcaagcugugcaagcugagaggcguggccccccugcaccugggcaagugcaacaucgccggcuggauccugggcaaccccgagugcgagagccugagcaccgccagcagcuggagcuacaucguggagaccagcagcagcgacaacggcaccugcuaccccggcgacuucaucgacuacgaggagcugagagagcagcugagcagcgugagcagcuucgagagauucgagaucuuccccaagaccagcagcuggcccaaccacgacagcaacaagggcgugaccgccgccugcccccacgccgaggccaagagcuucuacaagaaccugaucuggcuggugaagaagggcaacagcuaccccaagcugagcaagagcuacaucaacgacaagggcaaggaggugcuggugcuguggggcauccaccaccccagcaccagcgccgaccagcagagccuguaccagaacgccgacgccuacguguucgugggcaccagcagauacagcaagaaguucaagcccgagaucgccaucagacccaaggugagagaccaggagggcagaaugaacuacuacuggacccugguggagcccggcgacaagaucaccuucgaggccaccggcaaccugguggugcccagauacgccuucgccauggagagaaacgccggcagcggcaucaucaucagcgacacccccgcccacgacugcaacaccaccugccagacccccaagggcgccaucaacaccagccugcccuuccagaacauccaccccaucaccaucggcaagugccccaaguacgugaagagcaccaagcugagacuggccaccggccugagaaacgugcccagcauccagagcagaggccuguucggcgccaucgccggcuucaucgagggcggcuggaccggcaugguggacggcugguacggcuaccaccaccagaacgagcagggcagcggcuacgccgccgaccugaagagcacccagaacgccaucgacgagaucaccaacaaggugaacagcgugaucgagaagaugaacacccaguucaccgccgugggcaaggaguucaaccaccuggagaagagaaucgagaaccugaacaagaagguggacgacggcuuccuggacaucuggaccuacaacgccgagcugcuggugcugcuggagaacgagagaacccuggacuaccacgacagcaacgugaagaagcuguacgagaaggugagaagccagcugaagaacaacgccaaggagaucggcaacggcugcuucgaguucuaccacaagugcgacaacaccugcauggagagcgugaagaacggcaccuacgacuaccccaaguacagcgaggaggccaagcugaacagagaggagaucgacggcgugaagcuggagagcaccagaaucuaccagauccuggccaucuacagcaccguggccagcagccuggugcugguggugagccugggcgccaucagcuucuggaugugcagcaacggcagccugcagugcagaaucugcaucuga

SEQ ID NO: 167595 - RNA, 1701 nt, Artificial Sequence
  derived and/or modified CDS sequence (opt4) from hemagglutinin__InfluenzaA__AEO01453
augaaggccauccugguggugcugcuguacaccuucgccaucgccaacgccgacacccugugcaucggcuaccacgccaacaacagcaccgacaccguggacaccgugcuggagaagaacgugaccgugacccacagcgugaaccugcuggaggacaagcacaacggcaagcugugcaagcugagaggcguggccccccugcaccugggcaagugcaacaucgccggcuggauccugggcaaccccgagugcgagagccugagcaccgccagcagcuggagcuacaucguggagaccagcagcagcgacaacggcaccugcuaccccggcgacuucaucgacuacgaggagcugagagagcagcugagcagcgugagcagcuucgagagauucgagaucuuccccaagaccagcagcuggcccaaccacgacagcaacaagggcgugaccgccgccugcccccacgccggcgccaagagcuucuacaagaaccugaucuggcuggugaagaagggcaacagcuaccccaagcugagcaagagcuacaucaacgacaagggcaaggaggugcuggugcuguggggcgugcaccaccccagcaccagcgccgaccagcagagccuguaccagaacgccgacgccuacguguucgugggcaccagcagauacagcaagaaguucaagagagagaucgccaucagacccaaggugagagaccaggagggcagaaugaacuacuacuggacccugguggagcccggcgacaagaucaccuucgaggccaccggcaaccugguggugcccagauacgccuucgccauggagagaaacgccggcagcggcaucaucaucagcgacacccccgugcacgacugcaacaccaccugccagacccccaagggcgccaucaacaccagccugcccuuccagaacauccaccccaucaccaucggcaagugccccaaguacgugaagagcaccaagcugagacuggccaccggccugagaaacgugcccagcauccagagcagaggccuguucggcgccaucgccggcuucaucgagggcggcuggaccggcaugguggacggcugguacggcuaccaccaccagaacgagcagggcagcggcuacgccgccgaccugaagagcacccagcacgccaucgacgagaucaccaacaaggugaacagcgugaucgagaagaugaacacccaguucaccgccgugggcaaggaguucaaccaccuggagaagagaaucgagaaccugaacaagaagguggacgacggcuuccuggacaucuggaccuacaacgccgagcugcuggugcugcuggagaacgagagaacccuggacuaccacgacagcaacgugaagaaccuguacgagaaggugagaagccagcugaagaacaacgccaaggagaucggcaacggcugcuucgaguucuaccacaagugcgacaacaccugcauggagagcgugaagaacggcaccuacgacuaccccaaguacagcgaggaggccaagcugaacagagaggagaucaacggcgugaagcuggagagcaccagaaucuaccagauccuggccaucuacagcaccguggccagcagccuggugcugguggugagccugggcgccaucagcuucuggaugugcagcaacggcagccugcagugcagaaucugcaucuga

SEQ ID NO: 167596 - RNA, 1701 nt, Artificial Sequence
  derived and/or modified CDS sequence (opt4) from hemagglutinin__InfluenzaA__AEO01454
augaaggccauccugguggugcugcuguacaccuucgccaccgccaacgccgacacccugugcaucggcuaccacgccaacaacagcaccgacaccguggacaccgugcuggagaagaacgugaccgugacccacagcgugaacauccuggaggacaagcacaacggcaagcugugcaagcugagaggcguggccccccugcaccugggcaagugcaacaucgccggcuggauccugggcaaccccgagugcgagagccugagcaccgccagcagcuggagcuacaucguggagaccagcagcagcgacaacggcaccugcuaccccggcgacuucaucgacuacgaggagcugagagagcagcugagcagcgugagcagcuucgagagauucgagaucuuccccaagaccagcagcuggcccaaccacgacagcaacaagggcgugaccgccgccugcccccacgccggcgccaagagcuucuacaagaaccugaucuggcuggugaagaagggcaacagcuaccccaagcugagcaagagcuacaucaacgacaagggcaaggaggugcuggugcuguggggcauccaccaccccagcaccagcgccgaccagcagagccuguaccagaacgccgacgccuacguguucgugggcaccagcagauacagcaagaaguucaagcccgagaucgccaucagacccaaggugagagaccaggagggcagaaugaacuacuacuggacccugguggagcccggcgacaagaucaccuucgaggccaccggcaaccugguggugcccagauacgccuucgccauggagagaaacgccggcagcggcaucaucaucagcgacacccccgugcacgacugcaacaccaccugccagacccccaagggcgccaucaacaccagccugcccuuccagaacauccaccccaccaccaucggcaagugccccaaguacgugaagagcaccaagcugagacuggccaccggccugagaaacgugcccagcauccagagcagaggccuguucggcgccaucgccggcuucaucgagggcggcuggaccggcaugguggacggcugguacggcuaccaccaccagaacgagcagggcagcggcuacgccgccgaccugaagagcacccagaacgccaucgacgagaucaccaacaaggugaacagcgugaucgagaagaugaacacccaguucaccgccgugggcaaggaguucaaccaccuggagaagagaaucgagaaccugaacaagaagguggacgacggcuuccuggacaucuggaccuacaacgccgagcugcuggugcugcuggagaacgagagaacccuggacuaccacgacagcaacgugaagaaccuguacgagaaggugagaagccagcugaagaacaacgccaaggagaucggcaacggcugcuucgaguucuaccacaagugcgacaacaccugcauggagagcgugaagaacggcaccuacgacuaccccaaguacagcgaggaggccaagcugaacagagaggagaucgacggcgugaagcuggagagcaccagaaucuaccagauccuggccaucuacagcaccguggccagcagccuggugcugguggugagccugggcgccaucagcuucuggaugugcagcaacggcagccugcagugcagaaucugcaucuga

SEQ ID NO: 167597 - RNA, 1701 nt, Artificial Sequence
  derived and/or modified CDS sequence (opt4) from hemagglutinin__InfluenzaA__AEO01455
augaaggccauccugguggugcugcuguacaccuucgccaccgccaacgccgacacccugugcaucggcuaccacgccaacaacagcaccgacaccguggacaccgugcuggagaagaacgugaccgugacccacagcgugaaccugcuggaggacaagcacaacggcaagcugugcaagcugagaggcguggccccccugcaccugggcaagugcaacaucgccggcuggauccugggcaaccccgagugcgagagccugagcaccgccagcagcuggagcuacaucguggagaccagcagcagcgacaacggcaccugcuaccccggcgacuucaucgacuacgaggagcugagagagcagcugagcagcgugagcagcuucgagagauucgagaucuuccccaagaccagcagcuggcccaaccacgacagcaacaagggcgugaccgccgccugcccccacgccggcgccaagagcuucuacaagaaccugaucuggcuggugaagaagggcaacagcuaccccaagcugagcaagagcuacaucaacgacaagggcaaggaggugcuggugcuguggggcauccaccaccccagcaccagcgccgaccagcagagccuguaccagaacgccgacgccuacguguucgugggcaccagcagauacagcaagaaguucaagcccgagaucgccaucagacccaaggugagagagcaggagggcagaaugaacuacuacuggacccugguggagcccggcgacaagaucaccuucgaggccaccggcaaccugguggugcccagauacgccuucgccauggagagaaacgccggcagcggcaucaucaucagcgacacccccgugcacgacugcaacaccaccugccagacccccaagggcgccaucaacaccagccugcccuuccagaacauccaccccaucaccaucggcaagugccccaaguacgugaagagcaccaagcugagacuggccaccggccugagaaacauccccagcauccagagcagaggccuguucggcgccaucgccggcuucaucgagggcggcuggaccggcaugguggacggcugguacggcuaccaccaccagaacgagcagggcagcggcuacgccgccgaccugaagagcacccagaacgccaucgacgagaucaccaacaaggugaacagcgugaucgagaagaugaacacccaguucaccgccgugggcaaggaguucaaccaccuggagaagagaaucgagaaccugaacaagaagguggacgacggcuuccuggacaucuggaccuacaacgccgagcugcuggugcugcuggagaacgagagaacccuggacuaccacgacagcaacgugaagaaccuguacgagaaggugagaagccagcugaagaacaacgccaaggagaucggcaacggcugcuucgaguucuaccacaagugcgacaacaccugcauggagagcgugaagaacggcaccuacgacuaccccaaguacagcgaggaggccaagcugaacagagaggagaucgacggcgugaagcuggagagcaccagaaucuaccagauccuggccaucuacagcaccguggccagcagccuggugcugguggugagccugggcgccaucagcuucuggaugugcagcaacggcagccugcagugcagaaucugcaucuga

SEQ ID NO: 167598 - RNA, 1701 nt, Artificial Sequence
  derived and/or modified CDS sequence (opt4) from hemagglutinin__InfluenzaA__AEO01456
augaaggccauccugaucgugcugcuguacaccuucgccaccgccaacgccgacacccugugcaucggcuaccacgccaacaacagcaccgacaccguggacacccugcuggagaagaacgugaccgugacccacagcgugaaccugcuggaggacaagcacaacggcaagcugugcaagcugagaggcguggccccccugcaccugggcaagugcaacaucgccggcuggauccugggcaaccccgagugcgagagccugagcaccgccagcagcuggagcuacaucguggagaccagcagcagcgacaacggcaccugcuaccccggcgacuucaucgacuacgaggagcugagagagcagcugagcagcgugagcagcuucgagagauucgagaucuuccccaagaccagcagcuggcccaaccacgacagcaacaagggcgugaccgccgccugcccccacgccggcgccaagagcuucuacaagaaccugaucuggcuggugaagaagggcaacagcuaccccaagcugagcaagagcuacaucaacgacaagggcaaggaggugcuggugcuguggggcauccaccaccccagcaccagcgccgaccagcagagccuguaccagaacgccgacgccuacguguucgugggcaccagcagauacagcaagaaguucaagcccgagaucgccaucagacccaaggugagagaccaggagggcagaaugaacuacuacuggacccugguggagcccggcgacaagaucaccuucgaggccaccggcaaccugguggugcccagauacgccuucgccauggacagaaacgccggcagcggcaucaucaucagcgacgcccccgugcacgacugcaacaccaccugccagacccccaagggcgccaucaacaccagccugcccuuccagaacauccaccccaucaccaucggcaagugccccaaguacgugaagagcaccaagcugagacuggccaccggccugagaaacgugcccagcauccagagcagaggccuguucggcgccaucgccggcuucaucgagggcggcuggaccggcaugguggacggcugguacggcuaccaccaccagaacgagcagggcagcggcuacgccgccgaccugaagagcacccagaacgccaucgacgagaucaccaacaaggugaacagcgugaucgagaagaugaacacccaguucaccgccgugggcaaggaguucaaccaccuggagaagagaaucgagaaccugaacaagaagguggacgacggcuuccuggacaucuggaccuacaacgccgagcugcuggugcugcuggagaacgagagaacccuggacuaccacgacagcaacgugaagaaccuguacgagaaggugagaagccagcugaagaacaacgccaaggagaucggcaacggcugcuucgaguucuaccacaagugcgacaacaccugcauggagagcgugaagaacggcaccuacgacuaccccaaguacagcgaggaggccaagcugaacagagaggagaucgacggcgugaagcuggagagcaccagaaucuaccagauccuggccaucuacagcaccguggccagcagccuggugcugguggugagccugggcgccaucagcuucuggaugugcagcaacggcagccugcagugcagaaucugcaucuga

SEQ ID NO: 167599 - RNA, 1701 nt, Artificial Sequence; identical to SEQ ID NO: 167498
  derived and/or modified CDS sequence (opt4) from hemagglutinin__InfluenzaA__AEO01457

SEQ ID NO: 167600 - RNA, 1701 nt, Artificial Sequence; identical to SEQ ID NO: 167494
  derived and/or modified CDS sequence (opt4) from hemagglutinin__InfluenzaA__AEO01458

SEQ ID NO: 167601 - RNA, 1701 nt, Artificial Sequence; identical to SEQ ID NO: 167494
  derived and/or modified CDS sequence (opt4) from hemagglutinin__InfluenzaA__AEO01459

SEQ ID NO: 167602 - RNA, 1701 nt, Artificial Sequence; identical to SEQ ID NO: 164149
  derived and/or modified CDS sequence (opt4) from hemagglutinin__InfluenzaA__AEO01461

SEQ ID NO: 167603 - RNA, 1701 nt, Artificial Sequence; identical to SEQ ID NO: 163830
  derived and/or modified CDS sequence (opt4) from hemagglutinin__InfluenzaA__AEO01462

SEQ ID NO: 167604 - RNA, 1701 nt, Artificial Sequence; identical to SEQ ID NO: 163082
  derived and/or modified CDS sequence (opt4) from hemagglutinin__InfluenzaA__AEO01463

SEQ ID NO: 167605 - RNA, 1701 nt, Artificial Sequence
  derived and/or modified CDS sequence (opt4) from hemagglutinin__InfluenzaA__AEO01464
augaaggccauccugguggugcugcuguacaccuucgccaccgccaacgccgacacccugugcaucggcuaccacgccaacaacagcaccgacaccguggacacccugcuggagaagaacgugaccgugacccacagcgugaaccugcuggaggacaagcacaacggcaagcugugcaagcugagaggcguggccccccugcaccugggcaagugcaacaucgccggcuggauccugggcaaccccgagugcgagagccugagcaccgccagcagcuggagcuacaucguggagaccagcagcagcgacaacggcaccugcuaccccggcgacuucaucgacuacgaggagcugagagagcagcugagcagcgugagcagcuucgagagauucgagaucuuccccaagaccagcagcuggcccaaccacgacagcaacaagggcgugaccgccgccugcccccacgccggcgccaagagcuucuacaagaaccugaucuggcuggugaagaagggcaacagcuaccccaagcugagcaagagcuacaucaacgacaagggcaaggaggugcuggugcuguggggcauccaccaccccagcaccagcgccgaccagcagagccuguaccagaacgccgacgccuacguguucgugggcaccagcagauacagcaagaaguucaagcccgagaucgccaucagacccaaggugagagaccaggagggcagaaugaacuacuacuggacccugguggagcccggcgacaagaucaccuucgaggccaccggcaaccugguggugcccagauacgccuucgccauggacagaaacgccggcagcggcaucaucaucagcgacaccagcgugcacgacugcaacaccaccugccagacccccaagggcgccaucaacaccagccugcccuuccagaacauccaccccaucaccaucggcaagugccccaaguacgugaagagcaccaagcugagacuggccaccggccugagaaacgugcccagcauccagagcagaggccuguucggcgccaucgccggcuucaucgagggcggcuggaccggcaugguggacggcugguacggcuaccaccaccagaacgagcagggcagcggcuacgccgccgaccugaagagcacccagaacgccaucgacgagaucaccaacaaggugaacagcgugaucgagaagaugaacacccaguucaccgccgugggcaaggaguucaaccaccuggagaagagaaucgagaaccugaacaagaagguggacgacggcuuccuggacaucuggaccuacaacgccgagcugcuggugcugcuggagaacgagagaacccuggacuaccacgacagcaacgugaagaaccuguacgagaaggugagaagccagcugaagaacaacgccaaggagaucggcaacggcugcuucgaguucuaccacaagugcgacaacaccugcauggagagcgugaagaacggcaccuacgacuaccccaaguacagcgaggaggccaagcugaacagagaggagaucgacggcgugaagcuggagagcaccagaaucuaccagauccuggccaucuacagcaccguggccagcagccuggugcugguggugagccugggcgccaucagcuucuggaugugcagcaacggcagccugcagugcagaaucugcaucuga

SEQ ID NO: 167606 - RNA, 1701 nt, Artificial Sequence; identical to SEQ ID NO: 167585
  derived and/or modified CDS sequence (opt4) from hemagglutinin__InfluenzaA__AEO01465

SEQ ID NO: 167607 - RNA, 1701 nt, Artificial Sequence; identical to SEQ ID NO: 164601
  derived and/or modified CDS sequence (opt4) from hemagglutinin__InfluenzaA__AEO01466

SEQ ID NO: 167608 - RNA, 1701 nt, Artificial Sequence; identical to SEQ ID NO: 163082
  derived and/or modified CDS sequence (opt4) from hemagglutinin__InfluenzaA__AEO01467

SEQ ID NO: 167609 - RNA, 1701 nt, Artificial Sequence; identical to SEQ ID NO: 163893
  derived and/or modified CDS sequence (opt4) from hemagglutinin__InfluenzaA__AEO01468

SEQ ID NO: 167610 - RNA, 1701 nt, Artificial Sequence; identical to SEQ ID NO: 162729
  derived and/or modified CDS sequence (opt4) from hemagglutinin__InfluenzaA__AEO01469

SEQ ID NO: 167611 - RNA, 1701 nt, Artificial Sequence
  derived and/or modified CDS sequence (opt4) from hemagglutinin__InfluenzaA__AEO01470
augaaggccauccugguggugcugcuguacaccuucgccaccgccaacgccgacacccugugcaucggcuaccacgccaacaacagcaccgacaccguggacaccgugcuggagaagaacgugaccgugacccacagcgugaaccugcuggaggacaagcacaacggcaagcugugcaagcugagaggcguggccccccugcaccugggcaagugcaacaucgccggcuggauccugggcaaccccgagugcgagagccugagcaccgccagcagcuggagcuacaucguggagaccagcagcagcgacaacggcaccugcuaccccggcgacuucaucgacuacgaggagcugagagagcagcugagcagcgugagcagcuucgagagauucgagaucuuccccaagaccagcagcuggcccaaccacgacagcaacaagggcgugaccgccgccugcccccacgccggcgccaagagcuucuacaagaaccugaucuggcuggugaagaagggcaacagcuaccccaagcugagcaagagcuacaucaacgacaagggcaaggaggugcuggugcuguggggcauccaccaccccagcaccagcgccgaccagcagagccuguaccagaacgccgacgccuacguguucgugggcaccagcagauacagcaagaaguucaagcccgagaucgccaucagacccaaggugagagaccaggagggcagaaugaacuacuacuggacccugguggagcccggcgacaagaucaccuucgaggccaccggcaaccuggugauccccagauacgccuucgccauggagagaaacgccggcagcggcaucaucaucagcgacacccccgugcacgacugcaacaccaccugccagacccccaagggcgccaucaacaccagccugcccuuccagaacauccaccccaucaccaucggcaagugccccaaguacgugaagagcaccaagcugagacuggccaccggccugagaaacgugcccagcauccagagcagaggccuguucggcgccaucgccggcuucaucgagggcggcuggaccggcaugguggacggcugguacggcuaccaccaccagaacgagcagggcagcggcuacgccgccgaccugaagagcacccagaacgccaucgacgagaucaccaacaaggugaacagcgugaucgagaagaugaacacccaguucaccgccgugggcaaggaguucaaccaccuggagaagagaaucgagaaccugaacaagaagguggacgacggcuuccuggacaucuggaccuacaacgccgagcugcuggugcugcuggagaacgagagaacccuggacuaccacgacagcaacgugaagaaccuguacgagaaggugagaagccagcugaagaacaacgccaaggagaucggcaacggcugcuucgaguucuaccacaagugcgacaacaccugcauggagagcgugaagaacggcaccuacgacuaccccaaguacagcgaggaggccaagcugaacagagaggagaucgacggcgugaagcuggagagcaccagaaucuaccagauccuggccaucuacagcaccguggccagcagccuggugcugguggugagccugggcgccaucagcuucuggaugugcagcaacggcagccugcagugcagaaucugcaucuga

SEQ ID NO: 167612 - RNA, 1701 nt, Artificial Sequence; identical to SEQ ID NO: 167438
  derived and/or modified CDS sequence (opt4) from hemagglutinin__InfluenzaA__AEO01471

SEQ ID NO: 167613 - RNA, 1701 nt, Artificial Sequence; identical to SEQ ID NO: 164356
  derived and/or modified CDS sequence (opt4) from hemagglutinin__InfluenzaA__AEO01472

SEQ ID NO: 167614 - RNA, 1701 nt, Artificial Sequence
  derived and/or modified CDS sequence (opt4) from hemagglutinin__InfluenzaA__AEO01473
augaaggccauccugguggugcugcuguacaccuucgccaccgccaacgccgacacccugugcaucggcuaccacgccaacaacagcaccgacaccguggacaccgugcuggagaagaacgugaccgugacccacagcgugaaccugcuggaggacaagcacaacggcaagcugugcaagcugagaggcguggccccccugcaccugggcaagugcaacaucgccggcuggauccugggcaaccccgagugcgagagccugagcaccgccagcagcuggagcuacaucguggagaccagcagcagcgacaacggcaccugcuaccccggcgacuucaucgacuacgaggagcugagagagcagcugagcagcgugagcagcuucgagagauucgagaucuuccccaagaccagcagcuggcccaaccacgacagcaacaagggcgugaccgccgccugcccccacgccggcgccaagagcuucuacaagaaccugaucuggcuggugaagaagggcaacagcuaccccaagcugaacaagagcuacaucaacgacaagggcaaggaggugcuggugcuguggggcauccaccaccccagcaccagcgccgaccagcagagccuguaccagaacgccgacgccuacguguucgugggcaccagcagauacagcaagaaguucaagcccgagaucgccaucagacccaaggugagagaccaggagggcagaaugaacuacuacuggacccugguggagcccggcgacaagaucaccuucgaggccaccggcaaccugguggugcccagauacgccuucgccauggagagaaacgccggcagcggcaucaucaucagcgacacccccgugcacgacugcaacaccaccugccagacccccgagggcgccaucaacaccagccugcccuuccagaacauccaccccaucaccaucggcgagugccccaaguacgugaagagcaccaagcugagacuggccaccggccugagaaacgugcccagcauccagagcagaggccuguucggcgccaucgccggcuucaucgagggcggcuggaccggcaugguggacggcugguacggcuaccaccaccagaacgagcagggcagcggcuacgccgccgaccugaagagcacccagaacgccaucgacaagaucaccaacaaggugaacagcgugaucgagaagaugaacacccaguucaccgccgugggcaaggaguucaaccaccuggagaagagaaucgagaaccugaacaagaagguggacgacggcuuccuggacaucuggaccuacaacgccgagcugcuggugcugcuggagaacgagagaacccuggacuaccacgacagcaacgugaagaaccuguacgagaaggugagaagccagcugaagaacaacgccaaggagaucggcaacggcugcuucgaguucuaccacaagugcgacaacaccugcauggagagcgugaagaacggcaccuacgacuaccccaaguacagcgaggaggccaagcugaacagagaggagaucgacggcgugaagcuggagagcaccagaaucuaccagauccuggccaucuacagcaccguggccagcagccuggugcugguggugagccugggcgccaucagcuucuggaugugcagcaacggcagccugcagugcagaaucugcaucuga

SEQ ID NO: 167615 - RNA, 1701 nt, Artificial Sequence
  derived and/or modified CDS sequence (opt4) from hemagglutinin__InfluenzaA__AEO01474
augaaggccauccugguggugcugcuguacaccuucgccaccgccaacgccgacacccugugcaucggcuaccacgccaacaacagcaccgacaccguggacaccgugcuggagaagaacgugaccgugacccacagcgugaaccugcuggaggacaagcacaacggcaagcugugcaagcugagaggcguggccccccugcaccugggcaagugcaacaucgccggcuggauccugggcaaccccgagugcgagagccugagcaccgccagcagcuggagcuacaucguggagaccagcagcagcgacaacggcaccugcuaccccggcgacuucaucgacuacgaggagcugagagagcagcugagcagcgugagcagcuucgagagauucgagaucuuccccaagaccagcagcuggcccaaccacgacagcgacaagggcgugaccgccgccugcccccacgccggcgccaagagcuucuacaagaaccugaucuggcuggugaagaagggcaacagcuaccccaagcugagcaagagcuacaucaacgacaagggcaaggaggugcuggugcuguggggcauccaccaccccagcaccagcgccgaccagcagagccuguaccagaacgccgacgccuacguguucgugggcaccagcagauacagcaagaaguucaagcccgagaucgccaucagacccaaggugagagaccaggagggcagaaugaacuacuacuggacccugguggagcccggcgacaagaucaccuucgaggccaccggcaaccugguggugcccagauacgccuucgccauggagagaaacgccggcagcggcaucaucaucagcgacacccccgugcacgacugcaacaccaccugccagacccccaagggcgccaucaacaccagccugcccuuccagaacauccaccccaucaccaucggcaagugccccaaguacgugaagagcaccaagcugagacuggccaccggccugagaaacgugcccagcauccagagcagaggccuguucggcgccaucgccggcuucaucgagggcggcuggaccggcaugguggacggcugguacggcuaccaccaccagaacgagcagggcagcggcuacgccgccgaccugaagagcacccagaacgccaucgacaagaucaccaacaaggugaacagcgugaucgagaagaugaacacccaguucaccgccgugggcaaggaguucaaccaccuggagaagagaaucgagaaccugaacaagaagguggacgacggcuuccuggacaucuggaccuacaacgccgagcugcuggugcugcuggagaacgagagaacccuggacuaccacgacagcaacgugaagaaccuguacgagaaggugagaagccagcugaagaacaacgccaaggagaucggcaacggcugcuucgaguucuaccacaagugcgacaacaccugcauggagagcgugaagaacggcaccuacgacuaccccaaguacagcgaggaggccaagcugaacagagaggagaucgacggcgugaagcuggagagcaccagaaucuaccagauccuggccaucuacagcaccguggccagcagccuggugcugguggugagccugggcgccaucagcuucuggaugugcagcaacggcagccugcagugcagaaucugcaucuga

SEQ ID NO: 167616 - RNA, 1701 nt, Artificial Sequence
  derived and/or modified CDS sequence (opt4) from hemagglutinin__InfluenzaA__AEO01475
augaaggccauccugguggugcugcuguacaccuucgccaccgccaacgccgacacccugugcaucggcuaccacgccaacaacagcaccgacaccguggacaccgugcuggagaagaacgugaccgugacccacagcgugaaccugcuggaggacaagcacaacggcaagcugugcaagcugagaggcguggccccccugcaccugggcaagugcaacaucgccggcuggauccugggcaaccccgagugcgagagccugagcaccgccagcagcuggagcuacaucguggagaccagcaacagcgacaacggcaccugcuaccccggcgacuucaucgacuacgaggagcugagagagcagcugagcagcgugagcagcuucgagagauucgagaucuuccccaagaccagcagcuggcccaaccacgacagcaacaagggcgugaccgccgccugcccccacgccggcgccaagagcuucuacaagaaccugaucuggcuggugaagaagggcaacagcuaccccaagcugagcaagagcuacaucaacgacaagggcaaggaggugcuggugcuguggggcauccaccaccccagcaccagcgccgaccagcagagccuguaccagaacgccgacgccuacguguucgugggcaccagcagauacagcaagaaguucaagcccgagaucgccaucagacccaaggugagagaccaggagggcagaaugaacuacuacuggacccugguggagcccggcgacaagaucaccuucgaggccaccggcaaccugguggugcccagauacgccuucgccauggagagaaacgccggcagcggcaucaucaucagcgacacccccgugcacgacugcaacaccaccugccagacccccaagggcgccaucaacaccagccugcccuuccagaacauccaccccaucaccaucggcaagugccccaaguacgugaagagcaccaagcugagacuggccaccggccugagaaacgugcccagcauccagagcagaggccuguucggcgccaucgccggcuucaucgagggcggcuggaccggcaugguggacggcugguacggcuaccaccaccagaacgagcagggcagcggcuacgccgccgaccugaagagcacccagcacgccaucgacgagaucaccaacaaggugaacagcgugaucgagaagaugaacacccaguucaccgccgugggcaaggaguucaaccaccuggagaagagaaucgagaaccugaacaagaagguggacgacggcuuccuggacaucuggaccuacaacgccgagcugcuggugcugcuggagaacgagagaacccuggacuaccacgacagcaacgugaagaaccuguacgagaaggugagaagccagcugaagaacaacgccaaggagaucggcaacggcugcuucgaguucuaccacaagugcgacaacaccugcauggagagcgugaagaacggcaccuacgacuaccccaaguacagcgaggaggccaagcugaacagagaggagaucgacggcgugaagcuggagagcaccagaaucuaccagauccuggccaucuacagcaccguggccagcagccuggugcugguggugagccugggcgccaucagcuucuggaugugcagcaacggcagccugcagugcagaaucugcaucuga

SEQ ID NO: 167617 - RNA, 1701 nt, Artificial Sequence
  derived and/or modified CDS sequence (opt4) from hemagglutinin__InfluenzaA__AEO01476
augaaggccauccugguggugcugcuguacaccuucagcaccgccaacgccgacacccugugcaucggcuaccacgccaacaacagcaccgacaccguggacaccgugcuggagaagaacgugaccgugacccacagcgugaaccugcuggaggacaagcacaacggcaagcugugcaagcugagaggcguggccccccugcaccugggcaagugcaacaucgccggcuggauccugggcaaccccgagugcgagagccugagcaccgccagcagcuggagcuacaucguggagaccagcagcagcgacaacggcaccugcuaccccggcgacuucaucgacuacgaggagcugagagagcagcugagcagcgugagcagcuucgagagauucgagaucuuccccaagaccagcagcuggcccaaccacgacagcaacaagggcgugaccgccgccugcccccacgccggcgccaagagcuucuacaagaaccugaucuggcuggugaagaagggcaacagcuaccccaagcugagcaagagcuacaucaacgacaagggcaaggaggugcuggugcuguggggcauccaccaccccagcaccagcgccgaccagcagagccuguaccagaacgccgacgccuacguguucgugggcaccagcagauacagcaagaaguucaagcccgagaucgccaucagacccaaggugagagaccaggagggcagaaugaacuacuacuggacccugguggagcccggcgacaagaucaccuucgaggccaccggcaaccugguggugcccagauacgccuucgccauggagagaaacgccggcagcggcaucaucaucagcgacacccccgugcacgacugcaacaccaccugccagacccccaagggcgccaucaacaccagccugcccuuccagaacauccaccccaucaccaucggcaagugccccaaguacgugaagagcaccaagcugagacuggccaccggccugagaaacgugcccagcauccagagcagaggccuguucggcgccaucgccggcuucaucgagggcggcuggaccggcaugguggacggcugguacggcuaccaccaccagaacgagcagggcagcggcuacgccgccgaccugaagagcacccagaacgccaucgacgagaucaccaacaaggugaacagcgugaucgagaagaugaacacccaguucaccgccgugggcaaggaguucaaccaccuggagaagagaaucgagaaccugaacaagaagguggacgacggcuuccuggacaucuggaccuacaacgccgagcugcuggugcugcuggagaacgagagaacccuggacuaccacgacagcaacgugaagaaccuguacgagaaggugagaagccagcugaagaacaacgccaaggagaucggcaacggcugcuucgaguucuaccacaagugcgacaacaccugcauggagagcgugaagaacggcaccuacgacuaccccaaguacagcgaggaggccaagcugaacagagaggagaucgacggcgugaagcuggagagcaccagaaucuaccagauccuggccaucuacagcaccguggccagcagccuggugcugguggugagccugggcgccaucagcuucuggaugugcagcaacggcagccugcagugcagaaucugcaucuga

SEQ ID NO: 167618 - RNA, 1701 nt, Artificial Sequence
  derived and/or modified CDS sequence (opt4) from hemagglutinin__InfluenzaA__AEO01477
augaaggccauccugguggugcugcuguacaccuucgccaccgccaacgccgacacccugugcaucggcuaccacgccaacaacagcaccgacaccguggacaccgugcuggagaagaacgugaccgugacccacagcgugaaccugcuggaggacaagcacaacggcaagcugugcaagcugagaggcguggccccccugcaccugggcaagugcaacaucgccggcuggauccugggcaaccccgagugcgagagccugagcaccgccagcagcuggagcuacaucguggagaccagcagcagcgacaacggcaccugcuaccccggcgacuucaucgacuacgaggagcugagagagcagcugagcagcgugagcagcuucgagagauucgagaucuuccccaagaccagcagcuggcccaaccacgacagcaacaagggcgugaccgccgccugcccccacgccggcgccaagagcuucuacaagaaccugaucuggcuggugaagaagggcaacagcuaccccaagcugagcaagagcuacaucaacgacaagggcaaggaggugcuggugcuguggggcauccaccaccccagcaccagcgccgaccagcagagccuguaccagaacgccgacgccuacgccuucgugggcaccagcagauacagcaagaaguucaagcccgagaucgccaucagacccaaggugagagagcaggagggcagaaugaacuacuacuggacccugguggagcccggcgacaagaucaccuucgaggccaccggcaaccugguggugcccagauacgccuucgccauggagagaaacgccggcagcggcaucaucaucagcgacacccccgugcacgacugcaacaccaccugccagacccccaagggcgccaucaacaccagccugcccuuccagaacauccaccccaucaccaucggcaagugccccaaguacgugaagagcaccaagcugagacuggccaccggccugagaaacgugcccagcauccagagcagaggccuguucggcgccaucgccggcuucaucgagggcggcuggaccggcaugguggacggcugguacggcuaccaccaccagaacgagcagggcagcggcuacgccgccgaccugaagagcacccagaacgccaucgacgagaucaccaacaaggugaacagcgugaucgagaagaugaacacccaguucaccgccgugggcaaggaguucaaccaccuggagaagagaaucgagaaccugaacaagaagguggacgacggcuuccuggacaucuggaccuacaacgccgagcugcuggugcugcuggagaacgagagaacccuggacuaccacgacagcaacgugaagaaccuguacgagaaggugagaagccagcugaagaacaacgccaaggagaucggcaacggcugcuucgaguucuaccacaagugcgacaacaccugcauggagagcgugaagaacggcaccuacgacuaccccaaguacagcgaggaggccaagcugaacagagaggagaucgacggcgugaagcuggagagcaccagaaucuaccagauccuggccaucuacagcaccguggccagcagccuggugcugguggugagccugggcgccaucagcuucuggaugugcagcaacggcagccugcagugcagaaucugcaucuga

SEQ ID NO: 167619 - RNA, 1701 nt, Artificial Sequence; identical to SEQ ID NO: 164057
  derived and/or modified CDS sequence (opt4) from hemagglutinin__InfluenzaA__AEO01478

SEQ ID NO: 167620 - RNA, 1701 nt, Artificial Sequence; identical to SEQ ID NO: 167447
  derived and/or modified CDS sequence (opt4) from hemagglutinin__InfluenzaA__AEO01479

SEQ ID NO: 167621 - RNA, 1701 nt, Artificial Sequence; identical to SEQ ID NO: 167494
  derived and/or modified CDS sequence (opt4) from hemagglutinin__InfluenzaA__AEO01480

SEQ ID NO: 167622 - RNA, 1701 nt, Artificial Sequence
  derived and/or modified CDS sequence (opt4) from hemagglutinin__InfluenzaA__AEO01482
augaaggccauccugguggugcugcuguacaccuucgccaccgccaacgccgacacccugugcaucggcuaccacgccaacaacagcaccgacaccguggacaccgugcuggagaagaacgugaccgugacccacagcgugaaccugcuggaggacaagcacaacggcaagcugugcaagcugagaggcguggccccccugcaccugggcaagugcaacaucgccggcuggauccugggcaaccccgagugcgagagccugagcaccgccagcagcuggagcuacaucguggagaccagcagcagcgacaacggcaccugcuaccccggcgacuucaucgacuacgaggagcugagagagcagcugagcagcgugagcagcuucgagagauucgagaucuuccccaagaccagcagcuggcccaaccacgacagcaacaagggcgugaccgccgccugcccccacgccggcgccaagagcuucuacaagaaccugaucuggcuggugaagaagggcaacagcuaccccaagcugagcaagagcuacaucaacgacaagggcaaggaggugcuggugcuguggggcauccaccaccccagcaccagcgccgaccagcagagccuguaccagaacgccgacgccuacguguucgugggcaccagcagauacagcaagaaguucaagcccgagaucgccaucagacccaaggugagagaccaggagggcagaaugaacuacuacuggacccugguggagcccggcgacaagaucaccuucgaggccaccggcaaccugguggugcccagauacgccuucgccauggagagaaacgccggcagcggcaucaucaucagcgacacccccgugcacgacugcaacaccaccugccagacccccaagggcgccaucaacaccagccugcccuuccagaacauccaccccaucaccaucggcaagugccccaaguacgugaagagcaccaagcugagacuggccaccggccugagaaacgugcccagcauccagagcagaggccuguucggcgccaucgccggcuucaucgagggcggcuggaccggcaugguggacggcugguacggcuaccaccaccagaacgagcagggcagcggcuacgccgccgaccugaagagcacccagaacgccaucgacaagaucaccaacaaggugaacagcgugaucgagaagaugaacacccaguucaccgccgugggcaaggaguucaaccaccuggagaagagaaucgagaaccugaacaagaagguggacgacggcuuccuggacaucuggaccuacaacgccgagcugcuggugcugcuggagaacgagagaacccuggacuaccacgacagcaacgugaagaaccuguacgagaaggugagaagccagcugaagaacaacgccaaggagaucggcaacggcugcuucgaguucuaccacaagugcaacaacaccugcauggagagcgugaagaacggcaccuacgacuaccccaaguacagcgaggaggccaagcugaacagagaggagaucgacggcgugaagcuggagagcaccagaaucuaccagauccuggccaucuacagcaccguggccagcagccuggugcugguggugagccugggcgccaucagcuucuggaugugcagcaacggcagccugcagugcagaaucugcaucuga

SEQ ID NO: 167623 - RNA, 1701 nt, Artificial Sequence
  derived and/or modified CDS sequence (opt4) from hemagglutinin__InfluenzaA__AEO01483
augaaggccauccugguggugcugcuguacaccuucgccaccgccaacgccgacacccugugcaucggcuaccacgccaacaacagcaccgacaccguggacaccgugcuggagaagaacgugaccgugacccacagcgugaaccugcuggaggacaagcacaacggcaagcugugcaagcugagaggcguggccccccugcaccugggcaagugcaacaucgccggcuggauccugggcaaccccgagugcgagagccugagcaccgccagcagcuggagcuacaucguggagaccagcaacagcgacaacggcaccugcuaccccggcgacuucaucgacuacgaggagcugagagagcagcugagcagcgugagcagcuucgagagauucgagaucuuccccaagaccagcagcuggcccaaccacgacagcaacaagggcgugaccgccgccugcccccacgccggcgccaagagcuucuacaagaaccugaucuggcuggugaagaagggcaacagcuaccccaagcugagcaagagcuacaucaacgacaagggcaaggaggugcuggugcuguggggcauccaccaccccagcaccagcgccgaccagcagagccuguaccagaacgccgacgccuacguguucgugggcaccagcagauacagcaagaaguucaagcccgagaucgccaucagacccaaggugagagaccaggagggcagaaugaacuacuacuggacccugguggagcccggcgacaagaucaccuucgaggccaccggcaaccugguggugcccagauacgccuucgccauggagagaaacgccggcagcggcaucaucaucagcgacacccccgugcacgacugcaacaccaccugccagacccccaagggcgccaucaacaccagccugcccuuccagaacauccaccccaucaccaucggcaagugccccaaguacgugaagagcaccaagcugagacuggccaccggccugagaaacgugcccagcauccagagcagaggccuguucggcgccaucgccggcuucaucgagggcggcuggaccggcaugguggacggcugguacggcuaccaccaccagaacgagcagggcagcggcuacgccgccgaccugaagagcacccagaacgccaucgacaagaucaccaacaaggugaacagcgugaucgagaagaugaacacccaguucaccgccgugggcaaggaguucaaccaccuggagaagagaaucgagaaccugaacaagaagguggacgacggcuuccuggacaucuggaccuacaacgccgagcugcuggugcugcuggagaacgagagaacccuggacuaccacgacagcaacgugaagaaccuguacgagaaggugagaagccagcugaagaacaacgccaaggagaucggcaacggcugcuucgaguucuaccacaagugcgacaacaccugcauggagagcgugaagaacggcaccuacgacuaccccaaguacagcgaggaggccaagcugaacagagaggagaucgacggcgugaagcuggagagcaccagaaucuaccagauccuggccaucuacagcaccgccgccagcagccuggugcugguggugagccugggcgccaucagcuucuggaugugcagcaacggcagccugcagugcagaaucugcaucuga

SEQ ID NO: 167624 - RNA, 1701 nt, Artificial Sequence
  derived and/or modified CDS sequence (opt4) from hemagglutinin__InfluenzaA__AEO01484
augaaggccauccugguggugcugcuguacaccuucgccaccgccaacgccgacacccugugcaucggcuaccacgccaacaacagcaccgacaccguggacaccgugcuggagaagaacgugaccgugacccacagcgugaaccugcuggaggacaagcacaacggcaagcugugcaagcugaagggcguggccccccugcaccugggcaagugcgacaucgccggcuggauccugggcaaccccgagugcgagagccugagcaccgccagcagcuggagcuacaucguggagaccagcagcagcgacaacggcaccugcuaccccggcgacuucaucgacuacgaggagcugagagagcagcugagcagcgugagcagcuucgagagauucgagaucuuccccaagaccagcagcuggcccaaccacgacagcaacaagggcgugaccgccgccugcccccacgccggcgccaagagcuucuacaagaaccugaucuggcuggugaagaagggcaacagcuaccccaagcugagcaagagcuacaucaacgacaagggcaaggaggugcuggugcuguggggcauccaccaccccagcaccagcgccgaccagcagagccuguaccagaacgccgacgccuacguguucgugggcaccagcagauacagcaagaaguucaagcccgagaucgccaucagacccaaggugagagaccaggagggcagaaugaacuacuacuggacccugguggagcccggcgacaagaucaccuucgaggccaccggcaaccugguggugcccagauacgccuucgccauggagagaaacgccggcagcggcaucaucaucagcgacacccccgugcacgacugcaacaccaccugccagacccccaagggcgccaucaacaccagccugcccuuccagaacauccaccccaucaccaucggcaagugccccaaguacgugaagagcaccaagcugagacuggccaccggccugagaaacgugcccagcauccagagcagaggccuguucggcgccaucgccggcuucaucgagggcggcuggaccggcaugguggacggcugguacggcuaccaccaccagaacgagcagggcagcggcuacgccgccgaccugaagagcacccagcacgccaucgacgagaucaccaacaaggugaacagcgugaucgagaagaugaacacccaguucaccgccgugggcaaggaguucaaccaccuggagaagagaaucgagaaccugaacaagaagguggacgacggcuuccuggacaucuggaccuacaacgccgagcugcuggugcugcuggagaacgagagaacccuggacuaccacgacagcaacgugaagaaccuguacgagaaggugagaagccagcugaagaacaacgccaaggagaucggcaacggcugcuucgaguucuaccacaagugcgacaacaccugcauggagagcgugaagaacggcaccuacgacuaccccaaguacagcgaggaggccaagcugaacagagaggagaucgacggcgugaagcuggagagcaccagaaucuaccagauccuggccaucuacagcaccguggccagcagccuggugcugguggugagccugggcgccaucagcuucuggaugugcagcaacggcagccugcagugcagaaucugcaucuga

SEQ ID NO: 167625 - RNA, 1701 nt, Artificial Sequence
  derived and/or modified CDS sequence (opt4) from hemagglutinin__InfluenzaA__AEO01485
augaaggccauccugguggugcugcuguacaccuucgccaccgccaacgccgacacccugugcaucggcuaccacgccaacaacagcaccgacaccguggacaccgugcuggagaagaacgugaccgugacccacagcgugaaccugcuggaggacaagcacaacggcaagcugugcaagcugagaggcguggccccccugcaccugggcaagugcaacaucgccggcuggauccugggcaaccccgagugcgagagccugagcaccgccagcagcuggagcuacaucguggagaccagcagcagcgacaacggcaccugcuaccccggcgacuucaucgacuacgaggagcugagagagcagcugagcagcgugagcagcuucgagagauucgagaucuuccccaagaccagcagcuggcccaaccacgacagcaacaagggcgugaccgccgccugcccccacgccggcgccaagagcuucuacaagaaccugaucuggcuggugaagaagggcaacagcuaccccaagcugagcaagagcuacaucaacgacaagggcaaggaggugcuggugcuguggggcauccaccaccccagcaccagcgccgaccagcagagccuguaccagaacgccgacgccuacguguucgugggcaccagcagauacagcaagaaguucaagcccgagaucaccaucagacccaaggugagagaccaggagggcagaaugaacuacuacuggacccugguggagcccggcgacaagaucaccuucgaggccaccggcaaccugguggugcccagauacgccuucgccauggagagaaacgccggcagcggcaucaucaucagcgacacccccgugcacgacugcaacaccaccugccagacccccaagggcgccaucaacaccagccugcccuuccagaacauccaccccaucaccaucggcaagugccccaaguacgugaagagcaccaagcugagacuggccaccggccugagaaacgugcccagcauccagagcagaggccuguucggcgccaucgccggcuucaucgagggcggcuggaccggcaugguggacggcugguacggcuaccaccaccagaacgagcagggcagcggcuacgccgccgaccugaagagcacccagaacgccaucgacgagaucaccaacaaggugaacagcgugaucgagaagaugaacacccaguucaccgccgugggcaaggaguucaaccaccuggagaagagaaucgagaaccugaacaagaagguggacgacggcuuccuggacaucuggaccuacaacgccgagcugcuggugcugcuggagaacgagagaacccuggacuaccacgacagcaacgugaagaaccuguacgagaaggugagaagccagcugaagaacaacgccaaggagaucggcaacggcugcuucgaguucuaccacaagugcgacaacaccugcauggagagcgugaagaacggcaccuacgacuaccccaaguacagcgaggaggccaagcugaacagagaggagaucgacggcgugaagcuggagagcaccagaaucuaccagauccuggccaucuacagcaccguggccagcagccuggugcugguggugagccugggcgccaucagcuucuggaugugcagcaacggcagccugcagugcagaaucugcaucuga

SEQ ID NO: 167626 - RNA, 1701 nt, Artificial Sequence
  derived and/or modified CDS sequence (opt4) from hemagglutinin__InfluenzaA__AEO01487
augaaggccauccugguggugcugcuguacaccuucgccaccgccaacgccgacacccugugcaucggcuaccacgccaacaacagcaccgacaccguggacaccgugcuggagaagaacgugaccgugacccacagcgugaaccugcuggaggacaagcacaacggcaagcugugcaagcugagaggcguggccccccugcaccugggcaagugcaacaucgccggcuggauccugggcaaccccgagugcgagagccugagcaccgccagcagcuggagcuacaucguggagaccagcagcagcgacaacggcaccugcuaccccggcgacuucaucgacuacgaggagcugagagagcagcugagcagcgugagcagcuucgagagauucgagaucuuccccaagaccagcagcuggcccaaccacgacagcaacaagggcgugaccgccgccugcccccacgccggcgccaagagcuucuacaagaaccugaucuggcuggugaagaagggcaacagcuaccccaagcugagcaagagcuacaucaacgacaagggcaaggaggugcuggugcuguggggcauccaccaccccagcaccagcgccgaccagcagagccuguaccagaacgccgacgccuacguguucgugggcaccagcagauacagcaagaaguucaagcccgagaucgccaucagacccaaggugagagaccaggagggcagaaugaacuacuacuggacccugguggagcccggcgacaagaucaccuucgaggccaccggcaaccugguggugcccagauacgccuucgccauggagagaaacgccggcagcggcaucaucaucagcgacacccccgugcacgacugcaacaccaccugccagacccccaagggcgccaucaacaccagccugcccuuccagaacauccaccccaucaccaucggcaagugccccaaguacgugaagagcaccaagcugagacuggccaccggccugagaaacgugcccagcauccagagcagaggccuguucggcgccaucgccggcuucaucgagggcggcuggaccggcaugguggacggcugguacggcuaccaccaccagaacgagcagggcagcggcuacgccgccgaccugaagagcacccagaacgccaucgacgagaucaccaacaaggugaacagcgugaucgagaagaugaacacccaguucaccgccgugggcaaggaguucaaccaccuggagaagagaaucgagaaccugaacaagaagguggacgacggcuuccuggacaucuggaccuacaacgccgagcugcuggugcugcuggagaacgagagaacccuggacuaccacgacagcaacgugaagaaccuguacgagaaggugagaagccagcugaagaacaacgccaaggagaucggcaacggcugcuucgaguucuaccacaagugcgacaacaccugcauggagagcgugaagaacggcaccuacgacuaccccaaguacagcgaggaggccaagcugaacagagaggagaucgacggcgugacccuggagagcaccagaaucuaccagauccuggccaucuacagcaccguggccagcagccuggugcugguggugagccugggcgccaucagcuucuggaugugcagcaacggcagccugcagugcagaaucugcaucuga

SEQ ID NO: 167627 - RNA, 1701 nt, Artificial Sequence
  derived and/or modified CDS sequence (opt4) from hemagglutinin__InfluenzaA__AEO01488
augaaggccauccugguggugcugcuguacaccuucgccaccgccaacgccgacacccugugcaucggcuaccacgccaacaacagcaccgacaccguggacaccgugcuggagaagaacgugaccgugacccacagcgugaaccugcuggaggacaagcacaacggcaagcugugcaagcugagaggcguggccccccugcaccugggcaagugcaacaucgccggcuggauccugggcaaccccgagugcgagagccugagcaccgccagcagcuggagcuacaucguggagaccagcagcagcgacaacggcaccugcuaccccggcgacuucaucgacuacgaggagcugagagagcagcugagcagcgugagcagcuucgagagauucgagaucuuccccaagaccagcagcuggcccaaccacgacagcaacaagggcgugaccgccgccugcccccacgccggcgccaagagcuucuacaagaaccugaucuggcuggugaagaagggcaacagcuaccccaagcugagcaagagcuacaucaacgacaagggcaaggaggugcuggugcuguggggcauccaccaccccagcaccagcgccgaccagcagagccuguaccagaacgccgacgccuacguguucgugggcaccagcagauacagcaagaaguucaagcccgagaucgccaucagacccaaggugagagaccaggagggcagaaugaacuacuacuggacccugguggagcccggcgacaagaucaccuucgaggccaccggcaaccugguggugcccagauacgccuucaccauggagagaaacgccggcagcggcaucaucaucagcgacacccccgugcacgacugcaacaccaccugccagacccccaagggcgccaucaacaccagccugcccuuccagaacauccaccccaucaccaucggcaagugccccaaguacgugaagagcaccaagcugagacuggccaccggccugagaaacgugcccagcauccagagcagaggccuguucggcgccaucgccggcuucaucgagggcggcuggaccggcaugguggacggcugguacggcuaccaccaccagaacgagcagggcagcggcuacgccgccgaccugaagagcacccagaacgccaucgacggcaucaccaacaaggugaacagcgugaucgagaagaugaacacccaguucaccgccgugggcaaggaguucaaccaccuggagaagagaaucgagaaccugaacaagaagguggacgacggcuuccuggacaucuggaccuacaacgccgagcugcuggugcugcuggagaacgagagaacccuggacuaccacgacagcaacgugaagaaccuguacgagaaggugagaagccagcugaagaacaacgccaaggagaucggcaacggcugcuucgaguucuaccacaagugcgacaacaccugcauggagagcgugaagaacggcaccuacgacuaccccaaguacagcgaggaggccaagcugaacagagaggagaucgacggcgugaagcuggagagcaccagaaucuaccagauccuggccaucuacagcaccguggccagcagccuggugcugguggugagccugggcgccaucagcuucuggaugugcagcaacggcagccugcagugcagaaucugcaucuga

SEQ ID NO: 167628 - RNA, 1701 nt, Artificial Sequence
  derived and/or modified CDS sequence (opt4) from hemagglutinin__InfluenzaA__AEO01489
augaaggccauccugguggugcugcuguacaccuucgccaccgccaacgccgacacccugugcaucggcuaccacgccaacaacagcaccgacaccguggacaccgugcuggagaagaacgugaccgugacccacagcgugaaccugcuggaggacaagcacaacggcaagcugugcaagcugagaggcguggccccccugcaccugggcaagugcaacaucgccggcuggauccugggcaaccccgagugcgagagccugagcaccgccagcagcuggagcuacaucguggagaccagcagcagcgacaacggcaccugcuaccccggcgacuucaucgacuacgaggagcugagagagcagcugagcagcgugagcagcuucgagagauucgagaucuuccccaagaccagcagcuggcccaaccacgacagcaacaagggcgugaccgccgccugcccccacgccggcgccaagagcuucuacaagaaccugaucuggcuggugaagaagggcaacagcuaccccaagcugagcaagagcuacaucaacgacaagggcaaggaggugcuggugcuguggggcauccaccaccccagcaccagcgccgaccagcagagccuguaccagaacgccgacgccuacguguucgugggcaccagcagauacagcaagaaguucagacccgagaucgccaucagacccaaggugagagaccaggagggcagaaugaacuacuacuggacccugguggagcccggcgacaagaucaccuucgaggccaccggcaaccugguggugcccagauacgccuucgccauggagagaaacgccggcagcggcaucaucaucagcgacacccccgugcacgacugcaacaccaccugccagacccccaagggcgccaucaacaccagccugcccuuccagaacauccaccccaucaccaucggcaagugccccaaguacgugaagagcaccaagcugagacuggccaccggccugagaaacgugcccagcauccagagcagaggccuguucggcgccaucgccggcuucaucgagggcggcuggaccggcaugguggacggcugguacggcuaccaccaccagaacgagcagggcagcggcuacgccgccgaccugaagagcacccagaacgccaucgacgagaucaccaacaaggugaacagcgugaucgagaagaugaacacccaguucaccgccgugggcaaggaguucaaccaccuggagaagagaaucgagaaccugaacaagaagguggacgacggcuuccuggacaucuggaccuacaacgccgagcugcuggugcugcuggagaacgagagaacccuggacuaccacgacagcaacgugaagaaccuguacgagaaggugagaagccagcugaagaacaacgccaaggagaucggcaacggcugcuucgaguucuaccacaagugcgacaacaccugcauggagagcgugaagaacggcaccuacgacuaccccaaguacagcgaggaggccaagcugaacagagaggagaucgacggcgugaagcuggagagcaccagaaucuaccagauccuggccaucuacagcaccguggccagcagccuggugcugguggugagccugggcgccaucagcuucuggaugugcagcaacggcagccugcagugcagaaucugcaucuga

SEQ ID NO: 167629 - RNA, 1701 nt, Artificial Sequence
  derived and/or modified CDS sequence (opt4) from hemagglutinin__InfluenzaA__AEO01490
augaaggccauccugguggugcugcuguacaccuucgccaccgccaacgccgacacccugugcaucggcuaccacgccaacaacagcaccgacaccguggacaccgugcuggagaagaacgugaccgugacccacagcgugaaccugcuggaggacaagcacaacggcaagcugugcaagcugagaggcguggccccccugcaccugggcaagugcaacaucgccggcuggauccugggcaaccccgagugcgagagccugagcaccgccagcagcuggagcuacaucguggagaccagcagcagcgacaacggcaccugcuaccccggcgacuucaucgacuacgaggagcugagagagcagcugagcagcgugagcagcuucgagagauucgagaucuuccccaagaccagcagcuggcccaaccacgacagcaacaagggcgugaccgccgccugcccccacgccggcgccaagagcuucuacaagaaccugaucuggcuggugaagaagggcaacagcuaccccaagcugagcaagagcuacaucaacgacaagggcaaggaggugcuggugcuguggggcauccaccaccccagcaccagcgccgaccagcagagccuguaccagaacgccgacgccuacguguucgugggcaccagcagauacagcaagaaguucaagcccgagaucgccaucagacccaaggugagagaccaggagggcagaaugaacuacuacuggacccugguggagcccggcgacaagaucaccuucgaggccaccggcaaccugguggugcccagauacgccuucgccauggagagaaacgccggcagcggcaucaucaucagcgacacccccgugcacgacugcaacaccaccugccagacccccaagggcgccaucaacaccagccugcccuuccagaacauccaccccaucaccaucggcaagugccccaaguacgugaagagcaccaagcugagaauggccaccggccugagaaacgugcccagcauccagagcagaggccuguucggcgccaucgccggcuucaucgagggcggcuggaccggcaugguggacggcugguacggcuaccaccaccagaacgagcagggcagcggcuacgccgccgaccugaagagcacccagaacgccaucgacgagaucaccaacaaggugaacagcgugaucgagaagaugaacacccaguucaccgccgugggcaaggaguucaaccaccuggagaagagaaucgagaaccugaacaagaagguggacgacggcuuccuggacaucuggaccuacaacgccgagcugcuggugcugcuggagaacgagagaacccuggacuaccacgacagcaacgugaagaaccuguacgagaaggugagaaaccagcugaagaacaacgccaaggagaucggcaacggcugcuucgaguucuaccacaagugcgacaacaccugcauggagagcgugaagaacggcaccuacgacuaccccaaguacagcgaggaggccaagcugaacagagaggagaucgacggcgugaagcuggagagcaccagaaucuaccagauccuggccaucuacagcaccguggccagcagccuggugcugguggugagccugggcgccaucagcuucuggaugugcagcaacggcagccugcagugcagaaucugcaucuga

SEQ ID NO: 167630 - RNA, 1701 nt, Artificial Sequence
  derived and/or modified CDS sequence (opt4) from hemagglutinin__InfluenzaA__AEO01491
augaaggccauccugguggugcugcuguacaccuucgccaccgccaacgccgacacccugugcaucggcuaccacgccaacaacagcaccgacaccguggacaccgugcuggagaagaacgugaccgugacccacagcgugaaccugcuggaggacaaguacaacggcaagcugugcaagcugagaggcguggccccccugcaccugggcaagugcaacaucgccggcuggauccugggcaaccccgagugcgagagccugagcaccgccagcagcuggagcuacaucguggagaccagcagcagcgacaacggcaccugcuaccccggcgacuucaucgacuacgaggagcugagagagcagcugagcagcgugagcagcuucgagagauucgagaucuuccccaagaccagcagcuggcccaaccacgacagcaacaagggcgugaccgccgccugcccccacgccggcgccaagagcuucuacaagaaccugaucuggcuggugaagaagggcaacagcuaccccaagcugagcaagagcuacaucaacgacaagggcaaggaggugcuggugcuguggggcauccaccaccccagcaccagcgccgaccagcagagccuguaccagaacgccgacgccuacguguucgugggcaccagcagauacagcaagaaguucaagcccgagaucgccaucagacccaaggugagagaccaggagggcagaaugaacuaccacuggacccugguggagcccggcgacaagaucaccuucgaggccaccggcaaccugguggugcccagauacgccuucgccauggagagaaacgccggcagcggcaucaucaucagcgacacccccgugcacgacugcaacaccaccugccagacccccaagggcgccaucaacaccagccugcccuuccagaacauccaccccaucaccaucggcaagugccccaaguacgugaagagcaccaagcugagacuggccaccggccugagaaacgugcccagcauccagagcagaggccuguucggcgccaucgccggcuucaucgagggcggcuggaccggcaugguggacggcugguacggcuaccaccaccagaacgagcagggcagcggcuacgccgccgaccugaagagcacccagaacgccaucgacgagaucaccaacaaggugaacagcgugaucgagaagaugaacacccaguucaccgccgugggcaaggaguucaaccaccuggagaagagaaucgagaaccugaacaagaagguggacgacggcuuccuggacaucuggaccuacaacgccgagcugcuggugcugcuggagaacgagagaacccuggacuaccacgacagcaacgugaagaaccuguacgagaaggugagaagccagcugaagaacaacgccaaggagaucggcaacggcugcuucgaguucuaccacaagugcgacaacaccugcauggagagcgugaagaacggcaccuacgacuaccccaaguacagcgaggaggccaagcugaacagagaggagaucgacggcgugaagcuggagagcaccagaaucuaccagauccuggccaucuacagcaccguggccagcagccuggugcugguggugagccugggcgccaucagcuucuggaugugcagcaacggcagccugcagugcagaaucugcaucuga

SEQ ID NO: 167631 - RNA, 1701 nt, Artificial Sequence; identical to SEQ ID NO: 167498
  derived and/or modified CDS sequence (opt4) from hemagglutinin__InfluenzaA__AEO01492

SEQ ID NO: 167632 - RNA, 1701 nt, Artificial Sequence
  derived and/or modified CDS sequence (opt4) from hemagglutinin__InfluenzaA__AEO01493
augaaggccauccugguggugcugcuguacaccuucgccaccgccaacgccgacacccugugcaucggcuaccacgccaacaacagcaccgacaccguggacaccgugcuggagaagaacgugaccgugacccacagcgugaacauccuggaggacaagcacaacggcaagcugugcaagcugagaggcguggccccccugcaccugggcaagugcaacaucgccggcuggauccugggcaaccccgagugcgagagccugagcaccgccagcagcuggagcuacaucguggagaccagcagcagcgacaacggcaccugcuaccccggcgacuucaucgacuacgaggagcugagagagcagcugagcagcgugagcagcuucgagagauucgagaucuuccccaagaccagcagcuggcccaaccacgacagcaacaagggcgugaccgccgccugcccccacgccggcgccaagagcuucuacaagaaccugaucuggcuggugaagaagggcaacagcuaccccaagcugagcaagagcuacaucaacgacaagggcaaggaggugcuggugcuguggggcauccaccaccccagcaccagcgccgaccagcagagccuguaccagaacgccgacgccuacguguucgugggcaccagcagauacagcaagaaguucaagcccgagaucgccaucagacccaaggugagagaccaggagggcagaaugaacuacuacuggacccugguggagcccggcgacaagaucaccuucgaggccaccggcaaccugguggugcccagauacgccuucgccauggagagaagcgccggcagcggcaucaucaucagcgacacccccgugcacgacugcaacaccaccugccagacccccaagggcgccaucaacaccagccugcccuuccagaacauccaccccaucaccaucggcaagugccccaaguacgugaagagcaccaagcugagacuggccaccggccugagaaacgugcccagcauccagagcagaggccuguucggcgccaucgccggcuucaucgagggcggcuggaccggcaugguggacggcugguacggcuaccaccaccagaacgagcagggcagcggcuacgccgccgaccugaagagcacccagaacgccaucgacgagaucaccaacaaggugaacagcgugaucgagaagaugaacacccaguucaccgccgugggcaaggaguucaaccaccuggagaagagaaucgagaaccugaacaagaagguggacgacggcuuccuggacaucuggaccuacaacgccgagcugcuggugcugcuggagaacgagagaacccuggacuaccacgacagcaacgugaagaaccuguacgagaaggugagaagccagcugaagaacaacgccaaggagaucggcaacggcugcuucgaguucuaccacaagugcgacaacaccugcauggagagcgugaagaacggcaccuacgacuaccccaaguacagcgaggaggccaagcugaacagagaggagaucgacggcgugaagcuggagagcaccagaaucuaccagauccuggccaucuacagcaccguggccagcagccuggugcugguggugagccugggcgccaucagcuucuggaugugcagcaacggcagccugcagugcagaaucugcaucuga

SEQ ID NO: 167633 - RNA, 1701 nt, Artificial Sequence
  derived and/or modified CDS sequence (opt4) from hemagglutinin__InfluenzaA__AEO01494
augaaggccauccugguggugcugcuguacaccuucgccaccgccaacgccgacacccugugcaccggcuaccacgccaacaacagcaccgacaccguggacaccgugcuggagaagaacgugaccgugacccacagcgugaaccugcuggaggacaagcacaacggcaagcugugcaagcugagaggcguggccccccugcaccugggcaagugcaacaucgccggcuggauccugggcaaccccgagugcgagagccugagcaccgccagcagcuggagcuacaucguggagaccagcagcagcgacaacggcaccugcuaccccggcgacuucaucgacuacgaggagcugagagagcagcugagcagcgugagcagcuucgagagauucgagaucuuccccaagaccagcagcuggcccaaccacgacagcaacaagggcgugaccgccgccugcccccacgccggcgccaagagcuucuacaagaaccugaucuggcuggugaagaagggcaacagcuaccccaagcugagcaagagcuacaucaacgacaagggcaaggaggugcuggugcuguggggcauccaccaccccagcaccagcgccgaccagcagagccuguaccagaacgccgacgccuacguguucgugggcaccagcagauacagcaagaaguucaagcccgagaucgccaucagacccaaggugagagaccaggagggcagaaugaacuacuacuggacccugguggagcccggcgacaagaucaccuucgaggccaccggcaaccugguggugcccagauacgccuucgccauggagagaaacgccggcagcggcaucaucaucagcgacacccccgugcacgacugcaacaccaccugccagacccccaagggcgccaucaacaccagccugcccuuccagaacauccaccccaucaccaucggcaagugccccaaguacgugaagagcaccaagcugagacuggccaccggccugagaaacgugcccagcauccagagcagaggccuguucggcgccaucgccggcuucaucgagggcggcuggaccggcaugguggacggcugguacggcuaccaccaccagaacgagcagggcagcggcuacgccgccgaccugaagagcacccagaacgccaucgacgagaucaccaacaaggugaacagcgugaucgagaagaugaacacccaguucaccgccgugggcaaggaguucaaccaccuggagaagagaaucgagaaccugaacaagaagguggacgacggcuuccuggacaucuggaccuacaacgccgagcugcuggugcugcuggagaacgagagaacccuggacuaccacgacagcaacgugaagaaccuguacgagaaggugagaaaccagcugaagaacaacgccaaggagaucggcaacggcugcuucgaguucuaccacaagugcgacaacaccugcauggagagcgugaagaacggcaccuacgacuaccccaaguacagcgaggaggccaagcugaacagagaggagaucgacggcgugaagcuggagagcaccagaaucuaccagauccuggccaucuacagcaccguggccagcagccuggugcugguggugagccugggcgccaucagcuucuggaugugcagcaacggcagccugcagugcagaaucugcaucuga

SEQ ID NO: 167634 - RNA, 1701 nt, Artificial Sequence; identical to SEQ ID NO: 164326
  derived and/or modified CDS sequence (opt4) from hemagglutinin__InfluenzaA__AEO01496

SEQ ID NO: 167635 - RNA, 1701 nt, Artificial Sequence; identical to SEQ ID NO: 163082
  derived and/or modified CDS sequence (opt4) from hemagglutinin__InfluenzaA__AEO01497

SEQ ID NO: 167636 - RNA, 1701 nt, Artificial Sequence; identical to SEQ ID NO: 164326
  derived and/or modified CDS sequence (opt4) from hemagglutinin__InfluenzaA__AEO01498

SEQ ID NO: 167637 - RNA, 1701 nt, Artificial Sequence
  derived and/or modified CDS sequence (opt4) from hemagglutinin__InfluenzaA__AEO01499
augaaggccauccugguggugcugcuguacaccuucgccaucgccaacgccgacacccugugcaucggcuaccacgccaacaacagcaccgacaccguggacaccgugcuggagaagaacgugaccgugacccacagcgugaaccugcuggaggacaagcacaacggcaagcugugcaagcugagaggcguggccccccugcaccugggcaagugcaacaucgccggcuggauccugggcaaccccgagugcgagagccugagcaccgccagcagcuggagcuacaucguggagaccagcagcagcgacaacggcaccugcuaccccggcgacuucaucgacuacgaggagcugagagagcagcugagcagcgugagcagcuucgagagauucgagaucuuccccaagaccagcagcuggcccaaccacgacagcaacaagggcgugaccgccgccugcccccacgccggcgccaagagcuucuacaagaaccugaucuggcuggugaagaagggcaacagcuaccccaagcugagcaagagcuacaucaacgacaagggcaaggaggugcuggugcuguggggcauccaccaccccuacaccagcgccgaccagcagagccuguaccagaacgccgacgccuacguguucgugggcaccagcagauacagcaagaaguucaagcccgagaucgccaucagacccaaggugagagaccaggagggcagaaugaacuacuacuggacccugguggagcccggcgacaagaucaccuucgaggccaccggcaaccugguggugcccagauacgccuucgccauggagagaaacgccggcagcggcaucaucaucagcgacacccccgugcacgacugcaacaccaccugccagacccccaagggcgccaucaacaccagccugcccuuccagaacauccaccccaucaccaucggcaagugccccaaguacgugaagagcaccaagcugagacuggccaccggccugagaaacgugcccagcauccagagcagaggccuguucggcgccaucgccggcuucaucgagggcggcuggaccggcaugguggacggcugguacggcuaccaccaccagaacgagcagggcagcggcuacgccgccgaccugaagagcacccagcacgccaucgacgagaucaccaacaaggugaacagcgugaucgagaagaugaacacccaguucaccgccgugggcaaggaguucaaccaccuggagaagagaaucgagaaccugaacaagaagguggacgacggcuuccuggacaucuggaccuacaacgccgagcugcuggugcugcuggagaacgagagaacccuggacuaccacgacagcaacgugaagaaccuguacgagaaggugagaagccagcugaagaacaacgccaaggagaucggcaacggcugcuucgaguucuaccacaagugcgacaacaccugcauggagagcgugaagaacggcaccuacgacuaccccaaguacagcgaggaggccaagcugaacagagaggagaucaacggcgugaagcuggagagcaccagaaucuaccagauccuggccaucuacagcaccguggccagcagccuggugcugguggugagccugggcgccaucagcuucuggaugugcagcaacggcagccugcagugcagaaucugcaucuga

SEQ ID NO: 167638 - RNA, 1701 nt, Artificial Sequence; identical to SEQ ID NO: 163830
  derived and/or modified CDS sequence (opt4) from hemagglutinin__InfluenzaA__AEO01500

SEQ ID NO: 167639 - RNA, 1701 nt, Artificial Sequence; identical to SEQ ID NO: 163893
  derived and/or modified CDS sequence (opt4) from hemagglutinin__InfluenzaA__AEO01501

SEQ ID NO: 167640 - RNA, 1701 nt, Artificial Sequence; identical to SEQ ID NO: 163893
  derived and/or modified CDS sequence (opt4) from hemagglutinin__InfluenzaA__AEO01502

SEQ ID NO: 167641 - RNA, 1701 nt, Artificial Sequence; identical to SEQ ID NO: 164149
  derived and/or modified CDS sequence (opt4) from hemagglutinin__InfluenzaA__AEO01503

SEQ ID NO: 167642 - RNA, 1701 nt, Artificial Sequence; identical to SEQ ID NO: 164326
  derived and/or modified CDS sequence (opt4) from hemagglutinin__InfluenzaA__AEO01505

SEQ ID NO: 167643 - RNA, 1701 nt, Artificial Sequence; identical to SEQ ID NO: 163830
  derived and/or modified CDS sequence (opt4) from hemagglutinin__InfluenzaA__AEO01506

SEQ ID NO: 167644 - RNA, 1701 nt, Artificial Sequence; identical to SEQ ID NO: 167438
  derived and/or modified CDS sequence (opt4) from hemagglutinin__InfluenzaA__AEO01507

SEQ ID NO: 167645 - RNA, 1701 nt, Artificial Sequence; identical to SEQ ID NO: 164326
  derived and/or modified CDS sequence (opt4) from hemagglutinin__InfluenzaA__AEO01508

SEQ ID NO: 167646 - RNA, 1701 nt, Artificial Sequence; identical to SEQ ID NO: 164057
  derived and/or modified CDS sequence (opt4) from hemagglutinin__InfluenzaA__AEO01510

SEQ ID NO: 167647 - RNA, 1701 nt, Artificial Sequence
  derived and/or modified CDS sequence (opt4) from hemagglutinin__InfluenzaA__AEO01511
augaaggccauccugguggugcugcuguacaccuucgccaccgccaacgccgacacccugugcaucggcuaccacgccaacaacagcaccgacaccguggacaccgugcuggagaagaacgugaccgugacccacagcgugaaccugcuggaggacaagcacaacggcaagcugugcaagcugagaggcgugaccccccugcaccugggcaagugcaacaucgccggcuggauccugggcaaccccgagugcgagagccugagcaccaccagcagcuggagcuacaucguggagaccagcagcagcgacaacggcaccugcuaccccggcgacuucaucgacuacgaggagcugagagagcagcugagcagcgugagcagcuucgagagauucgagaucuuccccaagaccagcagcuggcccaaccacgacagcaacaagggcgugaccgccgccugcccccacgccggcgccaagagcuucuacaagaaccugaucuggcuggugaagaagggcaacagcuaccccaagcugagcaagagcuacaucaacgacaagggcaaggaggugcuggugcuguggggcauccaccaccccagcaccagcgccgaccagcagagccuguaccagaacgccgacgccuacguguucgugggcaccagcagauacagcaagaaguucaagcccgagaucgccaucagacccaaggugagagagcaggagggcagaaugaacuacuacuggacccugguggagcccggcgacaagaucaccuucgaggccaccggcaaccugguggugcccagauacgccuucgccauggagagaaacgccggcagcggcaucaucaucagcgacacccccgugcacgacugcaacaccaccugccagacccccaagggcgccaucaacaccagccugcccuuccagaacauccaccccaucaccaucggcaagugccccaaguacgugaagagcaccaagcugagacuggccaccggccugagaaacgugcccagcauccagagcagaggccuguucggcgccaucgccggcuucaucgagggcggcuggaccggcaugguggacggcugguacggcuaccaccaccagaacgagcagggcagcggcuacgccgccgaccugaagagcacccagaacgccaucgacaagaucaccaacaaggugaacagcgugaucgagaagaugaacacccaguucaccgccgugggcaaggaguucaaccaccuggagaagagaaucgagaaccugaacaagaagguggacgacggcuuccuggacaucuggaccuacaacgccgagcugcuggugcugcuggagaacgagagaacccuggacuaccacgacagcaacgugaagaaccuguacgagaaggugagaagccagcugaagaacaacgccaaggagaucggcaacggcugcuucgaguucuaccacaagugcgacaacaccugcauggagagcgugaagaacggcaccuacgacuaccccaaguacagcgaggaggccaagcugaacagagaggagaucgacggcgugaagcuggagagcaccagaaucuaccagauccuggccaucuacagcaccguggccagcagccuggugcugguggugagccugggcgccaucagcuucuggaugugcagcaacggcagccugcagugcagaaucugcaucuga

SEQ ID NO: 167648 - RNA, 1701 nt, Artificial Sequence
  derived and/or modified CDS sequence (opt4) from hemagglutinin__InfluenzaA__AEO01512
augaaggccauccugguggugcugcuguacaccuucgccaccgccaacgccgacacccugugcaucggcuaccacgccaacaacagcaccgacaccguggacaccgugcuggagaagaacgugaccgugacccacagcgugaaccugcuggaggacaagcacaacggcaagcugugcaagcugagaggcguggccccccugcaccugggcaagugcaacaucgccggcuggauccugggcaaccccgagugcgagagccugagcaccgccagcagcuggagcuacaucguggagaccagcagcagcgacaacggcaccugcuaccccggcgacuucaucgacuacgaggagcugagagagcagcugagcagcgugagcagcuucgagagauucgagaucuuccccaagaccagcagcuggcccaaccacgacagcaacaagggcgugaccgccgccugcccccacgccggcgccaagagcuucuacaagaaccugaucuggcuggugaagaagggcaacagcuaccccaagcugagcaagagcuacaucaacgacaagggcaaggaggugcuggugcuguggggcauccaccaccccagcaccagcgccgaccagcagagccuguaccagaacgccgacgccuacguguucgugggcaccagcagauacagcaagaaguucaagcccgagaucgccaucagacccaaggugagagagcaggagggcagaaugaacuacuacuggacccugguggagcccggcgacaagaucaccuucgaggccaccggcaaccugguggugcccagauacgccuucgccauggagagaaacgccggcagcggcaucaucaucagcgacacccccgugcacgacugcaacaccaccugccagacccccaagggcgccaucaacaccagccugcccuuccagaacauccaccccaucaccaucggcaagugccccaaguacgugaagagcaccaagcugagacuggccaccggccugagaaacgugcccagcauccagagcagaggccuguucggcgccaucgccggcuucaucgagggcggcuggaccggcaugguggacggcugguacggcuaccaccaccagaacgagcagggcagcggcuacgccgccgaccugaagagcacccagaacgccaucgacgagaucaccaacaaggugaacagcgugaucgagaagaugaacacccaguucaccgccgugggcaaggaguucaaccaccuggagaagagaaucgagaaccugaacaagaagguggacgacggcuuccuggacaucuggaccuacaacgccgagcugcuggugcugcuggagaacgagagaacccuggacuaccacgacagcaacgugaagaaccuguacgagaaggugagaagccagcugaagaacaacgccaaggagaucggcaacggcugcuucgaguucuaccacaagugcgacaacaagugcauggagagcgugaagaacggcaccuacgacuaccccaaguacagcgaggaggccaagcugaacagagaggagaucgacggcgugaagcuggagagcaccagaaucuaccagauccuggccaucuacagcaccguggccagcagccuggugcugguggugagccugggcgccaucagcuucuggaugugcagcaacggcagccugcagugcagaaucugcaucuga

SEQ ID NO: 167649 - RNA, 1701 nt, Artificial Sequence
  derived and/or modified CDS sequence (opt4) from hemagglutinin__InfluenzaA__AEO01513
augaaggccauccuggccgugcugcuguacaccuucgccaccgccaacgccgacacccugugcaucggcuaccacgccaacaacagcaccgacaccguggacaccgugcuggagaagaacgugaccgugacccacagcgugaacauccuggaggacaagcacaacggcaagcugugcaagcugagaggcguggccccccugcaccugggcaagugcaacaucgccggcuggauccugggcaaccccgagugcgagagccugagcaccgccagcagcuggagcuacaucguggagaccagcagcagcgacaacggcaccugcuaccccggcgacuucaucgacuacgaggagcugagagagcagcugagcagcgugagcagcuucgagagauucgagaucuuccccaagaccagcagcuggcccaaccacgacagcaacaagggcgugaccgccgccugcccccacgccggcgccaagagcuucuacaagaaccugaucuggcuggugaagaagggcaacagcuaccccaagcugagcaagagcuacaucaacgacaagggcaaggaggugcuggugcuguggggcauccaccaccccagcaccagcgccgaccagcagagccuguaccagaacgccgacgccuacguguucgugggcagcagcagauacagcaagaaguucaagcccgagaucgccaucagacccaaggugagagaccaggagggcagaaugaacuacuacuggacccugguggagcccggcgacaagaucaccuucgaggccaccggcaaccugguggugcccagauacgccuucgccauggagagaaacgccggcagcggcaucaucaucagcgacacccccgugcacgacugcaacaccaccugccagacccccaagggcgccaucaacaccagccugcccuuccagaacauccaccccgugaccaucggcaagugccccaaguacgugaagagcaccaagcugagacuggccaccggccugagaaacgugcccagcauccagagcagaggccuguucggcgccaucgccggcuucaucgagggcggcuggaccggcaugguggacggcugguacggcuaccaccaccagaacgagcagggcagcggcuacgccgccgaccugaagagcacccagaacgccaucgacgagaucaccaacaaggugaacagcgugaucgagaagaugaacacccaguucaccgccgugggcaaggaguucaaccaccuggagaagagaaucgagaaccugaacaagaagguggacgacggcuuccuggacaucuggaccuacaacgccgagcugcuggugcugcuggagaacgagagaacccuggacuaccacgacagcaacgugaagaaccuguacgagaaggugagaagccagcugaagaacaacgccaaggagaucggcaacggcugcuucgaguucuaccacaagugcgacaacaccugcauggagagcgugaagaacggcaccuacgacuaccccaaguacagcgaggaggccaagcugaacagagaggagaucgacggcgugaagcuggagagcaccagaaucuaccagauccuggccaucuacagcaccguggccagcagccuggugcugguggugagccugggcgccaucagcuucuggaugugcagcaacggcagccugcagugcagaaucugcaucuga

SEQ ID NO: 167650 - RNA, 1701 nt, Artificial Sequence
  derived and/or modified CDS sequence (opt4) from hemagglutinin__InfluenzaA__AEO01514
augaaggccauccugguggugcugcuguacaccuucgccaccgccaacgccgacacccugugcaucggcuaccacgccaacaacagcaccgacaccguggacaccgugcuggagaagaacgugaccgugacccacagcgugaaccugcuggaggacaugcacaacggcaagcugugcaagcugagaggcguggccccccugcaccugggcaagugcaacaucgccggcuggauccugggcaaccccgagugcgagagccugagcaccgccagcagcuggagcuacaucguggagaccagcagcagcgacaacggcaccugcuaccccggcgacuucaucgacuacgaggagcugagagagcagcugagcagcgugagcagcuucgagagauucgagaucuuccccaagaccagcagcuggcccaaccacgacagcaacaagggcgugaccgccgccugcccccacgccggcgccaagagcuucuacaagaaccugaucuggcuggugaagaagggcaacagcuaccccaagcugagcaagagcuacaucaacgacaagggcaaggaggugcuggugcuguggggcauccaccaccccagcaccagcgccgaccagcagagccuguaccagaacgccgacgccuacguguucgugggcaccagcagauacagcaagaaguucaagcccgagaucgccaucagacccaaggugagagagcaggagggcagaaugaacuacuacuggacccugguggagcccggcgacaagaucaccuucgaggccaccggcaaccugguggugcccagauacgccuucgccauggagagaaacgccggcagcggcaucaucaucagcgacacccccgugcacgacugcaacaccaccugccagacccccaagggcgccaucaacaccagccugcccuuccagaacauccaccccaucaccaucggcaagugccccaaguacgugaagagcaccaagcugagacuggccaccggccugagaaacgugcccagcauccagagcagaggccuguucggcgccaucgccggcuucaucgagggcggcuggaccggcaugguggacggcugguacggcuaccaccaccagaacgagcagggcagcggcuacgccgccgaccugaagagcacccagaacgccaucgacaagaucaccaacaaggugaacagcgugaucgagaagaugaacacccaguucaccgccgugggcaaggaguucaaccaccuggagaagagaaucgagaaccugaacaagaagguggacgacggcuuccuggacaucuggaccuacaacgccgagcugcuggugcugcuggagaacgagagaacccuggacuaccacgacagcaacgugaagaaccuguacgagaaggugagaagccagcugaagaacaacgccaaggagaucggcaacggcugcuucgaguucuaccacaagugcgacaacaccugcauggagagcgugaagaacggcaccuacgacuaccccaaguacagcgaggaggccaagcugaacagagaggagaucgacggcgugaagcuggagagcaccagaaucuaccagauccuggccaucuacagcaccguggccagcagccuggugcugguggugagccugggcgccaucagcuucuggaugugcagcaacggcagccugcagugcagaaucugcaucuga

SEQ ID NO: 167651 - RNA, 1701 nt, Artificial Sequence; identical to SEQ ID NO: 164916
  derived and/or modified CDS sequence (opt4) from hemagglutinin__InfluenzaA__AEO01515

SEQ ID NO: 167652 - RNA, 1701 nt, Artificial Sequence; identical to SEQ ID NO: 167498
  derived and/or modified CDS sequence (opt4) from hemagglutinin__InfluenzaA__AEO01516

SEQ ID NO: 167653 - RNA, 1701 nt, Artificial Sequence
  derived and/or modified CDS sequence (opt4) from hemagglutinin__InfluenzaA__AEO01517
augaaggccauccugguggugcugcuguacaccuucgccaccgccaacgccgacacccugugcaucggcuaccacgccaacaacagcaccgacaccguggacaccgugcuggagaagaacgugaccgugacccacagcgugaaccugcuggaggacaagcacaacggcaagcugugcaagcugagaggcguggccccccugcaccugggcaagugcaacaucgccggcuggauccugggcaaccccgagugcgagagccugagcaccgccagcagcuggagcuacaucguggagaccagcagcagcgacaacggcaccugcuaccccggcgacuucaucgacuacgaggagcugagagagcagcugagcagcgugagcagcuucgagagauucgagaucuuccccaagaccagcagcuggcccaaccacgacagcaacaagggcgugaccgccgccugcccccacgccggcgccaagagcuucuacaagaaccugaucuggcuggugaagaaggagaacagcuaccccaagcugagcaagagcuacaucaacgacaagggcaaggaggugcuggugcuguggggcauccaccaccccagcaccagcgccgaccagcagagccuguaccagaacgccgacgccuacguguucgugggcaccagcagauacagcaagaaguucaagcccgagaucgccaucagacccaaggugagagaccaggagggcagaaugaacuacuacuggacccugguggagcccggcgacaagaucaccuucgaggccaccggcaaccugguggugcccagauacgccuucgccauggagagaaacgccggcagcggcaucaucaucagcgacacccccgugcacgacugcaacaccaccugccagacccccgagggcgccaucaacaccagccugcccuuccagaacauccaccccaucaccaucggcaagugccccaaguacgugaagagcaccaagcugagacuggccaccggccugagaaacgugcccagcauccagagcagaggccuguucggcgccaucgccggcuucaucgagggcggcuggaccggcaugguggacggcugguacggcuaccaccaccagaacgagcagggcagcggcuacgccgccgaccugaagagcacccagaacgccaucgacgagaucaccaacaaggugaacagcgugaucgagaagaugaacacccaguucaccgccgugggcaaggaguucaaccaccuggagaagagaaucgagaaccugaacaagaagguggacgacggcuuccuggacaucuggaccuacaacgccgagcugcuggugcugcuggagaacgagagaacccuggacuaccacgacagcaacgugaagaaccuguacgagaaggugagaagccagcugaagaacaacgccaaggagaucggcaacggcugcuucgaguucuaccacaagugcgacaacaccugcauggagagcgugaagaacggcaccuacgacuaccccaaguacagcgaggaggccaagcugaacagagaggagaucgacggcgugaagcuggagagcaccagaaucuaccagauccuggccaucuacagcaccguggccagcagccuggugcugguggugagccugggcgccaucagcuucuggaugugcagcaacggcagccugcagugcagaaucugcaucuga

SEQ ID NO: 167654 - RNA, 1701 nt, Artificial Sequence
  derived and/or modified CDS sequence (opt4) from hemagglutinin__InfluenzaA__AEO01518
augaaggccauccugguggugcugcuguacaccuucgccaccgccaacgccgacacccugugcaucggcuaccacgccaacaacagcaccgacaccguggacaccgugcuggagaagaacgugaccgugacccacagcgugaaccugcuggaggacaagcacaacggcaagcugugcaagcugagaggcguggccccccugcaccugggcaagugcaacaucgccggcuggauccugggcaaccccgagugcgagagccugagcaccgccagcagcuggagcuacaucguggagaccagcagcagcgacaacggcaccugcuaccccggcgacuucaucgacuacgaggagcugagagagcagcugagcagcgugagcagcuucgagagauucgagaucuuccccaagaccagcagcuggcccaaccacgacagcaacaagggcgugaccgccgccugcccccacgccggcgccaagagcuucuacaagaaccugaucuggaucgugaagaagggcaacagcuaccccaagcugaacaagagcuacaucaacgacaagggcaaggaggugcuggugcuguggggcauccaccaccccagcaccagcgccgaccagcagagccuguaccagaacgccgacgccuacguguucgugggcaccagcagauacagcaagaaguucaagcccgagaucgccaucagacccaaggugagagaccaggagggcagaaugaacuacuacuggacccugguggagcccggcgacaagaucaccuucgaggccaccggcaaccugguggugcccagauacgccuucgccauggagagaaacgccggcagcggcaucaucaucagcgacacccccgugcacgacugcaacaccaccugccagacccccaagggcgccaucaacaccagccugcccuuccagaacauccaccccaucaccaucggcgagugccccaaguacgugaagagcaccaagcugagacuggccaccggccugagaaacgugcccagcauccagagcagaggccuguucggcgccaucgccggcuucaucgagggcggcuggaccggcaugguggacggcugguacggcuaccaccaccagaacgagcagggcagcggcuacgccgccgaccugaagagcacccagaacgccaucgacaagaucaccaacaaggugaacagcgugaucgagaagaugaacacccaguucaccgccgugggcaaggaguucaaccaccuggagaagagaaucgagaaccugaacaagaagguggacgacggcuuccuggacaucuggaccuacaacgccgagcugcuggugcugcuggagaacgagagaacccuggacuaccacgacagcaacgugaagaaccuguacgagaaggugagaagccagcugaagaacaacgccaaggagaucggcaacggcugcuucgaguucuaccacaagugcgacaacaccugcauggagagcgugaagaacggcaccuacgacuaccccaaguacagcgaggaggccaagcugaacagagaggagaucgacggcgugaagcuggagagcaccagaaucuaccagauccuggccaucuacagcaccguggccagcagccuggugcugguggugagccugggcgccaucagcuucuggaugugcagcaacggcagccugcagugcagaaucugcaucuga

SEQ ID NO: 167655 - RNA, 1701 nt, Artificial Sequence
  derived and/or modified CDS sequence (opt4) from hemagglutinin__InfluenzaA__AEO01519
augaaggccauccugguggugcugcuguacaccuucgccaccgccaacgccgacacccugugcaucggcuaccacgccaacaacagcaccgacaccguggacaccgugcuggagaagaacgugaccgugacccacagcgugaaccugcuggaggacaagcacaacggcaagcugugcaagcugagaggcguggccccccugcaccugggcaagugcaacaucgccggcuggauccugggcaaccccgagugcgagagccugagcaccgccagcagcuggagcuacaucguggagaccagcagcagcgacaacggcaccugcuaccccggcgacuucaucgacuacgaggagcugagagagcagcugagcagcgugagcagcuucgagagauucgagaucuuccccaagaccagcagcuggcccaaccacgacagcaacaagggcgugaccgccgccugcccccacgccggcgccaagagcuucuacaagaaccugaucuggcuggugaagaagggcaacagcuaccccaagcugagcaagagcuacaucaacgacaagggcaaggaggugcuggugcuguggggcauccaccaccccagcaccagcgccgaccagcagagccuguaccagaacgccgacgccuacguguucgugggcaccagcagauacagcaagaaguucagacccgagaucgccaucagacccaaggugagagagcaggagggcagaaugaacuacuacuggacccugguggagcccggcgacaagaucaccuucgaggccaccggcaaccugguggugcccagauacgccuucgccauggagagaaacgccggcagcggcaucaucaucagcgacacccccgugcacgacugcaacaccaccugccagacccccaagggcgccaucaacaccagccugcccuuccagaacauccaccccaucaccaucggcaagugccccaaguacgugaagagcaccaagcugagacuggccaccggccugagaaacauccccagcauccagagcagaggccuguucggcgccaucgccggcuucaucgagggcggcuggaccggcaugguggacggcugguacggcuaccaccaccagaacgagcagggcagcggcuacgccgccgaccugaagagcacccagaacgccaucgacgagaucaccaacaaggugaacagcgugaucgagaagaugaacacccaguucaccgccgugggcaaggaguucaaccaccuggagaagagaaucgagaaccugaacaagaagguggacgacggcuuccuggacaucuggaccuacaacgccgagcugcuggugcugcuggagaacgagagaacccuggacuaccacgacagcaacgugaagaaccuguacgagaaggugagaagccagcugaagaacaacgccaaggagaucggcaacggcugcuucgaguucuaccacaagugcgacaacaccugcauggagagcgugaagaacggcaccuacgacuaccccaaguacagcgaggaggccaagcugaacagagaggagaucgacggcgugaagcuggagagcaccagaaucuaccagauccuggccaucuacagcaccguggccagcagccuggugcugguggugagccugggcgccaucagcuucuggaugugcagcaacggcagccugcagugcagaaucugcaucuga

SEQ ID NO: 167656 - RNA, 1701 nt, Artificial Sequence; identical to SEQ ID NO: 165634
  derived and/or modified CDS sequence (opt4) from hemagglutinin__InfluenzaA__AEO01520

SEQ ID NO: 167657 - RNA, 1701 nt, Artificial Sequence; identical to SEQ ID NO: 164356
  derived and/or modified CDS sequence (opt4) from hemagglutinin__InfluenzaA__AEO01521

SEQ ID NO: 167658 - RNA, 1701 nt, Artificial Sequence; identical to SEQ ID NO: 166148
  derived and/or modified CDS sequence (opt4) from hemagglutinin__InfluenzaA__AEO01522

SEQ ID NO: 167659 - RNA, 1701 nt, Artificial Sequence; identical to SEQ ID NO: 163893
  derived and/or modified CDS sequence (opt4) from hemagglutinin__InfluenzaA__AEO01523

SEQ ID NO: 167660 - RNA, 1701 nt, Artificial Sequence; identical to SEQ ID NO: 167487
  derived and/or modified CDS sequence (opt4) from hemagglutinin__InfluenzaA__AEO01524

SEQ ID NO: 167661 - RNA, 1701 nt, Artificial Sequence
  derived and/or modified CDS sequence (opt4) from hemagglutinin__InfluenzaA__AEO01525
augaaggccauccugguggugcugcuguacaccuucgccaccgccaacgccgacacccugugcaucggcuaccacgccaacaacagcaccgacaccguggacaccgugcuggagaagaacgugaccgugacccacagcgugaaccugcuggaggacaagcacaacggcaagcugugcaagcugagaggcguggccccccugcaccugggcaagugcaacaucgccggcuggauccugggcaaccccgagugcgagagccugagcaccgccagcagcuggagcuacaucguggagaccagcagcagcggcaacggcaccugcuaccccggcgacuucaucgacuacgaggagcugagagagcagcugagcagcgugagcagcuucgagagauucgagaucuuccccaagaccagcagcuggcccaaccacgacagcaacaagggcgugaccgccgccugcccccacgccggcgccaagagcuucuacaagaaccugaucuggcuggugaagaagggcaacagcuaccccagacugagcaagagcuacaucaacgacaagggcaaggaggugcuggugcuguggggcauccaccaccccagcaccagcgccgaccagcagagccuguaccagaacgccgacgccuacguguucgugggcaccagcagauacagcaagaaguucaagcccgagaucgccaucagacccaaggugagagaccaggagggcagaaugaacuacuacuggacccugguggagcccggcgacaagaucaccuucgaggccaccggcaaccugguggugcccagauacgccuucgccauggagagaaacgccggcagcggcaucaucaucagcgacacccccgugcacgacugcaacaccaccugccagacccccaagggcgccaucaacaccagccugcccuuccagaacauccaccccaucaccaucggcaagugccccaaguacgugaagagcaccaagcugagacuggccaccggccugagaaacgugcccagcauccagagcagaggccuguucggcgccaucgccggcuucaucgagggcggcuggaccggcaugguggacggcugguacggcuaccaccaccagaacgagcagggcagcggcuacgccgccgaccugaagagcacccagaacgccaucgacgagaucaccaacaaggugaacagcgugaucgagaagaugaacacccaguucaccgccgugggcaaggaguucaaccaccuggagaagagaaucgagaaccugaacaagaagguggacgacggcuuccuggacaucuggaccuacaacgccgagcugcuggugcugcuggagaacgagagaacccuggacuaccacgacagcaacgugaagaaccuguacgagaaggugagaagccagcugaagaacaacgccaaggagaucggcaacggcugcuucgaguucuaccacaagugcgacaacaccugcauggagagcgugaagaacggcaccuacgacuaccccaaguacagcgaggaggccaagcugaacagagaggagaucgacggcgugaagcuggagagcaccagaaucuaccagauccuggccaucuacagcaccguggccagcagccuggugcugguggugagccugggcgccaucagcuucuggaugugcagcaacggcagccugcagugcagaaucugcaucuga

SEQ ID NO: 167662 - RNA, 1701 nt, Artificial Sequence; identical to SEQ ID NO: 163893
  derived and/or modified CDS sequence (opt4) from hemagglutinin__InfluenzaA__AEO01526

SEQ ID NO: 167663 - RNA, 1701 nt, Artificial Sequence; identical to SEQ ID NO: 166670
  derived and/or modified CDS sequence (opt4) from hemagglutinin__InfluenzaA__AEO01527

SEQ ID NO: 167664 - RNA, 1701 nt, Artificial Sequence
  derived and/or modified CDS sequence (opt4) from hemagglutinin__InfluenzaA__AEO01529
augaaggccauccugguggugcugcuguacaccuucgccaccgccaacgccgacacccugugcaucggcuaccacgccaacaacagcaccgacaccguggacaccgugcuggagaagaacgugaccgugacccacagcgugaacauccuggaggacaagcacaacggcaagcugugcaagcugagaggcguggccccccugcaccugggcaagugcaacaucgccggcuggauccugggcaaccccgagugcgagagccugagcaccgccagcagcuggagcuacaucguggagaccagcagcagcgacaacggcaccugcuaccccggcgacuucaucgacuacgaggagcugagagagcagcugagcagcgugagcagcuucgagagauucgagaucuuccccaagaccagcagcuggcccaaccacgacagcaacaagggcgugaccgccgccugcccccacgccggcgccaagagcuucuacaagaaccugaucuggcuggugaagaagggcaacagcuaccccaagcugagcaagagcuacaucaacgacaagggcaaggaggugcuggugcuguggggcauccaccaccccagcaccagcgccgaccagcagagccuguaccagaacgccgacgccuacguguucgugggcagcagcagauacagcaagaaguucaagcccgagaucgccaucagacccaaggugagagaccaggagggcagaaugaacuacuacuggacccugguggagcccggcgacaagaucaccuucgaggccaccggcaaccugguggugcccagauacgccuucgccauggagagaaacgccggcagcggcaucaucaucagcgacacccccgugcacgacugcaacaccaccugccagacccccaagggcgccaucaacaccagccugcccuuccagaacauccaccccaucaccaucggcaagugccccaaguacgugaagagcaccaagcugagacuggccaccggccugagaaacgugcccagcauccagagcagaggccuguucggcgccaucgccggcuucaucgagggcggcuggaccggcaugguggacggcugguacggcuaccaccaccagaacgagcagggcagcggcuacgccgccgaccugaagagcacccagaacgccaucgacgagaucaccaacaaggugaacagcgugaucgagaagaugaacacccaguucaccgccgugggcaaggaguucaaccaccuggagaagagaaucgagaaccugaacaagaagguggacgacggcuuccuggacaucuggaccuacaacgccgagcugcuggugcugcuggagaacgagagaacccuggacuaccacgacagcaacgugaagaaccuguacgagaaggugagaagccagcugaagaacaacgccaaggaggugggcaacggcugcuucgaguucuaccacaagugcgacaacaccugcauggagagcgugaagaacggcaccuacgacuaccccaaguacagcgaggaggccaagcugaacagagagaagaucgacggcgugaagcuggagagcaccagaaucuaccagauccuggccaucuacagcaccgccgccagcagccuggugcugguggugagccugggcgccaucagcuucuggaugugcagcaacggcagccugcagugcagaaucugcaucuga

SEQ ID NO: 167665 - RNA, 1701 nt, Artificial Sequence; identical to SEQ ID NO: 163893
  derived and/or modified CDS sequence (opt4) from hemagglutinin__InfluenzaA__AEO01530

SEQ ID NO: 167666 - RNA, 1701 nt, Artificial Sequence
  derived and/or modified CDS sequence (opt4) from hemagglutinin__InfluenzaA__AEO01531
augaaggccauccugguggugcugcuguacaccuucgccaccgccaacaccgacacccugugcaucggcuaccacgccaacaacagcaccgacaccguggacaccgugcuggagaagaacgugaccgugacccacagcgugaaccugcuggaggacaagcacaacggcaagcugugcaagcugagaggcguggccccccugcaccugggcaagugcaacaucgccggcuggauccugggcaaccccgagugcgagagccugagcaccgccagcagcuggagcuacaucguggagaccagcagcagcgacaacggcaccugcuaccccggcgacuucaucgacuacgaggagcugagagagcagcugagcagcgugagcagcuucgagagauucgagaucuuccccaagaccagcagcuggcccaaccacgacagcaacaagggcgugaccgccgccugcccccacgccggcgccaagagcuucuacaagaaccugaucuggcuggugaagaagggcaacagcuaccccaagcugagcaagagcuacaucaacgacaagggcaaggaggugcuggugcuguggggcauccaccaccccagcaccagcgccgaccagcagagccuguaccagaacgccgacgccuacguguucgugggcaccagcagauacagcaagaaguucaagcccgagaucgccaucagacccaaggugagagagcaggagggcagaaugaacuacuacuggacccugguggagcccggcgacaagaucaccuucgaggccaccggcaaccugguggugcccagauacgccuucgccauggagagaaacgccggcagcggcaucaucaucagcgacacccccgugcacgacugcaacaccaccugccagacccccaagggcgccaucaacaccagccugcccuuccagaacauccaccccaucaccaucggcaagugccccaaguacgugaagagcaccaagcugagacuggccaccggccugagaaacgugcccagcauccagagcagaggccuguucggcgccaucgccggcuucaucgagggcggcuggaccggcaugguggacggcugguacggcuaccaccaccagaacgagcagggcagcggcuacgccgccgaccugaagagcacccagaacgccaucgacaagaucaccaacaaggugaacagcgugaucgagaagaugaacacccaguucaccgccgugggcaaggaguucaaccaccuggagaagagaaucgagaaccugaacaagaagguggacgacggcuuccuggacaucuggaccuacaacgccgagcugcuggugcugcuggagaacgagagaacccuggacuaccacgacagcaacgugaagaaccuguacgagaaggugagaagccagcugaagaacaacgccaaggagaucggcaacggcugcuucgaguucuaccacaagugcgacaacaccugcauggagagcgugaagaacggcaccuacgacuaccccaaguacagcgaggaggccaagcugaacagagaggagaucgacggcgugaagcuggagagcaccagaguguaccagauccuggccaucuacagcaccguggccagcagccuggugcugguggugagccugggcgccaucagcuucuggaugugcagcaacggcagccugcagugcagaaucugcaucuga

SEQ ID NO: 167667 - RNA, 1701 nt, Artificial Sequence; identical to SEQ ID NO: 167498
  derived and/or modified CDS sequence (opt4) from hemagglutinin__InfluenzaA__AEO01532

SEQ ID NO: 167668 - RNA, 1701 nt, Artificial Sequence
  derived and/or modified CDS sequence (opt4) from hemagglutinin__InfluenzaA__AEO01533
augaaggccauccugguggugcugcuguacaccuucgccaccgccaacgccgacacccugugcaucggcuaccacgccaacaacagcaccgacaccguggacaccgugcuggagaagaacgugaccgugacccacagcguggaccugcuggaggacaagcacaacggcaagcugugcaagcugagaggcguggccccccugcaccugggcaagugcaacaucgccggcuggauccugggcaaccccgagugcgagagccugagcaccgccagcagcuggagcuacaucguggagaccagcagcagcgacaacggcaccugcuaccccggcgacuucaucgacuacgaggagcugagagagcagcugagcagcgugagcagcuucgagagauucgagaucuuccccaagaccagcagcuggcccaaccacgacagcaacaagggcgugaccgccgccugcccccacgccggcgccaagagcuucuacaagaaccugaucuggcuggugaagaagggcaacagcuaccccaagcugagcaagagcuacaucaacgacaagggcaaggaggugcuggugcuguggggcauccaccaccccagcaccagcgccgaccagcagagccuguaccagaacgccgacgccuacguguucgugggcaccagcagauacagcaagaaguucaagcccgagaucgccaucagacccaaggugagagaccaggagggcagaaugaacuacuacuggacccugguggagcccggcgacaagaucaccuucgaggccaccggcaaccugguggugcccagauacgccuucgccauggagagaaacgccggcagcggcaucaucaucagcgacacccccgugcacgacugcaacaccaccugccagacccccaagggcgccaucaacaccagccugcccuuccagaacauccaccccaucaccaucggcaagugccccaaguacgugaagagcaccaagcugagacuggccaccggccugagaaacgugcccagcauccagagcagaggccuguucggcgccaucgccggcuucaucgagggcggcuggaccggcaugguggacggcugguacggcuaccaccaccagaacgagcagggcagcggcuacgccgccgaccugaagagcacccagaacgccaucgacgagaucaccaacaaggugaacagcgugaucgagaagaugaacacccaguucaccgccgugggcaaggaguucaaccaccuggagaagagaaucgagaaccugaacaagaagguggacgacggcuuccuggacaucuggaccuacaacgccgagcugcuggugcugcuggagaacgagagaacccuggacuaccacgacagcaacgugaagaaccuguacgagaaggugagaagccagcugaagaacaacgccaaggagaucggcaacggcugcuucgaguucuaccacaagugcgacaacaccugcauggagagcgugaagaacggcaccuacgacuaccccaaguacagcgaggaggccaagcugaacagagaggagaucgacggcgugaagcuggagagcaccagaaucuaccagauccuggccaucuacagcaccguggccagcagccuggugcugguggugagccugggcgccaucagcuucuggaugugcagcaacggcagccugcagugcagaaucugcaucuga

SEQ ID NO: 167669 - RNA, 1701 nt, Artificial Sequence
  derived and/or modified CDS sequence (opt4) from hemagglutinin__InfluenzaA__AEO01534
augaaggccauccugguggugcugcuguacaccuucgccaccgccaacgccgacacccugugcaucggcuaccacgccaacaacagcaccgacaccguggacaccgugcuggagaagaacgugaccgugacccacagcgugaaccugcuggaggacaagcacaacggcaagcugugcaagcugagaggcguggccccccugcaccugggcaagugcaacaucgccggcuggauccugggcaaccccgagugcgagagccugagcaccgccagaagcuggagcuacaucguggagaccagcagcagcgacaacggcaccugcuaccccggcgacuucaucgacuacgaggagcugagagagcagcugagcagcgugagcagcuucgagagauucgagaucuuccccaagaccagcagcuggcccaaccacgacagcaacaagggcgugaccgccgccugcccccacgccggcgccaagagcuucuacaagaaccugaucuggcuggugaagaagggcaacagcuaccccaagcugagcaagagcuacaucaacgacaagggcaaggaggugcuggugcuguggggcauccaccaccccagcaccagcgccgaccagcagagccuguaccagaacgccgacgccuacguguucgugggcaccagcagauacagcaagaaguucaagcccgagaucgccaucagacccaaggugagagaccaggagggcagaaugaacuacuacuggacccugguggagcccggcgacaagaucaccuucgaggccaccggcaaccugguggugcccagauacgccuucgccauggagagaaacgccggcagcggcaucaucaucagcgacacccccgugcacgacugcaacaccaccugccagacccccaagggcgccaucaacaccagccugcccuuccagaacauccaccccaucaccaucggcaagugccccaaguacgugaagagcaccaagcugagacuggccaccggccugagaaacgugcccagcauccagagcagaggccuguucggcgccaucgccggcuucaucgagggcggcuggaccggcaugguggacggcugguacggcuaccaccaccagaacgagcagggcagcggcuacgccgccgaccugaagagcacccagcacgccaucgacgagaucaccaacaaggugaacagcgugaucgagaagaugaacacccaguucaccgccgugggcaaggaguucaaccaccuggagaagagaaucgagaaccugaacaagaagguggacgacggcuuccuggacaucuggaccuacaacgccgagcugcuggugcugcuggagaacgagagaacccuggacuaccacgacagcaacgugaagaaccuguacgagaaggugagaagccagcugaagaacaacgccaaggagaucggcaacggcugcuucgaguucuaccacaagugcgacaacaccugcauggagagcgugaagaacggcaccuacgacuaccccaaguacagcgaggaggccaagcugaacagagaggagaucgacggcgugaagcuggagagcaccagaaucuaccagauccuggccaucuacagcaccguggccagcagccuggugcugguggugagccugggcgccaucagcuucuggaugugcagcaacggcagccugcagugcagaaucugcaucuga

SEQ ID NO: 167670 - RNA, 1701 nt, Artificial Sequence; identical to SEQ ID NO: 164378
  derived and/or modified CDS sequence (opt4) from hemagglutinin__InfluenzaA__AEO01535

SEQ ID NO: 167671 - RNA, 1701 nt, Artificial Sequence; identical to SEQ ID NO: 163893
  derived and/or modified CDS sequence (opt4) from hemagglutinin__InfluenzaA__AEO01536

SEQ ID NO: 167672 - RNA, 1701 nt, Artificial Sequence; identical to SEQ ID NO: 165634
  derived and/or modified CDS sequence (opt4) from hemagglutinin__InfluenzaA__AEO01537

SEQ ID NO: 167673 - RNA, 1701 nt, Artificial Sequence
  derived and/or modified CDS sequence (opt4) from hemagglutinin__InfluenzaA__AEO01538
augaaggccauccugguggugcugcuguacaccuucgccaccgccaacgccgacacccugugcaucggcuaccacgccaacaacagcaccgacaccguggacaccgugcuggagaagaacgugaccgugacccacagcgugaaccugcuggaggacaagcacaacggcaagcugugcaagcugggcggcguggccccccugcaccugggcaagugcaacaucgccggcuggauccugggcaaccccgagugcgagagccugagcaccgccagcagcuggagcuacaucguggagaccagcagcagcgacaacggcaccugcuaccccggcgacuucaucgacuacgaggagcugagagagcagcugagcagcgugagcagcuucgagagauucgagaucuuccccaagaccagcagcuggcccaaccacgacagcaacaagggcgugaccgccgccugcccccacgccggcgccaagagcuucuacaagaaccugaucuggcuggugaagaagggcaacagcuaccccaagcugagcaagagcuacaucaacgacaagggcaaggaggugcuggugcuguggggcauccaccaccccagcaccagcgccgaccagcagagccuguaccagaacgccgacgccuacguguucgugggcaccagcagauacagcaagaaguucaagcccgagaucgccaucagacccaaggugagagaccaggagggcagaaugaacuacuacuggacccugguggagcccggcgacaagaucaccuucgaggccaccggcaaccugguggugcccagauacgccuucgccauggagagaaacgccggcagcggcaucaucaucagcgacacccccgugcacgacugcaacaccaccugccagacccccaagggcgccaucaacaccagccugcccuuccagaacauccaccccaucaccaucggcaagugccccaaguacgugaagagcaccaagcugagacuggccaccggccugagaaacgugcccagcauccagagcagaggccuguucggcgccaucgccggcuucaucgagggcggcuggaccggcaugguggacggcugguacggcuaccaccaccagaacgagcagggcagcggcuacgccgccgaccugaagagcacccagaacgccaucgacgagaucaccaacaaggugaacagcgugaucgagaagaugaacacccaguucaccgccgugggcaaggaguucaaccaccuggagaagagaaucgagaaccugaacaagaagguggacgacggcuuccuggacaucuggaccuacaacgccgagcugcuggugcugcuggagaacgagagaacccuggacuaccacgacagcaacgugaagaaccuguacgagaaggugagaagccagcugaagaacaacgccaaggagaucggcaacggcugcuucgaguucuaccacaagugcgacaacaccugcauggagagcgugaagaacggcaccuacgacuaccccaaguacagcgaggaggccaagcugaacagagaggagaucgacggcgugaagcuggagagcaccagaaucuaccagauccuggccaucuacagcaccguggccagcagccuggugcugguggugagccugggcgccaucagcuucuggaugugcagcaacggcagccugcagugcagaaucugcaucuga

SEQ ID NO: 167674 - RNA, 1701 nt, Artificial Sequence; identical to SEQ ID NO: 164356
  derived and/or modified CDS sequence (opt4) from hemagglutinin__InfluenzaA__AEO01539

SEQ ID NO: 167675 - RNA, 1701 nt, Artificial Sequence
  derived and/or modified CDS sequence (opt4) from hemagglutinin__InfluenzaA__AEO01540
augaaggccauccugguggugcugcuguacaccuucgccaucgccaacgccgacacccugugcaucggcuaccacgccaacaacagcaccgacaccguggacaccgugcuggagaagaacgugaccgugacccacagcgugaaccugcuggaggacaagcacaacgagaagcugugcaagcugagaggcguggccccccugcaccugggcaagugcaacaucgccggcuggauccugggcaaccccgagugcgagagccugagcaccgccagcagcuggagcuacaucguggagaccagcagcagcgacaacggcaccugcuaccccggcgacuucaucgacuacgaggagcugagagagcagcugagcagcgugagcagcuucgagagauucgagaucuuccccaagaccagcagcuggcccaaccacgacagcaacaagggcgugaccgccgccugcccccacgccggcgccaagagcuucuacaagaaccugaucuggcuggugaagaagggcaacagcuaccccaagcugagcaagagcuacaucaacgacaagggcaaggaggugcuggugcuguggggcauccaccaccccagcaccagcgccgaccagcagagccuguaccagaacgccgacgccuacguguucgugggcaccagcagauacagcaagaaguucaagcccgagaucgccaucagacccaaggugagagaccaggagggcagaaugaacuacuacuggacccugguggagcccggcgacaagaucaccuucgaggccaccggcaaccugguggugcccagauacgccuucgccauggagagaaacgccggcagcggcaucaucaucagcgacacccccgugcacgacugcaacaccaccugccagacccccaagggcgccaucaacaccagccugcccuuccagaacauccaccccaucaccaucggcaagugccccaaguacgugaagagcaccaagcugagacuggccaccggccugagaaacgugcccagcauccagagcagaggccuguucggcgccaucgccggcuucaucgagggcggcuggaccggcaugguggacggcugguacggcuaccaccaccagaacgagcagggcagcggcuacgccgccgaccugaagagcacccagcacgccaucgacgagaucaccaacaaggugaacagcgugaucgagaagaugaacacccaguucaccgccgugggcaaggaguucaaccaccuggagaagagaaucgagaaccugaacaagaagguggacgacggcuuccuggacaucuggaccuacaacgccgagcugcuggugcugcuggagaacgagagaacccuggacuaccacgacagcaacgugaagaaccuguacgagaaggugagaagccagcugaagaacaacgccaaggagaucggcaacggcugcuucgaguucuaccacaagugcgacaacaccugcauggagagcgugaagaacggcaccuacgacuaccccaaguacagcgaggaggccaagcugaacagagaggagaucaacggcgugaagcuggagagcaccagaaucuaccagauccuggccaucuacagcaccguggccagcagccuggugcugguggugagccugggcgccaucagcuucuggaugugcagcaacggcagccugcagugcagaaucugcaucuga

SEQ ID NO: 167676 - RNA, 1701 nt, Artificial Sequence; identical to SEQ ID NO: 164149
  derived and/or modified CDS sequence (opt4) from hemagglutinin__InfluenzaA__AEO01541

SEQ ID NO: 167677 - RNA, 1701 nt, Artificial Sequence; identical to SEQ ID NO: 163893
  derived and/or modified CDS sequence (opt4) from hemagglutinin__InfluenzaA__AEO01542

SEQ ID NO: 167678 - RNA, 1701 nt, Artificial Sequence; identical to SEQ ID NO: 163830
  derived and/or modified CDS sequence (opt4) from hemagglutinin__InfluenzaA__AEO01543

SEQ ID NO: 167679 - RNA, 1701 nt, Artificial Sequence; identical to SEQ ID NO: 163830
  derived and/or modified CDS sequence (opt4) from hemagglutinin__InfluenzaA__AEO01544

SEQ ID NO: 167680 - RNA, 1701 nt, Artificial Sequence
  derived and/or modified CDS sequence (opt4) from hemagglutinin__InfluenzaA__AEO01545
augaaggccauccugguggugcugcuguacaccuucgccaccgccaacgccgacacccugugcaucggcuaccacgccaacaacagcaccgacaccguggacaccgugcuggagaagaacgugaccgugacccacagcgugaaccugcuggaggacaagcacagcggcaagcugugcaagcugagaggcguggccccccugcaccugggcaagugcaacaucgccggcuggauccugggcaaccccgagugcgagagccugagcaccgccagcagcuggagcuacaucguggagaccagcagcagcgacaacggcaccugcuaccccggcgacuucguggacuacgaggagcugagagagcagcugagcagcgugagcagcuucgagagauucgagaucuuccccaagaccagcagcuggcccaaccacgacagcaacaagggcgugaccgccgccugcccccacgccggcgccaagagcuucuacaagaaccugaucuggcuggugaagaagggcaacagcuaccccaagcugagcaagagcuacaucaacgacaagggcaaggaggugcuggugcuguggggcauccaccaccccagcaccagcgccgaccagcagagccuguaccagaacgccgacgccuacguguucgugggcaccagcagauacagcaagaaguucaagcccgagaucgccaucagacccaaggugagagaccaggagggcagaaugaacuacuacuggacccugguggagcccggcgacaagaucaccuucgaggccaccggcaaccugguggugcccagauacgccuucgccauggagagaaacgccggcagcggcaucaucaucagcgacacccccgugcacgacugcaacaccaccugccagacccccaagggcgccaucaacaccagccugcccuuccagaacauccaccccaucaccaucggcaagugccccaaguacgugaagagcaccaagcugagacuggccaccggccugagaaacgugcccagcauccagagcagaggccuguucggcgccaucgccggcuucaucgagggcggcuggaccggcaugguggacggcugguacggcuaccaccaccagaacgagcagggcagcggcuacgccgccgaccugaagagcacccagaacgccaucgacaagaucaccaacaaggugaacagcgugaucgagaagaugaacacccaguucaccgccgugggcaaggaguucaaccaccuggagaagagaaucgagaaccugaacaagaagguggacgacggcuuccuggacaucuggaccuacaacgccgagcugcuggugcugcuggagaacgagagaacccuggacuaccacgacagcaacgugaagaaccuguacgagaaggugagaagccagcugaagaacaacgccaaggagaucggcaacggcugcuucgaguucuaccacaagugcgacaacaccugcauggagagcgugaagaacggcaccuacgacuaccccaaguacagcgaggaggccaagcugaacagagaggagaucgacggcgugaagcuggagagcaccagaaucuaccagauccuggccaucuacagcaccguggccagcagccuggugcugguggugagccugggcgccaucagcuucuggaugugcagcaacggcagccugcagugcagaaucugcaucuga

SEQ ID NO: 167681 - RNA, 1701 nt, Artificial Sequence; identical to SEQ ID NO: 162716
  derived and/or modified CDS sequence (opt4) from hemagglutinin__InfluenzaA__AEO01546

SEQ ID NO: 167682 - RNA, 1701 nt, Artificial Sequence; identical to SEQ ID NO: 162716
  derived and/or modified CDS sequence (opt4) from hemagglutinin__InfluenzaA__AEO01547

SEQ ID NO: 167683 - RNA, 1701 nt, Artificial Sequence; identical to SEQ ID NO: 162909
  derived and/or modified CDS sequence (opt4) from hemagglutinin__InfluenzaA__AEO01548

SEQ ID NO: 167684 - RNA, 1701 nt, Artificial Sequence; identical to SEQ ID NO: 162820
  derived and/or modified CDS sequence (opt4) from hemagglutinin__InfluenzaA__AEO01549

SEQ ID NO: 167685 - RNA, 1701 nt, Artificial Sequence; identical to SEQ ID NO: 162729
  derived and/or modified CDS sequence (opt4) from hemagglutinin__InfluenzaA__AEO01550

SEQ ID NO: 167686 - RNA, 1701 nt, Artificial Sequence; identical to SEQ ID NO: 162729
  derived and/or modified CDS sequence (opt4) from hemagglutinin__InfluenzaA__AEO01551

SEQ ID NO: 167687 - RNA, 1701 nt, Artificial Sequence; identical to SEQ ID NO: 162729
  derived and/or modified CDS sequence (opt4) from hemagglutinin__InfluenzaA__AEO01552

SEQ ID NO: 167688 - RNA, 1701 nt, Artificial Sequence; identical to SEQ ID NO: 162729
  derived and/or modified CDS sequence (opt4) from hemagglutinin__InfluenzaA__AEO01553

SEQ ID NO: 167689 - RNA, 1701 nt, Artificial Sequence; identical to SEQ ID NO: 162729
  derived and/or modified CDS sequence (opt4) from hemagglutinin__InfluenzaA__AEO01554

SEQ ID NO: 167690 - RNA, 1701 nt, Artificial Sequence; identical to SEQ ID NO: 162909
  derived and/or modified CDS sequence (opt4) from hemagglutinin__InfluenzaA__AEO01555

SEQ ID NO: 167691 - RNA, 1701 nt, Artificial Sequence; identical to SEQ ID NO: 162729
  derived and/or modified CDS sequence (opt4) from hemagglutinin__InfluenzaA__AEO01557

SEQ ID NO: 167692 - RNA, 1701 nt, Artificial Sequence; identical to SEQ ID NO: 162729
  derived and/or modified CDS sequence (opt4) from hemagglutinin__InfluenzaA__AEO01558

SEQ ID NO: 167693 - RNA, 1701 nt, Artificial Sequence
  derived and/or modified CDS sequence (opt4) from hemagglutinin__InfluenzaA__AEO01559
augaaggccauccugguggugcugcuguacaccuucgccaccgccaacgccgacacccugugcaucggcuaccacgccaacaacagcaccgacaccguggacaccgugcuggagaagaacgugaccgugacccacagcgugaaccugcuggaggacaagcacaacggcaagcugugcaagcugagaggcguggccccccugcaccugggcaagugcaacaucgccggcuggauccugggcaaccccgagugcgagagccugagcaccgccagcagcuggagcuacaucguggagaccagcagcagcgacaacggcaccugcuaccccggcgacuucaucgacuacgaggagcugagagagcagcugagcagcgugagcagcuucgagagauucgagaucuuccccaagaccagcagcuggcccaaccacgacagcaacaagggcgugaccgccgccugcccccacgccggcgccaagagcuucuacaagaaccugaucuggcuggugaagaagggcaacagcuaccccaagcugagcaagagcuacaucaacgacaagggcaaggaggugcuggugcuguggggcauccaccaccccagcaccagcgccgaccagcagagccuguaccagaacgccgacgccuacguguucgugggcaccagcagauacagcaagaaguucaagcccgagaucgccaucagacccaaggugagagaccaggagggcagaaugaacuacuacuggacccugguggagcccggcgacaagaucaccuucgaggccaccggcaaccugguggugcccagauacgccuucgccauggagagaaacgccggcagcggcaucaucaucagcgacacccccgugcaggacugcaacaccaccugccagacccccaagggcgccaucaacaccagccugcccuuccagaacauccaccccaucaccaucggcaagugccccaaguacgugaagagcaccaagcugagacuggccaccggccugagaaacgugcccagcauccagagcagaggccuguucggcgccaucgccggcuucaucgagggcggcuggaccggcaugguggacggcugguacggcuaccaccaccagaacgagcagggcagcggcuacgccgccgaccugaagagcacccagaacgccaucgacgagaucaccaacaaggugaacagcgugaucgagaagaugaacacccaguucaccgccgugggcaaggaguucaaccaccuggagaagagaaucgagaaccugaacaagaagguggacgacggcuuccuggacaucuggaccuacaacgccgagcugcuggugcugcuggagaacgagagaacccuggacuaccacgacagcaacgugaagaaccuguacgagaaggugagaagccagcugaagaacaacgccaaggagaucggcaacggcugcuucgaguucuaccacaagugcgacaacaccugcauggagagcgugaagaacggcaccuacgacuaccccaaguacagcgaggaggccaagcugaacagagaggagaucgacggcgugaagcuggagagcaccagaaucuaccagauccuggccaucuacagcaccguggccagcagccuggugcugguggugagccugggcgccaucagcuucuggaugugcagcaacggcagccugcagugcagaaucugcaucuga

SEQ ID NO: 167694 - RNA, 1701 nt, Artificial Sequence; identical to SEQ ID NO: 162729
  derived and/or modified CDS sequence (opt4) from hemagglutinin__InfluenzaA__AEO01560

SEQ ID NO: 167695 - RNA, 1701 nt, Artificial Sequence; identical to SEQ ID NO: 162729
  derived and/or modified CDS sequence (opt4) from hemagglutinin__InfluenzaA__AEO01561

SEQ ID NO: 167696 - RNA, 1701 nt, Artificial Sequence; identical to SEQ ID NO: 162729
  derived and/or modified CDS sequence (opt4) from hemagglutinin__InfluenzaA__AEO01562

SEQ ID NO: 167697 - RNA, 1701 nt, Artificial Sequence; identical to SEQ ID NO: 162729
  derived and/or modified CDS sequence (opt4) from hemagglutinin__InfluenzaA__AEO01563

SEQ ID NO: 167698 - RNA, 1701 nt, Artificial Sequence; identical to SEQ ID NO: 162729
  derived and/or modified CDS sequence (opt4) from hemagglutinin__InfluenzaA__AEO01564

SEQ ID NO: 167699 - RNA, 1701 nt, Artificial Sequence; identical to SEQ ID NO: 162729
  derived and/or modified CDS sequence (opt4) from hemagglutinin__InfluenzaA__AEO01565

SEQ ID NO: 167700 - RNA, 1701 nt, Artificial Sequence; identical to SEQ ID NO: 162716
  derived and/or modified CDS sequence (opt4) from hemagglutinin__InfluenzaA__AEO01566

SEQ ID NO: 167701 - RNA, 1701 nt, Artificial Sequence; identical to SEQ ID NO: 162971
  derived and/or modified CDS sequence (opt4) from hemagglutinin__InfluenzaA__AEO01567

SEQ ID NO: 167702 - RNA, 1701 nt, Artificial Sequence; identical to SEQ ID NO: 162911
  derived and/or modified CDS sequence (opt4) from hemagglutinin__InfluenzaA__AEO01568

SEQ ID NO: 167703 - RNA, 1701 nt, Artificial Sequence; identical to SEQ ID NO: 162911
  derived and/or modified CDS sequence (opt4) from hemagglutinin__InfluenzaA__AEO01569

SEQ ID NO: 167704 - RNA, 1701 nt, Artificial Sequence; identical to SEQ ID NO: 162971
  derived and/or modified CDS sequence (opt4) from hemagglutinin__InfluenzaA__AEO01570

SEQ ID NO: 167705 - RNA, 1701 nt, Artificial Sequence; identical to SEQ ID NO: 162911
  derived and/or modified CDS sequence (opt4) from hemagglutinin__InfluenzaA__AEO01571

SEQ ID NO: 167706 - RNA, 1701 nt, Artificial Sequence; identical to SEQ ID NO: 162971
  derived and/or modified CDS sequence (opt4) from hemagglutinin__InfluenzaA__AEO01572

SEQ ID NO: 167707 - RNA, 1701 nt, Artificial Sequence; identical to SEQ ID NO: 162716
  derived and/or modified CDS sequence (opt4) from hemagglutinin__InfluenzaA__AEO01573

SEQ ID NO: 167708 - RNA, 1701 nt, Artificial Sequence; identical to SEQ ID NO: 162729
  derived and/or modified CDS sequence (opt4) from hemagglutinin__InfluenzaA__AEO01574

SEQ ID NO: 167709 - RNA, 1701 nt, Artificial Sequence; identical to SEQ ID NO: 162716
  derived and/or modified CDS sequence (opt4) from hemagglutinin__InfluenzaA__AEO01575

SEQ ID NO: 167710 - RNA, 1701 nt, Artificial Sequence; identical to SEQ ID NO: 162716
  derived and/or modified CDS sequence (opt4) from hemagglutinin__InfluenzaA__AEO01576

SEQ ID NO: 167711 - RNA, 1701 nt, Artificial Sequence; identical to SEQ ID NO: 162716
  derived and/or modified CDS sequence (opt4) from hemagglutinin__InfluenzaA__AEO01577

SEQ ID NO: 167712 - RNA, 1701 nt, Artificial Sequence; identical to SEQ ID NO: 162971
  derived and/or modified CDS sequence (opt4) from hemagglutinin__InfluenzaA__AEO01578

SEQ ID NO: 167713 - RNA, 1701 nt, Artificial Sequence; identical to SEQ ID NO: 162971
  derived and/or modified CDS sequence (opt4) from hemagglutinin__InfluenzaA__AEO01579

SEQ ID NO: 167714 - RNA, 1701 nt, Artificial Sequence; identical to SEQ ID NO: 162716
  derived and/or modified CDS sequence (opt4) from hemagglutinin__InfluenzaA__AEO01581

SEQ ID NO: 167715 - RNA, 1701 nt, Artificial Sequence; identical to SEQ ID NO: 162716
  derived and/or modified CDS sequence (opt4) from hemagglutinin__InfluenzaA__AEO01582

SEQ ID NO: 167716 - RNA, 1701 nt, Artificial Sequence; identical to SEQ ID NO: 162716
  derived and/or modified CDS sequence (opt4) from hemagglutinin__InfluenzaA__AEO01583

SEQ ID NO: 167717 - RNA, 1701 nt, Artificial Sequence; identical to SEQ ID NO: 162716
  derived and/or modified CDS sequence (opt4) from hemagglutinin__InfluenzaA__AEO01584

SEQ ID NO: 167718 - RNA, 1701 nt, Artificial Sequence; identical to SEQ ID NO: 162716
  derived and/or modified CDS sequence (opt4) from hemagglutinin__InfluenzaA__AEO01585

SEQ ID NO: 167719 - RNA, 1701 nt, Artificial Sequence; identical to SEQ ID NO: 162716
  derived and/or modified CDS sequence (opt4) from hemagglutinin__InfluenzaA__AEO01586

SEQ ID NO: 167720 - RNA, 1701 nt, Artificial Sequence; identical to SEQ ID NO: 162716
  derived and/or modified CDS sequence (opt4) from hemagglutinin__InfluenzaA__AEO01587

SEQ ID NO: 167721 - RNA, 1701 nt, Artificial Sequence; identical to SEQ ID NO: 162716
  derived and/or modified CDS sequence (opt4) from hemagglutinin__InfluenzaA__AEO01588

SEQ ID NO: 167722 - RNA, 1701 nt, Artificial Sequence; identical to SEQ ID NO: 162729
  derived and/or modified CDS sequence (opt4) from hemagglutinin__InfluenzaA__AEO01589

SEQ ID NO: 167723 - RNA, 1701 nt, Artificial Sequence; identical to SEQ ID NO: 162729
  derived and/or modified CDS sequence (opt4) from hemagglutinin__InfluenzaA__AEO01590

SEQ ID NO: 167724 - RNA, 1701 nt, Artificial Sequence; identical to SEQ ID NO: 162729
  derived and/or modified CDS sequence (opt4) from hemagglutinin__InfluenzaA__AEO01591

SEQ ID NO: 167725 - RNA, 1701 nt, Artificial Sequence; identical to SEQ ID NO: 162716
  derived and/or modified CDS sequence (opt4) from hemagglutinin__InfluenzaA__AEO01592

SEQ ID NO: 167726 - RNA, 1701 nt, Artificial Sequence; identical to SEQ ID NO: 162729
  derived and/or modified CDS sequence (opt4) from hemagglutinin__InfluenzaA__AEO01593

SEQ ID NO: 167727 - RNA, 1701 nt, Artificial Sequence; identical to SEQ ID NO: 162716
  derived and/or modified CDS sequence (opt4) from hemagglutinin__InfluenzaA__AEO01594

SEQ ID NO: 167728 - RNA, 1701 nt, Artificial Sequence; identical to SEQ ID NO: 162716
  derived and/or modified CDS sequence (opt4) from hemagglutinin__InfluenzaA__AEO01595

SEQ ID NO: 167729 - RNA, 1701 nt, Artificial Sequence; identical to SEQ ID NO: 162909
  derived and/or modified CDS sequence (opt4) from hemagglutinin__InfluenzaA__AEO01596

SEQ ID NO: 167730 - RNA, 1701 nt, Artificial Sequence; identical to SEQ ID NO: 162729
  derived and/or modified CDS sequence (opt4) from hemagglutinin__InfluenzaA__AEO01597

SEQ ID NO: 167731 - RNA, 1701 nt, Artificial Sequence
  derived and/or modified CDS sequence (opt4) from hemagglutinin__InfluenzaA__AEO01598
augaaggccauccugguggugcugcuguacaccuucgccaccgccaacgccgacacccugugcaucggcuaccacgccaacaacagcaccgacaccguggacaccgugcuggagaagaacgugaccgugacccacagcgugaaccugcuggaggacaagcacaacggcaagcugugcaagcugagaggcguggccccccugcaccugggcaagugcaacaucgccggcuggauccugggcaaccccgagugcgagagccugagcaccgccagcagcuggagcuacaucguggagaccagcagcagcgacaacggcaccugcuaccccggcgacuucaucgacuacgaggagcugagagagcagcugagcagcgugagcagcuucgagagauucgagauguuccccaagaccagcagcuggcccaaccacgacagcaacaacggcgugaccgccgccugcccccacgccggcgccaagagcuucuacaagaaccugaucuggcuggugaagaagggcaacagcuaccccaagcugagcaagagcuacaucaacgacaagggcaaggaggugcuggugcuguggggcauccaccaccccagcaccagcgccgaccagcagagccuguaccagaacgccgacgccuacguguucgugggcagcagcagauacagcaagaaguucaagcccgagaucgccaucagacccaaggugagagaccaggagggcagaaugaacuacuacuggacccugguggagcccggcgacaagaucaccuucgaggccaccggcaaccugguggugcccagauacgccuucgccauggagagaaacgccggcagcggcaucaucaucagcgacacccccgugcacgacugcaacaccaccugccagacccccaagggcgccaucaacaccagccugcccuuccagaacauccaccccaucaccaucggcaagugccccaaguacgugaagagcaccaagcugagacuggccaccggccugagaaacgugcccagcauccagagcagaggccuguucggcgccaucgccggcuucaucgagggcggcuggaccggcaugguggacggcugguacggcuaccaccaccagaacgagcagggcagcggcuacgccgccgaccugaagagcacccagaacgccaucgacgagaucaccaacaaggugaacagcgugaucgagaagaugaacacccaguucaccgccgugggcaaggaguucaaccaccuggagaagagaaucgagaaccugaacaagaagguggacgacggcuuccuggacaucuggaccuacaacgccgagcugcuggugcugcuggagaacgagagaacccuggacuaccacgacagcaacgugaagaaccuguacgagaaggugagaagccagcugaagaacaacgccaaggagaucggcaacggcugcuucgaguucuaccacaagugcgacaacaccugcauggagagcgugaagaacggcaccuacgacuaccccaaguacagcgaggaggccaagcugaacagagaggagaucgacggcgugaagcuggagagcaccagaaucuaccagauccuggccaucuacagcaccguggccagcagccuggugcugguggugagccugggcgccaucagcuucuggaugugcagcaacggcagccugcagugcagaaucugcaucuga

SEQ ID NO: 167732 - RNA, 1701 nt, Artificial Sequence; identical to SEQ ID NO: 162729
  derived and/or modified CDS sequence (opt4) from hemagglutinin__InfluenzaA__AEO01599

SEQ ID NO: 167733 - RNA, 1701 nt, Artificial Sequence; identical to SEQ ID NO: 162729
  derived and/or modified CDS sequence (opt4) from hemagglutinin__InfluenzaA__AEO01600

SEQ ID NO: 167734 - RNA, 1701 nt, Artificial Sequence; identical to SEQ ID NO: 162729
  derived and/or modified CDS sequence (opt4) from hemagglutinin__InfluenzaA__AEO01601

SEQ ID NO: 167735 - RNA, 1701 nt, Artificial Sequence; identical to SEQ ID NO: 162729
  derived and/or modified CDS sequence (opt4) from hemagglutinin__InfluenzaA__AEO01602

SEQ ID NO: 167736 - RNA, 1701 nt, Artificial Sequence; identical to SEQ ID NO: 162729
  derived and/or modified CDS sequence (opt4) from hemagglutinin__InfluenzaA__AEO01603

SEQ ID NO: 167737 - RNA, 1701 nt, Artificial Sequence; identical to SEQ ID NO: 162729
  derived and/or modified CDS sequence (opt4) from hemagglutinin__InfluenzaA__AEO01604

SEQ ID NO: 167738 - RNA, 1701 nt, Artificial Sequence; identical to SEQ ID NO: 162729
  derived and/or modified CDS sequence (opt4) from hemagglutinin__InfluenzaA__AEO01605

SEQ ID NO: 167739 - RNA, 1701 nt, Artificial Sequence
  derived and/or modified CDS sequence (opt4) from hemagglutinin__InfluenzaA__AEO01606
augaaggccauccugguggugcugcuguacaccuucgccaccgccaacgccgacacccugugcaucggcuaccacgccaacaacagcaccgacaccguggacaccgugcuggagaagaacgugaccgugacccacagcgugaaccugcuggaggacaagcacaacggcaagcugugcaagcugagaggcguggccccccugcaccugggcaagugcaacaucgccggcuggauccugggcaaccccgagugcgagagccugagcaccgccagcagcuggagcuacaucguggagaccagcagcagcgacaacggcaccugcuaccccggcgacuucaucgacuacgaggagcugagagagcagcugagcagcgugagcagcuucgagagauucgagaucuuccccaagaccagcagcuggcccaaccacgacagcaacaagggcgugaccgccgccugcccccacgccggcgccaagagcuucuacaagaaccugaucuggcuggugaagaagggcaacagcuaccccaagcugagcaagagcuacaucaacgacaagggcaaggaggugcuggugcuguggggcauccaccaccccagcaccagcgccgaccagcagagccuguaccagaacgccgacgccuacguguucgugggcaccagcagauacagcaagaaguucaagcccgagaucgccaucagacccaaggugagagaccaggagggcagaaugaacuacuacuggacccugguggagcccggcgacaagaucaccuucgaggccaccggcaaccugguggugcccagauacgccuucgccauggagagaaacgccggcagcggcaucaucaucagcgacacccccgugcacgacugcaacaccaccugccagacccccaagggcgccaucaacaccagccugcccuuccagaacauccaccccaucaccaucggcaagugccccaaguacgugaagagcaccaagcugagacuggccaccggccugagaaacgugcccagcauccagagcagaggccuguucggcgccaucgccggcuucaucgagggcggcuggaccggcaugguggacggcugguacggcuaccaccaccagaacgagcagggcagcggcuacgccgccgaccugaagagcacccagaacgccaucgacgagaucaccaacaaggugaacagcgugaucgagaagaugaacacccaguucaccgccgugggcaaggaguucaaccaccuggagaagagaaucgagaaccugaacaagaagguggacgacggcuuccuggacaucuggaccuacaacgccgagcugcuggugcugcuggagaacgagagaacccuggacuaccacgacagcaacgugaagaaccuguacgagaaggugaagagccagcugaagaacaacgccaaggagaucggcaacggcugcuucgaguucuaccacaagugcgacaacaccugcauggagagcgugaagaacggcaccuacgacuaccccaaguacagcgaggaggccaagcugaacagagaggagaucgacggcgugaagcuggagagcaccagaaucuaccagauccuggccaucuacagcaccguggccagcagccuggugcugguggugagccugggcgccaucagcuucuggaugugcagcaacggcagccugcagugcagaaucugcaucuga

SEQ ID NO: 167740 - RNA, 1701 nt, Artificial Sequence; identical to SEQ ID NO: 162971
  derived and/or modified CDS sequence (opt4) from hemagglutinin__InfluenzaA__AEO01607

SEQ ID NO: 167741 - RNA, 1701 nt, Artificial Sequence; identical to SEQ ID NO: 165634
  derived and/or modified CDS sequence (opt4) from hemagglutinin__InfluenzaA__AEO01608

SEQ ID NO: 167742 - RNA, 1701 nt, Artificial Sequence; identical to SEQ ID NO: 167494
  derived and/or modified CDS sequence (opt4) from hemagglutinin__InfluenzaA__AEO01609

SEQ ID NO: 167743 - RNA, 1701 nt, Artificial Sequence
  derived and/or modified CDS sequence (opt4) from hemagglutinin__InfluenzaA__AEO01610
augaaggccauccugguggugcugcuguacaccuucgccaccaccaacgccgacacccugugcaucggcuaccacgccaacaacagcaccgacaccguggacaccgugcuggagaagaacgugaccgugacccacagcgugaaccugcuggaggacaagcacaacggcaagcugugcaagcugagaggcguggccccccugcaccugggcaagugcaacaucgccggcuggauccugggcaaccccgagugcgagagccugagcaccgccagcagcuggagcuacaucguggagaccagcagcagcgacaacggcaccugcuaccccggcgacuucaucgacuacgaggagcugagagagcagcugagcagcgugagcagcuucgagagauucgagaucuuccccaagaccagcagcuggcccaaccacgacagcaacaagggcgugaccgccgccugcccccacgccggcgccaagagcuucuacaagaaccugaucuggcuggugaagaagggcaacagcuaccccaagcugagcaagagcuacaucaacgacaagggcaaggaggugcuggugcuguggggcauccaccaccccagcaccagcgccgaccagcagagccuguaccagaacgccgacgccuacguguucgugggcaccagcagauacagcaagaaguucaagcccgagaucgccaucagacccaaggugagagaccaggagggcagaaugaacuacuacuggacccugguggagcccggcgacaagaucaccuucgaggccaccggcaaccugguggugcccagauacgccuucgccauggagagaaacgccggcagcggcaucaucaucagcgacacccccgugcacgacugcaacaccaccugccagacccccaagggcgccaucaacaccagccugcccuuccagaacauccaccccaucaccaucggcaagugccccaaguacgugaagagcaccaagcugagacuggccaccggccugagaaacgugcccagcauccagagcagaggccuguucggcgccaucgccggcuucaucgagggcggcuggaccggcaugguggacggcugguacggcuaccaccaccagaacgagcagggcagcggcuacgccgccgaccugaagagcacccagcacgccaucgacgagaucaccaacaaggugaacagcgugaucgagaagaugaacacccaguucaccgccgugggcaaggaguucaaccaccuggagaagagaaucgagaaccugaacaagaagguggacgacggcuuccuggacaucuggaccuacaacgccgagcugcuggugcugcuggagaacgagagaacccuggacuaccacgacagcaacgugaagaaccuguacgagaaggugagaagccagcugaagaacaacgccaaggagaucggcaacggcugcuucgaguucuaccacaagugcgacaacaccugcauggagagcgugaagaacggcaccuacgacuaccccaaguacagcgaggaggccaagcugaacagagaggagaucgacggcgugaagcuggagagcaccagaaucuaccagauccuggccaucuacagcaccguggccagcagccuggugcugguggugagccugggcgccaucagcuucuggaugugcagcaacggcagccugcagugcagagugugcaucuga

SEQ ID NO: 167744 - RNA, 1701 nt, Artificial Sequence
  derived and/or modified CDS sequence (opt4) from hemagglutinin__InfluenzaA__AEO01611
augaaggccauccugguggugcugcuguacaccuucgccaccgccaacgccgacacccugugcaucggcuaccacgccaacaacagcaccgacaccguggacaccgugcuggagaagaacgugaccgugacccacagcgugaaccugcuggaggacaagcacaacggcaagcugugcaagcugagaggcguggccccccugcaccugggcaagugcaacaucgccggcuggauccugggcaaccccgagugcgagagccugagcaccgccagcagcuggagcuacaucguggagaccagcagcagcgacaacggcaccugcuaccccggcgacuucaucgacuacgaggagcugagagagcagcugagcagcgugagcagcuucgagagauucgagaucuuccccaagaccagcagcuggcccaaccacgacagcaacaagggcgugaccgccgccugcccccacgccggcgccaagagcuucuacaagaaccugaucuggcuggugaagaagggcaacagcuaccccaagcugagcaagagcuacaucaacgacaagggcagagaggugcuggugcuguggggcauccaccaccccagcaccagcgccgaccagcagagccuguaccagaacgccgacgccuacguguucgugggcaccagcagauacagcaagaaguucaagcccgagaucgccaucagacccaaggugagagaccaggagggcagaaugaacuacuacuggacccugguggagcccggcgacaagaucaccuucgaggccaccggcaaccugguggugcccagauacgccuucgccauggagagaaacgccggcagcggcaucaucaucagcgacacccccgugcacgacugcaacaccaccugccagacccccaagggcgccaucaacaccagccugcccuuccagaacauccaccccaucaccaucggcgagugccccaaguacgugaagagcaccaagcugagacuggccaccggccugagaaacgugcccagcauccagagcagaggccuguucggcgccaucgccggcuucaucgagggcggcuggaccggcaugguggacggcugguacggcuaccaccaccagaacgagcagggcagcggcuacgccgccgaccugaagagcacccagaacgccaucgacaagaucaccaacaaggugaacagcgugaucgagaagaugaacacccaguucaccgccgugggcaaggaguucaaccaccuggagaagagaaucgagaaccugaacaagaagguggacgacggcuuccuggacaucuggaccuacaacgccgagcugcuggugcugcuggagaacgagagaacccuggacuaccacgacagcaacgugaagaaccuguacgagaaggugagaagccagcugaagaacaacgccaaggagaucggcaacggcugcuucgaguucuaccacaagugcgacaacaccugcauggagagcgugaagaacggcaccuacgacuaccccaaguacagcgaggaggccaagcugaacagagaggagaucgacggcgugaagcuggagagcaccagaaucuaccagauccuggccaucuacagcaccgccgccagcagccuggugcugguggugagccugggcgccaucagcuucuggaugugcagcaacggcagccugcagugcagaaucugcaucuga

SEQ ID NO: 167745 - RNA, 1701 nt, Artificial Sequence
  derived and/or modified CDS sequence (opt4) from hemagglutinin__InfluenzaA__AEO01612
augaaggccauccugguggugcugcuguacaccuucgccaccgccaacgccgacacccugugcaucggcuaccacgccaacaacagcaccgacaccguggacaccgugcuggagaagaacgugaccgugacccacagcgugaaccugcuggaggacaagcacaacggcaagcugugcaagcugagaggcguggccccccugcaccugggcaagugcaacaucgccggcuggauccugggcaaccccgagugcgagagccugagcaccgccagcagcuggagcuacaucguggagaccagcagcagcgacaacggcaccugcuaccccggcgacuucaucgacuacgaggagcugagagagcagcugagcagcgugagcagcuucgagagauucgagaucuuccccaagaccagcagcuggcccaaccacgacagcaacaagggcgccaccgccgccugcccccacgccggcgccaagagcuucuacaagaaccugaucuggcuggugaagaagggcaacagcuaccccaagcugagcaagagcuacaucaacgacaagggcaaggaggugcuggugcuguggggcauccaccaccccagcaccagcgccgaccagcagagccuguaccagaacgccgacgccuacguguucgugggcaccagcagauacagcaagaaguucaagcccgagaucgccaucagacccaaggugagagaccaggagggcagaaugaacuacuacuggacccugguggagcccggcgacaagaucaccuucgaggccaccggcaaccugguggugcccagauacgccuucgccauggagagaaacgccggcagcggcaucaucaucagcgacacccccgugcacgacugcaacaccaccugccagacccccaagggcgccaucaacaccagccugcccuuccagaacauccaccccaucaccaucggcaagugccccaaguacgugaagagcaccaagcugagacuggccaccggccugagaaacgugcccagcauccagagcagaggccuguucggcgccaucgccggcuucaucgagggcggcuggaccggcaugguggacggcugguacggcuaccaccaccagaacgagcagggcagcggcuacgccgccgaccugaagagcacccagaacgccaucgacgagaucaccaacaaggugaacagcgugaucgagaagaugaacacccaguucaccgccgugggcaaggaguucaaccaccuggagaagagaaucgagaaccugaacaagaagguggacgacggcuuccuggacaucuggaccuacaacgccgagcugcuggugcugcuggagaacgagagaacccuggacuaccacgacagcaacgugaagaaccuguacgagaaggugagaagccagcugaagaacaacgccaaggagaucggcaacggcugcuucgaguucuaccacaagugcgacaacaccugcauggagagcgugaagaacggcaccuacgacuaccccaaguacagcgaggaggccaagcugaacagagaggagaucgacggcgugaagcuggagagcaccagaaucuaccagauccuggccaucuacagcaccguggccagcagccuggugcugguggugagccugggcgccaucagcuucuggaugugcagcaacggcagccugcagugcagaaucugcaucuga

SEQ ID NO: 167746 - RNA, 1701 nt, Artificial Sequence; identical to SEQ ID NO: 165326
  derived and/or modified CDS sequence (opt4) from hemagglutinin__InfluenzaA__AEO01613

SEQ ID NO: 167747 - RNA, 1701 nt, Artificial Sequence
  derived and/or modified CDS sequence (opt4) from hemagglutinin__InfluenzaA__AEO01614
augaaggccauccugguggugcugcuguacaccuucgccaccgccaacgccgacacccugugcaucggcuaccacgccaacaacagcaccgacaccguggacaccgugcuggagaagaacgugaccgugacccacagcgugaaccugcuggaggacaagcacaacggcaagcugugcaagcugaagggcguggccccccugcaccugggcaagugcaacaucgccggcuggauccugggcaaccccgagugcgagagccugagcaccgccagcagcuggagcuacaucguggagaccagcagcagcgacaacggcaccugcuaccccggcgacuucaucgacuacgaggagcugagagagcagcugagcagcgugagcagcuucgagagauucgagaucuuccccaagaccagcagcuggcccaaccacgacagcaacaagggcgugaccgccgccugcccccacgccggcgccaagagcuucuacaagaaccugaucuggcuggugaagaagggcaacagcuaccccaagcugagcaagagcuacaucaacgacaagggcaaggaggugcuggugcuguggggcauccaccaccccagcaccagcgccgaccagcagagccuguaccagaacgccgacgccuacguguucgugggcaccagcagauacagcaagaaguucaagcccgagaucgccaucagacccaaggugagagaccaggagggcagaaugaacuacuacuggacccugguggagcccggcgacaagaucaccuucgaggccaccggcaaccugguggugcccagauacgccuucgccauggagagaaacgccggcagcggcaucaucaucagcgacacccccgugcacgacugcaacaccaccugccagacccccaagggcgccaucaacaccagccugcccuuccagaacauccaccccaucaccaucggcaagugccccaaguacgugaagagcaccaagcugagacuggccaccggccugagaaacauccccagcauccagagcagaggccuguucggcgccaucgccggcuucaucgagggcggcuggaccggcaugguggacggcugguacggcuaccaccaccagaacgagcagggcagcggcuacgccgccgaccugaagagcacccagaacgccaucgacgagaucaccaacaaggugaacagcgugaucgagaagaugaacacccaguucaccgccgugggcaaggaguucaaccaccuggagaagagaaucgagaaccugaacaagaagguggacgacggcuuccuggacaucuggaccuacaacgccgagcugcuggugcugcuggagaacgagagaacccuggacuaccacgacagcaacgugaagaaccuguacgagaaggugagaagccagcugaagaacaacgccaaggagaucggcaacggcugcuucgaguucuaccacaagugcgacaacaccugcauggagagcgugaagaacggcaccuacgacuaccccaaguacagcgaggaggccaagcugaacagagaggagaucgacggcgugaagcuggagagcaccagaaucuaccagauccuggccaucuacagcaccguggccagcagccuggugcugguggugagccugggcgccaucagcuucuggaugugcagcaacggcagccugcagugcagaaucugcaucuga

SEQ ID NO: 167748 - RNA, 1701 nt, Artificial Sequence
  derived and/or modified CDS sequence (opt4) from hemagglutinin__InfluenzaA__AEO01615
augaaggccauccugguggugcugcuguacaccuucgccaccgccaacgccgacacccugugcaucggcuaccacgccaacaacagcaccgacaccguggacaccgugcuggagaagaacgugaccgugacccacagcgugaaccugcuggaggacaagcacaacggcaagcugugcaagcugagaggcguggccccccugcaccugggcaagugcaacaucgccggcuggauccugggcaaccccgagugcgagagccugagcaccgccagcagcuggagcuacaucguggagaccagcagcagcgacaacggcaccugcuaccccggcgacuucaucgacuacgaggagcugagagagcagcugagcagcgugagcagcuucgagagauucgagaucuuccccaagaccagcagcuggcccaaccacgacagcaacaagggcgugaccgccgccugcccccacgccggcgccaagagcuucuacaagaaccugaucuggcuggugaagaagggcaacagcuaccccaagcugagcaaguacuacaucaacgacaagggcaaggaggugcuggugcuguggggcauccaccaccccagcaccagcgccgaccagcagagccuguaccagaacgccgacgccuacguguucgugggcaccagcagauacagcaagaaguucaagcccgagaucgccaucagacccaaggugagagagcaggagggcagaaugaacuacuacuggacccugguggagcccggcgacaagaucaccuucgaggccaccggcaaccugguggugcccagauacgccuucgccauggagagaaacgccggcagcggcaucaucaucagcgacacccccgugcacgacugcaacaccaccugccagacccccaagggcgccaucaacaccagccugcccuuccagaacauccaccccaucaccaucggcaagugccccaaguacgugaagagcaccaagcugagacuggccaccggccugagaaacgugcccagcauccagagcagaggccuguucggcgccaucgccggcuucaucgagggcggcuggaccggcaugguggacggcugguacggcuaccaccaccagaacgagcagggcagcggcuacgccgccgaccugaagagcacccagaacgccaucgacaagaucaccaacaaggugaacagcgugaucgagaagaugaacacccaguucaccgccgugggcaaggaguucaaccaccuggagaagagaaucgagaaccugaacaagaagguggacgacggcuuccuggacaucuggaccuacaacgccgagcugcuggugcugcuggagaacgagagaacccuggacuaccacgacagcaacgugaagaaccuguacgagaaggugagaagccagcugaagaacaacgccaaggagaucggcaacggcugcuucgaguucuaccacaagugcgacaacaccugcauggagagcgugaagaacggcaccuacgacuaccccaaguacagcgaggaggccaagcugaacagagaggagaucgacggcgugaagcuggagagcaccagaaucuaccagauccuggccaucuacagcaccguggccagcagccuggugcugguggugagccugggcgccaucagcuucuggaugugcagcaacggcagccugcagugcagaaucugcaucuga

SEQ ID NO: 167749 - RNA, 1701 nt, Artificial Sequence; identical to SEQ ID NO: 163082
  derived and/or modified CDS sequence (opt4) from hemagglutinin__InfluenzaA__AEO01616

SEQ ID NO: 167750 - RNA, 1701 nt, Artificial Sequence; identical to SEQ ID NO: 163893
  derived and/or modified CDS sequence (opt4) from hemagglutinin__InfluenzaA__AEO01617

SEQ ID NO: 167751 - RNA, 1701 nt, Artificial Sequence; identical to SEQ ID NO: 164326
  derived and/or modified CDS sequence (opt4) from hemagglutinin__InfluenzaA__AEO01619

SEQ ID NO: 167752 - RNA, 1701 nt, Artificial Sequence; identical to SEQ ID NO: 167438
  derived and/or modified CDS sequence (opt4) from hemagglutinin__InfluenzaA__AEO01620

SEQ ID NO: 167753 - RNA, 1701 nt, Artificial Sequence; identical to SEQ ID NO: 167585
  derived and/or modified CDS sequence (opt4) from hemagglutinin__InfluenzaA__AEO01621

SEQ ID NO: 167754 - RNA, 1701 nt, Artificial Sequence
  derived and/or modified CDS sequence (opt4) from hemagglutinin__InfluenzaA__AEO01625
augaagaccaucaucgcccugagcuacauccugugccuggugagcgcccagaagcugcccggcaacgacaacagcaccgccacccugugccugggccaccacgccgugcccaacggcaccaucgugaagaccaucaccaacgaccagaucgaggugaccaacgccaccgagcuggugcagagcagcagcaccggcgagaucugcgacagcccccaccaggugcuggacggcgagaacugcacccugaucgacgcccugcugggcgacccccagugcgacggcuuccagaacaagaagugggaccuguucguggagagaagcaaggccuacagcaacugcuaccccuacgacgugcccgacuacgccagccugagaagccugguggccagcagcggcacccuggaguucaacaacgagagcuucaacuggaccggcgugacccagaacggcaccagcagcgccugcaucagaagaagcaacaacagcuucuucagcagacugaacuggcugacccacagcaaguucaaguaccccgcccugaacgugaccaugcccaacaacgaggaguucgacaagcuguacaucuggggcgugcaccaccccggcaccgacaacgaccagaucuuccuguacgcccaggccagcggcagaaucaccgugagcaccaagagaagccagcagaccgugauccccaacaucggcagcagacccagagugagaaacauccccagcagaaucagcaucuacuggaccaucgugaagcccggcgacauccugcugaucaacagcaccggcaaccugaucgcccccagaggcuacuucaagaucagaagcggcaagagcagcaucaugagaagcgacgcccccaucggcaagugcaacagcgagugcaucacccccaacggcagcauccccaacgacaagcccuuccagaacgugaacagaaucaccuacggcgccugccccagauacgugaagcagaacacccugaagcuggccaccggcaugagaaacgugcccgagaagcagaccagaggcaucuucggcgccaucgccggcuucaucgagaacggcugggagggcaugguggacggcugguacggcuucagacaccagaacagcgagggcaucggccaggccgccgaccugaagagcacccaggccgccaucgaccagaucaacggcaagcugaacagacugaucggcaagaccaacgagaaguuccaccagaucgagaaggaguucagcgagguggagggcagaauccaggaccuggagaaguacguggaggacaccaagaucgaccuguggagcuacaacgccgagcugcugguggcccuggagaaccagcacaccaucgaccugaccgacagcgagaugaacaagcuguucgagaagaccaagaagcagcugagagagaacgccgaggacaugggcaacggcugcuucaagaucuaccacaagugcgacaacgccugcaucggcagcaucagaaacggcaccuacgaccacgagguguacagagacgaggcccugaacaacagauuccagaucaagggcguggagcugaagagcggcuacaaggacuggauccuguggaucagcuucgccaucagcugcuuccugcugugcguggcccugcugggcuucaucaugugggccugccagaagggcaacaucagaugcaacaucugcaucuga

SEQ ID NO: 167755 - RNA, 1701 nt, Artificial Sequence
  derived and/or modified CDS sequence (opt4) from hemagglutinin__InfluenzaA__AEO01636
augaagagcaucaucgcccugagcuacauccugugccuggugagcgcccagaagcugcccggcaacgacaacagcaccgccacccugugccugggccaccacgccgugcccaacggcaccaucgugaagaccaucaccaacgaccagaucgaggugaccaacgccaccgagcuggugcagagcagcagcaccggcgagaucugcgacagcccccaccaggugcuggacggcgagaacugcacccugaucgacgcccugcugggcgacccccagugcgacggcuuccagaacaagaagugggaccuguucguggagagaagcaaggccuacagcaacugcuaccccuacgacgugcccgacuacgccagccugagaagccugguggccagcagcggcacccuggaguucaacaacgagagcuucaacuggaccggcgugacccagaacggcaccagcagcgccugcaucagaagaagcaacaacagcuucuucagcagacugaacuggcugacccacagcaaguucaaguaccccgcccugaacgugaccaugcccaacaacgaggaguucgacaagcuguacaucuggggcgugcaccaccccggcaccgacaacgaccagaucuuccuguacgcccaggccagcggcagaaucaccgugagcaccaagagaagccagcagaccgugauccccaacaucggcagcagacccagagugagaaacauccccagcagaaucagcaucuacuggaccaucgugaagcccggcgacauccugcugaucaacagcaccggcaaccugaucgcccccagaggcuacuucaagaucagaagcggcaagagcagcaucaugagaagcgacgcccccaucggcaagugcaacagcgagugcaucacccccaacggcagcauccccaacgacaagcccuuccagaacgugaacagaaucaccuacggcgccugccccagauacgugaagcagaacacccugaagcuggccaccggcaugagaaacgugcccgagaagcagaccagaggcaucuucggcgccaucgccggcuucaucgagaacggcugggagggcaugguggacggcugguacggcuucagacaccagaacagcgagggcaucggccaggccgccgaccugaagagcacccaggccgccaucgaccagaucaacggcaagcugaacagacugaucggcaagaccaacgagaaguuccaccagaucgagaaggaguucagcgagguggagggcagaauccaggaccuggagaaguacguggaggacaccaagaucgaccuguggagcuacaacgccgagcugcugguggcccuggagaaccagcacaccaucgaccugaccgacagcgagaugaacaagcuguucgagaagaccaagaagcagcugagagagaacgccgaggacaugggcaacggcugcuucaagaucuaccacaagugcgacaacgccugcaucggcagcaucagaaacggcaccuacgaccacgacguguacagagacgaggcccugaacaacagauuccagaucaagggcguggagcugaagagcggcuacaaggacuggauccuguggaucagcuucgccaucagcugcuuccugcugugcguggcccugcugggcuucaucaugugggccugccagaagggcaacaucagaugcaacaucugcaucuga

SEQ ID NO: 167756 - RNA, 1701 nt, Artificial Sequence
  derived and/or modified CDS sequence (opt4) from hemagglutinin__InfluenzaA__AEO01642
augaagaccaucaucgcccugagcuacauccugugccuggugagcgcccagaagcugcccggcaacgacaacagcaccgccacccugugccugggccaccacgccgugcccaacggcaccaucgugaagaccaucaccaacgaccagaucgaggugaccaacgccaccgagcuggugcagagcagcagcaccggcgagaucugcaacagcccccaccagauccuggacggcgagaacugcacccugaucgacgcccugcugggcgacccccagugcgacggcuuccagaacaagaagugggaccuguucguggagagaagcaaggccuacagcaacugcuaccccuacgacgugcccgacuacgccagccugagaagccugguggccagcagcggcacccuggaguucaacaacgagagcuucaacuggaccggcgugacccagaacggcaccagcagcgccugcaucagaagaagcaacaacagcuucuucagcagacugaacuggcugacccaccugaaguucaaguaccccgcccugaacgugaccaugcccaacaacgaggaguucgacaagcuguacaucuggggcgugcaccaccccggcaccgacaacgaccagaucuuccuguacgcccaggccagcggcagaaucaccgugagcaccaagagaagccagcagaccgugauccccaacaucggcagcagacccagagugagaaacauccccagcagaaucagcaucuacuggaccaucgugaagcccggcgacauccugcugaucaacagcaccggcaaccugaucgcccccagaggcuacuucaagaucagaagcggcaagagcagcaucaugagaagcgacgcccccaucggcaagugcaacagcaagugcaucacccccaacggcagcauccccaacgacaagcccuuccagaacgugaacagagugaccuacggcgccugccccagauacgugaagcagaacacccugaagcuggccaccggcaugagaaacgugcccgagaagcagaccagaggcaucuucggcgccaucgccggcuucaucgagaacggcugggagggcaugguggacggcugguacggcuucagacaccagaacagcgagggcaucggccaggccgccgaccugaagagcacccaggccgccaucgaccagaucaacggcaagcugaacagacugaucggcaagaccaacgagaaguuccaccagaucgagaaggaguucagcgagguggagggcagaauccaggaccuggagaaguacguggaggacaccaagaucgaccuguggagcuacaacgccgagcugcugguggcccuggagaaccagcacaccaucgaccugaccgacagcgagaugaacaagcuguucgagaagaccaagaagcagcugagagagaacgccgaggacaugggcaacggcugcuucaagaucuaccacaagugcgacaacgccugcaucggcagcaucagaaacggcaccuacgaccacgacguguacagagacgaggcccugaacaacagauuccagaucaagggcguggagcugaagagcggcuacaaggacuggauccuguggaucagcuucgccaucagcugcuuccugcugugcguggcccugcugggcuucaucaugugggccugccagaagggcaacaucagaugcaacaucugcaucuga

SEQ ID NO: 167757 - RNA, 1698 nt, Artificial Sequence
  derived and/or modified CDS sequence (opt4) from hemagglutinin__InfluenzaA__AEO01663
augaaggugaagcugcuggugcugcugugcaccuucgccgccaccuacgccgacaccaucugcaucggcuaccacgccaacaacagcaccgacaccguggacaccgugcuggagaagaacgugaccgugacccacagcgugaaccugcuggagaacagccacaacggcaagcugugccugcugaagggcaucgccccccugcagcugggcaacugcagcguggccggcuggauccugggcaaccccgagugcgagcugcugaucagcaaggagagcuggagcuacaucguggagaagcccaaccccgagaacggcaccugcuaccccggccacuucgccgacuacgaggagcugagagagcagcugagcagcgugagcagcuucgagagauucgagaucuuccccaaggagagcagcuggcccaaccacaccgugaccggcgugagcgccagcugcagccacaacggcgagagcagcuucuacagaaaccugcuguggcugaccggcaagaacggccuguaccccaaccugagcaagagcuacgccaacaacaaggagaaggaggugcuggugcuguggggcgugcaccacccccccaacaucggcgaccagaaggcccuguaccacaccgagaacgccuacgugagcguggugagcagccacuacagcagaaaguucacccccgagaucgccaagagacccaaggugagagaccaggagggcagaaucaacuacuacuggacccugcuggagcccggcgacaccaucaucuucgaggccaacggcaaccugagagcccccagauacgccuucgcccugagcagaggcuucggcagcggcaucaucaacagcaacgcccccauggacaagugcgacgccaagugccagaccccccagggcgccaucaacagcagccugcccuuccagaacgugcaccccgugcccaucggcgagugccccaaguacgugagaagcgccaagcugagaauggugaccggccugagaaacauccccagcauccagagcagaggccuguucggcgccaucgccggcuucaucgagggcggcuggaccggcaugguggacggcugguacggcuaccaccaccagaacgagcagggcagcggcuacgccgccgaccagaagagcacccagaacgccaucaacggcaucaccaacaaggugaacagcgugaucgagaagaugaacacccaguucaccgccgugggcaaggaguucaacaagcuggagagaagaauggagaaccugaacaagaagguggacgacggcuucaucgacaucuggaccuacaacgccgagcugcuggugcugcuggagaacgagagaacccuggacuuccacgacagcaacgugaagaaccuguacgagaaggugaagagccagcugaagaacaacgccaaggagaucggcaacggcugcuucgaguucuaccacaagugcaacgacgagugcauggagagcgugaagaacggcaccuacgacuaccccaaguacagcgaggagagcaagcugaacagagagaagaucgacggcgugagacuggagagcaugggcguguaccagauccuggccaucuacagcaccguggccagcagccuggugcugcuggugagccugggcgccaucagcuucuggaugugcagcaacggcagccugcagugcagaaucugcaucuga

SEQ ID NO: 167758 - RNA, 1698 nt, Artificial Sequence
  derived and/or modified CDS sequence (opt4) from hemagglutinin__InfluenzaA__AEO01674
augaaggugaagcugcuggugcugcugugcaccuucaccgccaccuacgccgacaccaucugcaucggcuaccacgccaacaacagcaccgacaccguggacaccgugcuggagaagaacgugaccgugacccacagcgugaaccugcuggagaacagccacaacggcaagcugugccugcugaagggcaucgccccccugcagcugggcaacugcagcguggccggcuggauccugggcaaccccgagugcgagcugcugaucagcaaggagagcuggagcuacaucguggagaagcccaaccccgagaacggcaccugcuaccccggccacuucgccgacuacgaggagcugagagagcagcugagcagcgugagcagcuucgagagauucgagaucuuccccaaggagagcagcuggcccaaccacaccgugaccggcgugagcgccagcugcagccacaacggcgagagcagcuucuacagaaaccugcuguggcugaccggcaagaacggccuguaccccaaccugagcaagagcuacgccaacaacaaggagaaggaggugcuggugcuguggggcgugcaccacccccccaacaucggcgaccagaaggcccuguaccacaccgagaacgccuacgugagcguggugagcagccacuacagcagaaaguucacccccgagaucgccaagagacccaaggugagagaccaggagggcagaaucaacuacuacuggacccugcuggagcccggcgacaccaucaucuucgaggccaacgagaaccugaaggcccccagauacgccuucgcccugagcagaggcuucggcagcggcaucaucaacagcaaggcccccauggacaagugcgacgccaagugccagaccccccagggcgccaucaacagcagccugcccuuccagaacgugcaccccgugaccaucggcgagugccccaaguacgugagaagcgccaagcugagaauggugaccggccugagaaacauccccagcauccagagcagaggccuguucggcgccaucgccggcuucaucgagggcggcuggaccggcaugguggacggcugguacggcuaccaccaccagaacgagcagggcagcggcuacgccgccgaccagaagagcacccagaacgccaucaacggcaucaccaacaaggugaacagcgugaucgagaagaugaacacccaguucaccgccgugggcaaggaguucaacaagcuggagagaagaauggagaaccugaacaagaagguggacgacggcuucaucgacaucuggaccuacaacgccgagcugcuggugcugcuggagaacgagagaacccuggacuuccacgacagcaacgugaagaaccuguacgagaaggugaagagccagcugaagaacaacgccaaggagaucggcaacggcugcuucgaguucuaccacaagugcaacgacgagugcauggagagcgugaagaacggcaccuacgacuaccccaaguacagcgaggagagcaagcugaacagagagaagaucgacggcgugagacuggagagcaugggcguguaccagauccuggccaucuacagcaccguggccagcagccuggugcugcuggugagccugggcgccaucagcuucuggaugugcagcaacggcagccugcagugcagaaucugcaucuga

SEQ ID NO: 167759 - RNA, 1701 nt, Artificial Sequence; identical to SEQ ID NO: 167754
  derived and/or modified CDS sequence (opt4) from hemagglutinin__InfluenzaA__AEO01691

SEQ ID NO: 167760 - RNA, 1698 nt, Artificial Sequence
  derived and/or modified CDS sequence (opt4) from hemagglutinin__InfluenzaA__AEO01699
augaaggugaagcugcuggugcugcugugcaccuucaccgccaccuacgccgacaccaucugcaucggcuaccacgccaacaacagcaccgacaccguggacaccgugcuggagaagaacgugaccgugacccacagcgugaaccugcuggagaacagccacaacggcaagcugugccugcugaagggcaucgccccccugcagcugggcaacugcagcguggccggcuggauccugggcaaccccgagugcgagcugcugaucagcaaggagagcuggagcuacaucguggagaagcccaaccccgagaacggcaccugcuaccccggccacuucgccgacuacgaggagcugagagagcagcugagcagcgugagcagcuucgagagauucgagaucuuccccaaggagagcagcuggcccaaccacaccgugaccggcgugagcgccagcugcagccacaacggcgagagcagcuucuacagaaaccugcuguggcugaccggcaagaacggccuguaccccaaccugagcaagagcuacgccaacaacaaggagaaggaggugcuggugcuguggggcgugcaccacccccccaacaucggcgaccagaaggcccuguaccacaccgagaacgccuacgugagcguggugagcagccacuacagcagaaaguucacccccgagaucgccaagagacccaaggugagagaccaggagggcagaaucaacuacuacuggacccugcuggagcccagagacaccaucaucuucgaggccaacggcaaccugaucgcccccagauacgccuucgcccugagcagaggcuucggcagcggcaucaucaacagcaacgcccccauggacaagugcgacgccaagugccagaccccccagggcgccaucaacagcagccugcccuuccagaacgugcaccccgugaccaucggcgagugccccaaguacgugagaagcgccaagcugagaauggugaccggccugagaaacauccccagcauccccagcagaggccuguucggcgccaucgccggcuucaucgagggcggcuggaccggcaugguggacggcugguacggcuaccaccaccagaacgagcagggcagcggcuacgccgccgaccagaagagcacccagaacgccaucaacggcaucaccaacaaggugaacagcgugaucgagaagaugaacacccaguucaccgccgugggcaaggaguucaacaagcuggagagaagaauggagaaccugaacaagaagguggacgacggcuucaucgacaucuggaccuacaacgccgagcugcuggugcugcuggagaacgagagaacccuggacuuccacgacagcaacgugaagaaccuguacgagaaggugaagagccagcugaagaacaacgccaaggagaucggcaacggcugcuucgaguucuaccacaagugcaacgacgagugcauggagagcgugaagaacggcaccuacgacuaccccaaguacagcgaggagagcaagcugaacagagagaagaucgacggcgugaagcuggagagcaugggcgccuaccagauccuggccaucuacagcaccggcgccagcagccuggugcugcuggugagccugggcgccaucagcuucuggaugugcagcaacggcagccugcagagaagaaucugcaucuga

SEQ ID NO: 167761 - RNA, 1698 nt, Artificial Sequence
  derived and/or modified CDS sequence (opt4) from hemagglutinin__InfluenzaA__AEO01709
augaaggugaagcugcuggugcugcugugcaccuucaccgccaccuacgccgacaccaucugcaucggcuaccacgccaacaacagcaccgacaccguggacaccgugcuggagaagaacgugaccgugacccacagcgugaaccugcuggagaacagccacaacggcaagcugugccugcugaagggcaucgccccccugcagcugggcaacugcagcguggccggcuggauccugggcaaccccgagugcgagcugcugaucagcaaggagagcuggagcuacaucguggagaagcccaaccccgagaacggcaccugcuaccccggccacuucgccgacuacgaggagcugagagagcagcugagcagcgugagcagcuucgagagauucgagaucuuccccaaggagagcagcuggcccaaccacaccgugaccggcgugagcgccagcugcagccacaacggcgagagcagcuucuacagaaaccugcuguggcugaccggcaagaacggccuguaccccaaccugagcaagagcuacgccaacaacaaggagaaggaggugcuggugcuguggggcgugcaccacccccccaacaucggcgaccagaaggcccuguaccacaccgagaacgccuacgugagcguggugagcagccacuacagcagaaaguucacccccgagaucgccaagagacccaagcugagagaccaggacggcagaaucaacuacuacuggacccugcuggagcccggcgacaccaccaucuucgaggccaacggcaaccugaucgcccccagauacgccuucgcccugagcagaggcuucggcagcggcaucaucaacagcaacgcccccauggacaagugcgacgccaagugccagaccccccagggcgccaucaacagcagccugcccuuccagaacgugcaccccgugaccaucggcgagugccccaaguacgugagaagcgccaagcugagaauggugaccggccugagaaacauccccagcauccagagcagaggccuguucggcgccaucgccggcuucaucgagggcggcuggaccggcaugguggacggcugguacggcuaccaccaccagaacgagcagggcagcggcuacgccgccgaccagaagagcacccagaacgccaucaacggcaucaccaacaaggugaacagcgugaucgagaagaugaacacccaguucaccgccgugggcaaggaguucaacaagcuggagagaagaauggagaaccugaacaagaagguggacgacggcuucaucgacaucuggaccuacaacgccgagcugcuggugcugcuggagaacgagagaacccuggacuuccacgacagcaacgugaagaaccuguacgagaaggugaagagccagcugaagaacaacgccaaggagaucggcaacggcugcuucgagcuguaccugaagugcaacggcgagugcauggagagcgugaagaacggcaccuacgacuaccccaaguacagcgaggagagcaagcugaacagagagaagaucgacggcgugaagcuggagagcaugggcguguaccagauccuggccaucuacagcaccguggccagcagccuggugcugcuggugagccugggcgccaucagcuucuggaugugcagcaacggcagccugcagugcagaaucugcaucuga

SEQ ID NO: 167762 - RNA, 1701 nt, Artificial Sequence; identical to SEQ ID NO: 163893
  derived and/or modified CDS sequence (opt4) from hemagglutinin__InfluenzaA__AEO37530

SEQ ID NO: 167763 - RNA, 1701 nt, Artificial Sequence
  derived and/or modified CDS sequence (opt4) from hemagglutinin__InfluenzaA__AEO72176
augaaggccauccugguggugcugcuguacaccuucgccaccgccaacgccgacacccugugcaucggcuaccacgccaacaacagcaccgacaccguggacaccgugcuggagaagaacgugaccgugacccacagcgugaaccugcuggaggacaagcacaacggcaagcugugcaagcugagaggcguggccccccugcaccugggcaagugcaacaucgccggcuggauccugggcaaccccgagugcgagagccugagcaccgccagcagcuggagcuacaucguggagaccagcagcagcgacaacggcaccugcuaccccggcgacuucaucgacuacgaggagcugagagagcagcugagcagcgugagcagcuucgagagauucgagaucuuccccaagaccagcagcuggcccaaccacgacagcaacaagggcgugaccgccgccugcccccacgccggcgccaagagcuucuacaagaaccugaucuggcuggugaagaagggcaacagcuaccccaagcugagcaagagcuacaucaacgacaagggcaaggaggugcuggugcuguggggcauccaccaccccagcaccaccgccgaccagcagagccuguaccagaacgccgacaccuacguguucgugggcaccagcagauacagcaagaaguucaagcccgagaucgccaucagacccaaggugagagaccaggagggcagaaugaacuacuacuggacccugguggagcccggcgacaagaucaccuucgaggccaccggcaaccugguggugcccagauacgccuucgccauggagagaaacgccggcagcggcaucaucaucagcgacacccccgugcacgacugcaacaccaccugccagacccccaagggcgccaucaacaccagccugcccuuccagaacauccaccccaucaccaucggcaagugccccaaguacgugaagagcaccaagcugagacuggccaccggccugagaaacgugcccagcauccagagcagaggccuguucggcgccaucgccggcuucaucgagggcggcuggaccggcaugguggacggcugguacggcuaccaccaccagaacgagcagggcagcggcuacgccgccgaccugaagagcacccagaacgccaucgacaagaucaccaacaaggugaacagcgugaucgagaagaugaacacccaguucaccgccgugggcaaggaguucaaccaccuggagaagagaaucgagaaccugaacaagaagguggacgacggcuuccuggacaucuggaccuacaacgccgagcugcuggugcugcuggagaacgagagaacccuggacuaccacgacagcaacgugaagaaccuguacgagaaggugagaaaccagcugaagaacaacgccaaggagaucggcaacggcugcuucgaguucuaccacaagugcgacaacaccugcauggagagcgugaagaacggcaccuacgacuaccccaaguacagcgaggaggccaagcugaacagagaggagaucgacggcgugaagcuggagagcaccagaaucuaccagauccuggccaucuacagcaccguggccagcagccuggugcuggccgugagccugggcgccaucagcuucuggaugugcagcaacggcagccugcagugcagaaucugcaucuga

SEQ ID NO: 167764 - RNA, 1704 nt, Artificial Sequence
  derived and/or modified CDS sequence (opt4) from hemagglutinin__InfluenzaA__AEO88980
auggagaagaucgugcugcugcuggccaucgugagccuggugaagagcgaccagaucugcaucggcuaccacgccaacaacagcaccgagcagguggacaccaucauggagaagaacgugaccgugacccacgcccaggacauccuggagaagacccacaacggcaagcugugcgaccuggacggcgugaagccccugauccugagagacugcagcguggccggcuggcugcugggcaaccccaugugcgacgaguucaucaacgugcccgaguggagcuacaucguggagaaggccaaccccgccaacgaccugugcuaccccggcaacuucaacgacuacgaggagcugaagcaccugcugagcagaaucaaccacuucgagaagauccagaucauccccaagagcagcuggagcgaccacgaggccagcagcggcgugagcagcgccugccccuaccagggcacccccagcuucuucagaaacgugguguggcugaucaagaagaacaacaccuaccccaccaucaagagaagcuacaacaacaccaaccaggaggaccugcugauccuguggggcauccaccacagcaacgacgccgccgagcagaccaagcuguaccagaaccccaccaccuacaucagcgugggcaccagcacccugaaccagagacuggugcccaagaucgccaccagaagcaaggugaacggccagagcggcagaauggacuucuucuggaccauccugaagcccaacgacgccaucaacuucgagagcaacggcaacuucaucgcccccgaguacgccuacaagaucgugaagaagggcgacagcgccaucaugaagagcgagguggaguacggcaacugcaacaccaagugccagacccccaucggcgccaucaacagcagcaugcccuuccacaacauccacccccugaccaucggcgagugccccaaguacgugaagagcaacaagcuggugcuggccaccggccugagaaacagcccccugagagagagaagaagaaagagaggccuguucggcgccaucgccggcuucaucgagggcggcuggcagggcaugguggacggcugguacggcuaccaccacagcaacgagcagggcagcggcuacgccgccgacaaggagagcacccagaaggccaucgacggcgugaccaacaaggugaacagcaucaucgacaagaugaacacccaguucgaggccgugggcagagaguucaacaaccuggagagaagaaucgagaaccugaacaagaagauggaggacggcuuccuggacguguggaccuacaacgccgagcugcuggugcugauggagaacgagagaacccuggacuuccacgacagcaacgugaagaaccuguacgacaaggugagacugcagcugagagacaacgccaaggagcugggcaacggcugcuucgaguucuaccacaagugcgacaacgagugcauggagagcgugagaaacggcaccuacgacuacccccaguacagcgaggaggccagacugaagagagaggagaucagcggcgugaagcuggagagcaucggcaccuaccagauccugagcaucuacagcaccguggccagcagccuggcccuggccaucaugguggccggccugagccuguggaugugcagcaacggcagccugcagugcagaaucugcaucuga

SEQ ID NO: 167765 - RNA, 1704 nt, Artificial Sequence
  derived and/or modified CDS sequence (opt4) from hemagglutinin__InfluenzaA__AEO89021
auggagaagaucgugcugcugcuggccaucgugagccuggugaagagcgaccagaucugcaucggcuaccacgccaacaacagcaccgagcagguggacaccaucauggagaagaacgugaccgugacccacgcccaggacauccuggagaagacccacaacggcaagcugugcgaccuggacggcgugaagccccugauccugagagacugcagcguggccggcuggcugcugggcaaccccaugugcgacgaguucaucaacgugcccgaguggagcuacaucguggagaaggccaaccccgccaacgaccugugcuaccccggcaacuucaacgacuacgaggagcugaagcaccugcugagcagaaucaaccacuucgagaagauccccaucauccccaagagcagcuggagcgaccacgaggccagcagcggcgugagcagcgccugccccuaccagggcacccccagcuucuucagaaacgugguguggcugaucaagaagaacaacaccuaccccaccaucaagagaagcuacaacaacaccaaccaggaggaccugcugauccuguggggcauccaccacagcaacaacgccgccgagcagaccaagcuguaccagaaccccaccaccuacaucagcgugggcaccagcacccugaaccugagacuggugcccaagaucgccaccagaagcaaggugaacggccagagcggcagaauggacuucuucuggaccauccugaagcccaacgacgccaucaacuucgagagcaacggcaacuucaucgcccccgaguacgccuacaagaucgugaagaagggcgacagcgccaucaugaagagcgagguggaguacggcaacugcaacaccaagugccagacccccaucggcgccaucaacagcagcaugcccuuccacaacauccacccccugaccaucggcgagugccccaaguacgugaagagcaacaagcuggugcuggccaccggccugagaaacagcccccugagagagagaagaagaaagagaggccuguucggcgccaucgccggcuucaucgagggcggcuggcagggcaugguggacggcugguacggcuaccaccacagcaacgagcagggcagcggcuacgccgccgacaaggagagcacccagaaggccaucgacggcgugaccaacaaggugaacagcaucaucgacaagaugaacacccaguucgaggccgugggcagagaguucaacaaccuggagagaagaaucgagaaccugaacaagaagauggaggacggcuuccuggacguguggaccuacaacgccgagcugcuggugcugauggagaacgagagaacccuggacuuccacgacagcaacgugaagaaccuguacgacaaggugagacugcagcugagagacaacgccaaggagcugggcaacggcugcuucgaguucuaccacaagugcgacaacgagugcauggagagcgugagaaacggcaccuacgacuacccccaguacagcgaggaggccagacugaagagagaggagaucagcggcgugaagcuggagagcaucggcaccuaccagauccugagcaucuacagcaccguggccagcagccuggcccuggccaucaugguggccggccugagccuguggaugugcagcaacggcagccugcagugcagaaucugcaucuga

SEQ ID NO: 167766 - RNA, 1704 nt, Artificial Sequence
  derived and/or modified CDS sequence (opt4) from hemagglutinin__InfluenzaA__AEO89030
auggagaagaucgugcugcugcuggccaucgugagccuggugaagagcgaccagaucugcaucggcuaccacgccaacaacagcaccgagcagguggacaccaucauggagaagaacgugaccgugacccacgcccaggacauccuggagaagacccacaacggcaagcugugcgaccuggacggcgugaagccccugauccugagagacugcagcguggccggcuggcugcugggcaaccccaugugcgacgaguucaucaacgugcccgaguggagcuacaucguggagaaggccaaccccgccaacgaccugugcuaccccggcaacuucaacgacuacgaggagcugaagcaccugcugagcagaaucaaccacuucgagaagauccagaucauccccaagagcagcuggagcgaccacgaggccagcagcggcgugagcagcgugugccccuaccagggcacccccagcuucuucagaaacgugguguggcugaucaagaagaacaacaccuaccccaccaucaagagaagcuacaacaacaccaaccaggaggaccugcugauccuguggggcauccaccacagcaacgacgccgccgagcagaccaagcuguaccagaaccccaccaccuacaucagcgugggcaccagcacccugaaccagagacuggugcccaagaucgccaccagaagcaaggugaacggccagagcggcagaauggacuucuucuggaccgugcugaagcccaacgacgccaucaacuucgagagcaacggcaacuucaucgcccccgaguacgccuacaagaucgugaagaagggcgacagcgccaucaugaagagcgagguggaguacggcaacugcaacaccaagugccagacccccaucggcgccaucaacagcagcaugcccuuccacaacauccacccccugaccaucggcgagugccccaaguacgugaagagcaacaagcuggugcuggccaccggccugagaaacagcccccugagagagagaagaagaaagagaggccuguucggcgccaucgccggcuucaucgagggcggcuggcagggcaugguggacggcugguacggcuaccaccacagcaacgagcagggcagcggcuacgccgccgacaaggagagcacccagaaggccaucgacggcgugaccaacaaggugaacagcaucaucgacaagaugaacacccaguucgaggccgugggcagagaguucaacaaccuggagagaagaaucgagaaccugaacaagaagauggaggacggcuuccuggacguguggaccuacaacgccgagcugcuggugcugauggagaacgagagaacccuggacuuccacgacagcaacgugaagaaccuguacgacaaggugagacugcagcugagagacaacgccaaggagcugggcaacggcugcuucgaguucuaccacaagugcgacaacgagugcauggagagcgugagaaacggcaccuacgacuacccccaguacagcgaggaggccagacugaagagagaggagaucagcggcgugaagcuggagagcaucggcaccuaccagauccugagcaucuacagcaccguggccagcagccuggcccuggccaucaugguggccggccugagccuguggaugugcagcaacggcagccugcagugcagaaucugcaucuga

SEQ ID NO: 167767 - RNA, 1704 nt, Artificial Sequence
  derived and/or modified CDS sequence (opt4) from hemagglutinin__InfluenzaA__AEO89048
auggagaagaucguguuccugcuggccaucgugagccuggugaagagcgaccagaucugcaucggcuaccacgccaacaacagcaccgagcagguggacaccaucauggagaagaacgugaccgugacccacgcccaggacauccuggagaagacccacaacggcaagcugugcgaccuggacggcgugaagccccugauccugagagacugcagcguggccggcuggcugcugggcaaccccaugugcgacgaguucaucaacgugcccgaguggagcuacaucguggagaaggccaaccccgccaacgaccugugcuaccccggcaacuucaacgacuacgaggagcugaagcaccugcugagcagaaucaaccacuucgagaagauccagaucauccccaagagcagcuggagcgaccacgaggccagcagcggcgugagcagcgccugccccuaccagggcacccccagcuucuucagaaacgugaucuggcugaucaagaagaacaacaccuaccccaccaucaagagaagcuacaacaacaccaaccaggaggaccugcugauccuguggggcauccaccacagcaacgacgccgccgagcagaccaagcuguaccagaaccccaccaccuacaucagcgugggcaccagcacccugaaccagagacuggugcccaagaucgccaccagaagcaaggugaacggccagagcggcagaauggacuucuucuggaccauccugaagcccaacgacgccaucaacuucgagagcaacggcaacuucaucgcccccgaguacgccuacaagaucgugaagaagggcgacagcgccauccugaagagcgagguggaguacggcaacugcaacaccaagugccagacccccaucggcgccaucaacagcagcaugcccuuccacaacauccacccccugaccaucggcgagugccccaaguacgugaagagcaacaagcuggugcuggccaccggccugagaaacagcccccugagagagagaagaagaaagagaggccuguucggcgccaucgccggcuucaucgagggcggcuggcagggcaugguggacggcugguacggcuaccaccacagcaacgagcagggcagcggcuacgccgccgacaaggagagcacccagaaggccaucgacggcgugaccaacaaggugaacagcaucaucgacaagaugaacacccaguucgaggccgugggcagagaguucaacaaccuggagagaagaaucgagaaccugaacaagaagauggaggacggcuuccuggacguguggaccuacaacgccgagcugcuggugcugauggagaacgagagaacccuggacuuccacgacagcaacgugaagaaccuguacgacaaggugagacugcagcugagagacaacgccaaggagcugggcaacggcugcuucgaguucuaccacaagugcgacaacgagugcauggagagcgugagaaacggcaccuacgacuacccccaguacagcgaggaggccagacugaagagagaggagaucagcggcgugaagcuggagagcaucggcaccuaccagauccugagcaucuacagcaccguggccagcagccuggcccuggccaucaugguggccggccugagccuguggaugugcagcaacggcagccugcagugcagaaucugcaucuga

SEQ ID NO: 167768 - RNA, 1704 nt, Artificial Sequence
  derived and/or modified CDS sequence (opt4) from hemagglutinin__InfluenzaA__AEO89065
auggagaagaucgugcugcugcuggccaucgugagccuggugaagagcgaccagaucugcaucggcuaccacgccaacaacagcaccgagcagguggacaccaucauggagaagaacgugaccgugacccacgcccaggacauccuggagaagacccacaacggcaagcugugcgaccuggacggcgugaagccccugauccugagagacugcagcguggccggcuggcugcugggcaaccccaugugcgacgaguucaucaacgugcccgaguggagcuacaucguggagaaggccaaccccgccaacgaccugugcuaccccggcaacuucaacgacuacgaggagcugaagcaccugcugagcagaaucaaccacuucgagaagauccagaucauccccaagagcagcuggagcgaccacgaggccagcagcggcgugagcagcgugugccccuaccagggcacccccagcuucuucagaaacgugguguggcugaucaagaagaacaacaccuaccccaccaucaagagaagcuacaacaacaccaaccaggaggaccugcugauccuguggggcauccaccacagcaacgacgccgccgagcagaccaagcuguaccagaaccccaccaccuacaucagcgugggcaccagcacccugaaccugagacuggugcccaagaucgccaccagaagcaaggugaacggccagagcggcagaauggacuucuucuggaccauccugaagcccagcgacgccaucaacuucgagagcaacggcaacuucaucgcccccgaguacgccuacaagaucgugaagaagggcgacagcgccaucaugaagagcgagguggaguacggcaacugcaacaccaagugccagacccccaucggcgccaucaacagcagcaugcccuuccacaacauccacccccugaccaucggcgagugccccaaguacgugaagagcaacaagcuggugcuggccaccggccugagaaacagcccccugagagagagaagaagaaagagaggccuguucggcgccaucgccggcuucaucgagggcggcuggcagggcaugguggacggcugguacggcuaccaccacagcaacgagcagggcagcggcuacgccgccgacaaggagagcacccagaaggccaucgacggcgugaccaacaaggugaacagcaucaucgacaagaugaacacccaguucgaggccgugggcagagaguucaacaaccuggagagaagaaucgagaaccugaacaagaagauggaggacggcuuccuggacguguggaccuacaacgccgagcugcuggugcugauggagaacgagagaacccuggacuuccacgacagcaacgugaagaaccuguacgacaaggugagacugcagcugagagacaacgccaaggagcugggcaacggcugcuucgaguucuaccacaagugcgacaacgagugcauggagagcgugagaaacggcaccuacgacuacccccaguacagcgaggaggccagacugaagagagaggagaucagcggcgugaagcuggagagcaucggcaccuaccagauccugagcaucuacagcaccguggccagcagccuggcccuggccaucaugguggccggccugagccuguggaugugcagcaacggcagccugcagugcagaaucugcaucuga

SEQ ID NO: 167769 - RNA, 1704 nt, Artificial Sequence
  derived and/or modified CDS sequence (opt4) from hemagglutinin__InfluenzaA__AEO89082
auggagaagaucgugcugcugcuggccaucgugagccuggugaagagcgaccagaucugcaucggcuaccacgccaacaacagcaccgagcagguggacaccaucauggagaagaacgugaccgugacccacgcccaggacauccuggagaagacccacaacggcaagcugugcgaccuggacggcgugaagccccugauccugagagacugcagcguggccggcuggcugcugggcaaccccaugugcgacgaguucaucaacgugcccgaguggagcuacaucguggagaaggccaaccccgccaacgaccugugcuaccccggcaacuucaacgacuacgaggagcugaagcaccugcugagcagaaucaaccacuucgagaagauccagaucauccccaagagcagcuggagcgaccacgacaccagcagcggcgugagcagcgccugccccuaccagggcacccccagcuucuucagaaacgugguguggcugaucaagaagaacaacaccuaccccaccaucaagagaagcuacaacaacaccaacaaggaggaccugcugauccuguggggcauccaccacagcaacgacgccgccgagcagaccaagcuguaccagaaccccaccaccuacaucagcgugggcaccagcacccugaaccagagacuggugcccaagaucgccaccagaagcaaggugaacggccagagcggcagaauggacuucuucuggaccauccugaagcccaacgacgccaucaacuucgagagcaacggcaacuucaucgcccccgaguacgccuacaagaucgugaagaagggcgacagcgccaucaugaagagcgagguggaguacggcaacugcaacaccaagugccagacccccaucggcgccaucaacagcagcaugcccuuccacaacauccacccccugaccaucggcgagugccccaaguacgugaagagcaacaagcuggugcuggccaccggccugagaaacagcccccugagagagagaagaagaaagagaggccuguucggcgccaucgccggcuucaucgagggcggcuggcagggcaugguggacggcugguacggcuaccaccacagcaacgagcagggcagcggcuacgccgccgacaaggagagcacccagaaggccaucgacggcgugaccaacaaggugaacagcaucaucgacaagaugaacacccaguucgaggccgugggcagagaguucaacaaccuggagagaagaaucgagaaccugaacaagaagauggaggacggcuuccuggacguguggaccuacaacgccgagcugcuggugcugauggagaacgagagaacccuggacuuccacgacagcaacgugaagaaccuguacgacaaggugagacugcagcugagagacaacgccaaggagcugggcaacggcugcuucgaguucuaccacaagugcgacaacgagugcauggagagcgugagaaacggcaccuacgacuacccccaguacagcgaggaggccagacugaagagagaggagaucagcggcgugaagcuggagagcaucggcaccuaccagauccugagcaucuacagcaccguggccagcagccuggcccuggccaucaugguggccggccugagccuguggaugugcagcaacggcagccugcagugcagaaucugcaucuga

SEQ ID NO: 167770 - RNA, 1704 nt, Artificial Sequence
  derived and/or modified CDS sequence (opt4) from hemagglutinin__InfluenzaA__AEO89091
auggagaagaccguguuccugcuggccaucgugagccuggugaagagcgaccagaucugcaucggcuaccacgccaacaacagcaccgagcagguggacaccaucauggagaagaacgugaccgugacccacgcccagaacauccuggagaagacccacaacggcaagcugugcgacaucgacggcgugaagccccugauccugaaggacugcagcguggccggcuggcugcugggcaaccccaugugcgacgaguucaucaacgugcccgaguggagcuacaucguggagaaggccaaccccgccaacgaccugugcuaccccggcaacuucaacgacuacgaggagcugaagcaccugcugagcagaaucaaccacuucgagaagauccagaucauccccaagagcagcuggagcgaccacgaggccagcagcggcgugagcagcaccugccccuaccagggcacccccagcuucuucagaaacgugguguggcugaucaagaagaacaacaccuaccccaccaucaagagaagcuacaacaacaccaaccaggaggaccugcugauccuguggggcauccaccacagcaacgacgaggccgagcaggccaagcuguaccagaaccccaccaccuacaucagcgugggcaccagcacccugaaccagagacuggugcccaagaucgccaccagaagcaaggugaacggccagagcggcagaauggacuucuucuggaccauccugaagcccaacgacgccaucaacuucgagagcaacggcaacuucaucgcccccgaguacgccuacaagaucgugaagaagggcgacagcgccaucaugaagagcgagguggaguacggcaacugcaacaccaagugccagacccccaucggcgccaucaacagcagcaugcccuuccacaacauccacccccugaccaucggcgagugccccaaguacgugaagagcaacaagcuggugcuggccaccggccugagaaacagcccccugagagagagaagaagaaagagaggccuguucggcgccaucgccggcuucaucgagggcggcuggcagggcaugguggacggcugguacggcuaccaccacagcaacgagcagggcagcggcuacgccgccgacaaggagagcacccagaaggccaucgacggcgugaccaacaaggugaacagcaucaucgacaagaugaacacccaguucgaggccgugggcagagaguucaacaaccuggagagaagaaucgagaaccugaacaagaagauggaggacggcuuccuggacguguggaccuacaacgccgagcugcuggugcugauggagaacgagagaacccuggacuuccacgacagcaacgugaagaaccuguacgacaaggugagacugcagcugagagacaacgccaaggagcugggcaacggcugcuucgaguucuaccacaagugcgacgacgagugcauggagagcgugagaaacggcaccuacgacuacccccaguacagcgaggaggccagacugaagagagaggagaucagcggcgugaagcuggagagcaucggcaccuaccagauccugagcaucuacagcaccguggccagcagccuggcccuggccaucaugauggccggccugagccuguggaugugcagcaacggcagccugcagugcagaaucugcaucuga

SEQ ID NO: 167771 - RNA, 1704 nt, Artificial Sequence
  derived and/or modified CDS sequence (opt4) from hemagglutinin__InfluenzaA__AEO89100
auggagaagaucgugcccuuccuggccaucaucagccuggugaagagcgaccagaucugcaucggcuaccacgccaacaacagcaccgagcagguggacaccaucauggagaagaacgugaccgugacccacgcccaggacauccuggagaagacccacaacggcaagcugugcgaccuggacggcgugaagccccugauccugagagacugcagcguggccggcuggcugcugggcaaccccaugugcgacgaguucaucaacgugcccgaguggagcuacaucguggagaaggccaaccccgccaacgaccugugcuaccccggcaacuucaacgacuacgaggagcugaagcaccugcugagcagaaucaaccacuucgagaagauccagaucauccccaagaacagcuggagcgaccacgaggccagcagcggcgugagcagcgccugccccuaccagggcacccccagcuucuucagaaacgugguguggcugaucaagaagaacaacaccuaccccaccaucaagagaagcuacaacaacaccaaccaggaggaccugcugauccuguggggcauccaccacagcaacgacgccgccgagcagaccaagcuguaccagaaccccaccaccuacaucagcgugggcaccagcacccugaaccagagacuggugcccaagaucgccaccagaagcaaggugaacggccagagcggcagaauggacuucuucuggaccauccugaagcccaacgacgccaucaacuucgagagcaacggcaacuucaucgcccccgaguacgccuacaagaucgugaagaagggcgacagcgccaucaugaagagcgagguggaguacggcaacugcaacaccaagugccagacccccaucggcgccaucaacagcagcaugcccuuccacaacauccacccccugaccaucggcgagugccccaaguacgugaagagcaacaagcuggugcuggccaccggccugagaaacagcccccugagagagagaagaagaaagagaggccuguucggcgccaucgccggcuucaucgagggcggcuggcagggcaugguggacggcugguacggcuuccaccacagcaacgagcagggcagcggcuacgccgccgacaaggagagcacccagaaggccaucgacggcgugaccaacaaggugaacagcaucaucgacaagaugaacacccaguucgaggccgugggcagagaguucaacaaccuggagagaagaaucgagaaccugaacaagaagauggaggacggcuuccuggacguguggaccuacaacgccgagcugcuggugcugauggagaacgagagaacccuggacuuccacgacagcaacgugaagaaccuguacgacaaggugagacugcagcugagagacaacgccaaggagcugggcaacggcugcuucgaguucuaccacaagugcgacgacgagugcauggagagcgugaagaacggcaccuacgacuacccccaguacagcgaggaggccagacugaagagagaggagaucagcggcgugaagcuggagagcaucggcaccuaccagauccugagcaucuacagcaccguggccagcagccuggcccuggccaucaugguggccggccugagccuguggaugugcagcaacggcagccugcagugcagaaucugcaucuga

SEQ ID NO: 167772 - RNA, 1704 nt, Artificial Sequence
  derived and/or modified CDS sequence (opt4) from hemagglutinin__InfluenzaA__AEO89109
auggagaagaucgugcugcugcuggccaucgugagccuggugaagagcgaccagaucugcaucggcuaccacgccaacaacagcaccgagcagguggacaccaucauggagaagaacgugaccgugacccacgcccaggacauccuggagaagacccacaacggcaagcugugcgaccuggacggcgugaagccccugauccugagagacugcagcguggccggcuggcugcugggcaaccccaugugcgacgaguucaucaacgugcccgaguggagcuacaucguggagaaggccaaccccgccaacgaccugugcuaccccggcaacuucaacgacuacgaggagcugaagcaccugcugagcagaaucaaccacuucgagaagauccagaucauccccaagagcagcuggagcgaccacgaggccagcagcggcgugagcagcgccugccccuaccagggcacccccagcuucuucagaaacgugguguggcugaucaagaagaacaacaccuaccccaccaucaagagaagcuacaacaacaccaaccaggagaaccugcugauccuguggggcauccaccacagcaacgacgccgccgagcagaucaagcuguaccagaaccccaccaccuacaucagcgugggcaccagcacccugaaccagagacuggugaccaagaucgccaccagacccaaggugaacggccagagcggcagaauggacuucuucuggaccauccugaagcccaacgacgccaucaacuucgagagcaacggcaacuucaucgcccccgaguacgccuacaagaucgugaaggagggcgacagcgccaucaugaagagcgagguggaguacggcaacugcaacaccaagugccagacccccaucggcgccaucaacagcagcaugcccuuccacaacauccacccccugaccaucggcgagugccccaaguacgugaagagcaacaagcuggugcuggccaccggccugagaaacagcccccugagagagagaagaagaaagagaggccuguucggcgccaucgccggcuucaucgagggcggcuggcagggcaugguggacggcugguacggcuaccaccacagcaacgagcagggcagcggcuacgccgccgacaaggagagcacccagaaggccaucgacggcgugaccaacaaggugaacagcaucaucgacaagaugaacacccaguucgaggccgugggcagagaguucaacaaccuggagagaagaaucgagaaccugaacaagaagauggaggacggcuuccuggacguguggaccuacaacgccgagcugcuggugcugauggagaacgagagaacccuggacuuccacgacagcaacgugaagaaccuguacgacaaggugagacugcagcugagagacaacgccaaggagcugggcaacggcugcuucgaguucuaccacaagugcgacaacgagugcauggagagcgugagaaacggcaccuacgacuacccccaguacagcgaggaggccagacugaagagagaggagaucagcggcgugaagcuggagagcaucggcaccuaccagauccugagcaucuacagcaccguggccagcagccuggcccuggccaucaugguggccggccugagccuguggaugugcagcaacggcagccugcagugcagaaucugcaucuga

SEQ ID NO: 167773 - RNA, 1704 nt, Artificial Sequence
  derived and/or modified CDS sequence (opt4) from hemagglutinin__InfluenzaA__AEO89127
auggagaagaucgugcugcugcuggccaucaucagccuggugaagagcgaccagaucugcaucggcuaccacgccaacaacagcaccgagcagguggacaccaucauggagaagaacgugaccgugacccacgcccaggacauccuggagaagacccacaacggcaagcugugcgaccuggacggcgugaagccccugauccugagagacugcagcguggccggcuggcugcugggcaaccccaugugcgacgaguucaucaacgugcccgaguggagcuacaucguggagaaggccaaccccgccaacgaccugugcuaccccggcaacuucaacgacuacgaggagcugaagcaccugcugagcagaaucaaccacuucgagaagauccagaucauccccaagagcagcuggagcgaccacgaggccagcagcggcgugagcagcgccugccccuaccagggcacccccagcuucuucagaaacgugguguggcugaucaagaagaacaacaccuaccccaccaucaagagaagcuacaacaacaccaaccaggagaaccugcugauccuguggggcauccaccacagcaacgacgccgccgagcagaucaagcuguaccagaaccccaccaccuacaucagcgugggcaccagcacccugaaccagagacuggugcccaagaucgccaccagaagcaaggugaacggccagagcggcagaauggacuucuucuggaccauccugaagcccaacgacgccaucaacuucgagagcaacggcaacuucaucgcccccgaguacgccuacaagaucgugaaggagggcgacagcgccaucaugaagagcgagguggaguacggcaacugcaacaccaagugccagacccccaucggcgccaucaacagcagcaugcccuuccacaacauccacccccugaccaucggcgagugccccaaguacgugaagagcaacaagcuggugcuggccaccggccugagaaacagcccccugagagagagaagaagaagaagaggccuguucggcgccaucgccggcuucaucgagggcggcuggcagggcaugguggacggcugguacggcuaccaccacagcaacgagcagggcagcggcuacgccgccgacaaggagagcacccagaaggccaucgacggcgugaccaacaaggugaacagcaucaucgacaagaugaacacccaguucgaggccgugggcagagaguucaacaaccuggagagaagaaucgagaaccugaacaagaagauggaggacggcuuccuggacguguggaccuacaacgccgagcugcuggugcugauggagaacgagagaacccuggacuuccacgacagcaacgugaagaaccuguacgacaaggugagacugcagcugagagacaacgccaaggagcugggcaacggcugcuucgaguucuaccacaagugcgacaacgagugcauggagagcgugagaaacggcaccuacgacuacccccaguacagcgaggaggccagacugaagagagaggagaucagcggcaucaagcuggagagcaugggcaccuaccagauccugagcaucuacagcaccguggccagcagccuggcccuggccaucaugguggccggccugagccuguggaugugcagcaacggcagccugcagugcagaaucugcaucuga

SEQ ID NO: 167774 - RNA, 1704 nt, Artificial Sequence
  derived and/or modified CDS sequence (opt4) from hemagglutinin__InfluenzaA__AEO89145
auggagaagaucgugcugcugcuggccaucgugagccuggugaagagcgaccagaucugcaucggcuaccacgccaacaacagcaccgagcagguggacaccaucauggagaagaacgugaccgugacccacgcccaggacauccuggagaagacccacaacggcaagcugugcgaccuggacggcgugaagccccugauccugggcgacugcagcguggccggcuggcugcugggcaaccccaugugcgacaaguucaucaacgugcccgaguggagcuacaucguggagaaggccaaccccgccaacgaccugugcuaccccggcaacuucaacgacuacgaggagcugaagcaccugcugagcagaaucaaccacuucgagaagauccagaucauccccaagagcagcuggagcgaccacgaggccagcagcggcgugagcagcgccugccccuaccagggcacccccagcuucuucagaaacgugguguggcugaccaagaagaacaacaccuaccccaccaucaagagaagcuacaacaacaccaaccaggaggaccugcugauccuguggggcauccaccacagcaacaacgccgccgagcaggagaagcuguaccagaaccccaccaccuacaucagcgugggcaccagcacccugaaccagagacuggugcccaagaucgccaccagaagcaaggugaacggccagagcggcagaauggacuucuucuggaccauccugaagcccaacgacgccaucaacuucgagagcaacggcaacuucaucgcccccgaguacgccuacaagaucgugaagaagggcgacagcgccaucaugaagagcggcguggaguacggcaacugcaacaccaagugccagacccccaucggcgccaucaacagcagcaugcccuuccacaacauccacccccugaccaucggcgagugccccaaguacgugaagagcaacaagcuggugcuggccaccggccugagaaacagcccccugagagagagaagaagaaagagaggccuguucggcgccaucgccggcuucaucgagggcggcuggcagggcaugguggacggcugguacggcuaccaccacagcaacgagcagggcagcggcuacgccgccgacaaggagagcacccagaaggccaucgacggcgugaccaacaaggugaacagcaucaucgacaagaugaacacccaguucgaggccgugggcagagaguucaacaaccuggagagaagaaucgagaaccugaacaagaagauggaggacggcuuccuggacguguggaccuacaacgccgagcugcuggugcugauggagaacgagagaacccuggacuuccacgacagcaacgugaagaaccuguacgacaaggugagacugcagcugagagacaacgccaaggagcugggcaacggcugcuucgaguucuaccacaagugcgacaacgagugcauggagagcgugagaaacggcaccuacgacuacccccaguacagcgaggaggccagacugaagagagaggagaucagcggcgugaagcuggagagcaucggcaccuaccagauccugagcaucuacagcaccgccgccagcagccuggcccuggccaucaugguggccggccugagccuguggaugugcagcaacggcagccugcagugcagaaucugcaucuga

SEQ ID NO: 167775 - RNA, 1707 nt, Artificial Sequence
  derived and/or modified CDS sequence (opt4) from hemagglutinin__InfluenzaA__AEO89163
auggagaagaucgugcugcuguucgccaucgugagccuggugaagagcgaccacaucugcaucggcuaccacgccaacaacagcaccgagcagguggacaccaucauggagaagaacgugaccgugacccacgcccaggacauccuggagaagacccacaacggcaagcugugcgaccugaacggcgugaagccccugauccugaaggacugcagcguggccggcuggcugcugggcaaccccaugugcgacgaguucaucgacgugcccgaguggagcuacaucguggagaaggccaaccccgccaacgaccugugcuaccccggcaacuucaacgacuacgaggagcugaagcaccugcugagcagaaucaaccacuucgagaagauccagaucauccccaaggacagcuggcccgaccacgaggccagccugggcgugagcagcgccugccccuaccagggcaacagcagcuucuucagaaacgugguguggcugaucaagaagggcaacgccuaccccaccaucaagaagagcuacaacaacaccaacaaggaggaccugcugauccuguggggcauccaccaccccaacgacgaggccgagcagaccagacuguaccagaaccccaccaccuacaucagcaucggcaccagcacccugaaccagagacuggugcccagaaucgccaccagaagcaaggugaacggccagagcggcagaaucgacuucuucuggaccauccugaagcccaacgacgccaucaacuucgagagcaacggcaacuucaucgcccccgaguacgccuacaagaucgugaagaagggcgacagcaccaucaugaagagcgagguggaguacggcaacugcaacaccagaugccagacccccaugggcgccaucaacagcagcaugcccuuccacaacauccacccccugaccaucggcgagugccccaaguacgugaagagcaacaagcuggugcuggccaccggccugagaaacagcccccagagagagagaagaagaagaaagagaggccuguucggcgccaucgccggcuucaucgagggcggcuggcagggcaugguggacggcugguacggcuaccaccacagcaacgagcagggcagcggcuacgccgccgacaaggagagcacccagaaggccaucgacggcgugaccaacaaggugaacagcaucaucgacaagaugaacacccaguucgaggccgugggcagagaguucaacaaccuggagagaagaaucgagaaccugaacaagaagauggaggacggcuuccuggacguguggaccuacaacgccgagcugcuggugcugauggagaacgagagaacccuggacuuccacgacagcaacgugaagaaccuguacgacaaggugagacugcagcugagagacaacgccaaggagcugggcaacggcugcuucgaguucuaccacaagugcgacaacgagugcauggagagcgugagaaacggcaccuacgacuacccccaguacagcgaggaggccagacugaagagagaggagaucagcggcgugaagcuggagagcaucggcaccuaccagauccugagcaucuacagcaccguggccagcagccuggugcuggccaucaugguggccggccugagccuguggaugugcagcaacggcagccugcagugcagaaucugcaucuga

SEQ ID NO: 167776 - RNA, 1704 nt, Artificial Sequence
  derived and/or modified CDS sequence (opt4) from hemagglutinin__InfluenzaA__AEO89172
auggagaagaucgugcugcugcuggccaucgugagccuggugagaagcgaccagaucugcaucggcuaccacgccaacaacagcaccgagcagguggacaccaucauggagaagaacgugaccgugacccacgcccagaacauccuggagaagacccacaacggcaagcugugcgaccuggacggcgugaagccccugauccugagagacugcagcguggccggcuggcugcugggcaaccccaugugcgacgaguucaucaacgugcccgaguggagcuacaucguggagaaggccaaccccgccaacgaccugugcuaccccggcaacuucaacgacuacgaggagcugaagcaccugcugagcagaaucaaccacuucgagaagauccagaucauccccaagagcagcuggagcgaccacgaggccagcagcggcgugagcagcgccugccccuaccagggcacccccagcuucuucagaaacgugguguggcugaucaagaagaacaacaccuaccccaccaucaagagaagcuacaacaacaccaaccaggaggaccugcuggugcuguggggcauccaccacagcaacgacgccaccgagcagaucaagcuguaccagaaccccaccaccuacgugagcgugggcaccagcacccugaaccagagacuggugcccaagaucgccaccagaagcaaggugaacggccagagcggcagaauggacuucuucuggaccauccugaagagcaacgacgccaucaacuucgagagcaacggcaacuucaucgcccccgaguacgccuacaagaucgugaagaagggcgacagcgccaucaugaagagcgagguggaguacggcaacugcagcaccaagugccagacccccaucggcgccaucaacagcagcaugcccuuccacaacauccacccccugaccaucggcgagugccccaaguacgugaagagcaacaagcuggugcuggccaccggccugagaaacagcccccugagagagagaagaagaaagagaggccuguucggcgccaucgccggcuucaucgagggcggcuggcagggcaugguggacggcugguacggcuaccaccacagcaacgagcagggcagcggcuacgccgccgacaaggagagcacccagaaggccaucgacggcgugaccaacaaggugaacagcaucaucgacaagaugaacacccaguucgaggccgugggcagagaguucaacaaccuggagagaagaaucgagaaccugaacaagaagauggaggacggcuuccuggacguguggaccuacaacgccgagcugcuggugcugauggagaacgagagaacccuggacuuccacgacagcaacgugaagaaccuguacgacaaggugagacugcagcugagagacaacgccaaggagcugggcaacggcugcuucgaguucuaccacaagugcgacaacgagugcauggagagcgugagaaacggcaccuacgacuacccccaguacagcgaggaggccagacugaagagagaggagaucagcggcgugaagcuggagagcaucggcaccuaccagauccugagcaucuacagcaccguggccagcagccuggcccuggccaucaugguggccggccugagccuguggaugugcagcaacggcagccugcagugcagaaucugcaucuga

SEQ ID NO: 167777 - RNA, 1704 nt, Artificial Sequence
  derived and/or modified CDS sequence (opt4) from hemagglutinin__InfluenzaA__AEO89181
auggagaagaucgugcugcuguucgccaccaucagccuggugaagagcgaccacaucugcaucggcuaccacgccaacaacagcaccgagcagguggacaccaucauggagaagaacgugaccgugacccacgcccaggacauccuggagaagacccacaacggcaagcugugcgaccugaacggcgugaagccccugauccugaaggacugcagcguggccggcuggcugcugggcaaccccaugugcgacgaguucaucaacgugcccgaguggagcuacaucguggagaaggccaaccccgccaacgaccugugcuaccccggcaacuucaacgacuacgaggagcugaagcaccugcugagcagaaucaaccacuucgagaagauccagaucauccccaagaacagcuggagcgaccacgaggccagccugggcgugagcgccgccugccccuaccagggcaagagcagcuucuucagaaacgugguguggcugaucaagaaggacaacgccuaccccaccaucaagaagggcuacaacaacaccaaccaggaggaccugcuggugcuguggggcauccaccaccccaacgacgaggccgagcagaccagacuguaccagaaccccaccaccuacaucagcaucggcaccagcacccugaaccagagacuggugcccaagaucgccaccagaagcaagaucaacggccagagcggcagaaucgacuucuucuggaccauccugaagcccaacgacgccauccacuucgagagcaacggcaacuucaucgcccccgaguacgccuacaagaucgugaagaagggcgacagcaccaucaugaagagcgagguggaguacggcaacugcaacaccagaugccagacccccaucggcgccaucaacagcagcaugcccuuccacaacauccacccccugaccaucggcgagugccccaaguacgugaagagcaacaagcuggugcuggccaccggccugagaaacagcccccagagagagagaagaagaaagagaggccuguucggcgccaucgccggcuucaucgagggcggcuggcagggcaugguggacggcugguacggcuaccaccacagcaacgagcagggcagcggcuacgccgccgacaaggagagcacccagaaggccaucgacggcgugaccaacaaggugaacagcaucaucgacaagaugaacacccaguucgaggccgugggcagagaguucaacaaccuggagagaagaaucgagaaccugaacaagaagauggaggacggcuuccuggacguguggaccuacaacgccgagcugcuggugcugauggagaacgagagaacccuggacuuccacgacagcaacgugagaaaccuguacgacaaggugagacugcagcugaaggacaacgccaaggagcugggcaacggcugcuucgaguucuaccacaagugcgacaacgagugcauggagagcgugagaaacggcaccuacgacuacccccaguacagcgaggaggccagacugaagagagaggagaucagcggcgugaagcuggagagcaucggcaucuaccagauccugagcaucuacagcaccguggccagcagccuggugcuggccaucaugauggccggccugagccuguggaugugcagcaacggcagccugcagugcagaaucugcaucuga

SEQ ID NO: 167778 - RNA, 1704 nt, Artificial Sequence
  derived and/or modified CDS sequence (opt4) from hemagglutinin__InfluenzaA__AEO89192
auggagaagaucgugcugcugcuggccaucgugagccuggugaagagcgaccagaucugcaucggcuaccacgccaacaacagcaccgagcagguggacaccaucauggagaagaacgugaccgugacccacgcccaggacauccuggagaagacccacaacggcaagcugugcgaccuggacggcgugaagccccugauccugagagacugcagcguggccggcuggcugcugggcaaccccaugugcgacgaguucaucaacgugcccgaguggagcuacaucguggagaaggccaaccccgccaacgaccugugcuaccccggcaacuucaacgacuacgaggagcugaagcaccugcugagcagaaucaaccacuucgagaagauccagaucauccccaagagcagcuggagcgaccacgaggccagcagcggcgugagcagcgccugccccuaccagggcacccccagcuucuucagaaacgugguguggcugaucaagaagaacaacaccuaccccaccaucaagagaagcuacaacaacaccaaccaggagaaccugcugauccuguggggcauccaccacagcaacgacgccgccgagcagaucaagcuguaccagaaccccaccaccuacgugagcaucggcaccagcacccugaaccagagacuggugcccaagaucgccaccagaagcaaggugaacggccagagcggcagaauggacuucuucuggaccauccugaagcccaacgacgccaucaacuucgagagcaacggcaacuucaucgcccccgaguacgccuacaagaucgugaaggagggcgacagcgccaucaugaagagcgagguggaguacggcaacugcaacaccaagugccagacccccaucggcgccaucaacagcagcaugcccuuccacaacauccacccccugaccaucggcgagugccccaaguacgugaagagcaacaagcuggugcuggccaccggccugagaaacagcccccugagagagagaagaagaaagagaggccuguucggcgccaucgccggcuucaucgagggcggcuggcagggcaugguggacggcugguacggcuacccccacagcaacgagcagggcagcggcuacgccgccgacaaggagagcacccagaaggccaucgacggcgugaccaacaaggugaacagcaucaucgacaagaugaacacccaguucgaggccgugggcagagaguucaacaaccuggagagaagaaucgagaaccugaacaagaagauggaggacggcuuccuggacguguggaccuacaacgccgagcugcuggugcugauggagaacgagagaacccuggacuuccacgacagcaacgugaagaaccuguacgacaaggugagacugcagcugagagacaacgccaaggagcugggcaacggcugcuucgaguucuaccacaagugcgacaacgagugcauggagagcgugagaaacggcaccuacgacuacccccaguacagcgaggaggccagacugaagagagaggagaucaacggcgugaagcuggagagcaucggcaccuaccagauccugagcaucuacagcaccguggccagcagccuggcccuggccaucaugguggccggccugagccuguggaugugcagcaacggcagccugcagugcagaaucugcaucuga

SEQ ID NO: 167779 - RNA, 1704 nt, Artificial Sequence
  derived and/or modified CDS sequence (opt4) from hemagglutinin__InfluenzaA__AEO89203
auggagaagaucgugcugcugcuggccaucgugagccuggugaagagcgaccagaucugcaucggcuaccacgccaacaacagcaccgagcagguggacaccaucauggagaagaacgugaccgugacccacgcccaggacauccuggagaagacccacaacggcaagcugugcgaccuggacggcgugaagccccugauccugagagacugcagcguggccggcuggcugcugggcaaccccaugugcgacgaguucaucaacgugcccgaguggagcuacaucguggagaaggccaaccccgccaacgaccugugcuaccccggcaacuucaacgacuacgaggagcugaagcaccugcugagcagaaucaaccacuucgagaagauccagaucauccccaagagcagcuggagcgaccacgaggccagcagcggcgugagcagcgccugccccuaccagggcacccccagcuucuucagaaacgugguguggcugaucaagaagaacaacaccuaccccaccaucaagagaagcuacaacaacaccaaccaggagaaccugcugauccuguggggcauccaccacagcaacgacgccgccgagcagaucaagcuguaccagaaccccaccaccuacgugagcaucggcaccagcacccugaaccagagacuggugcccaagaucgccaccagaagcaaggugaacggccagagcggcagaauggacuucuucuggaccauccugaagcccaacgacgccaucaacuucgagagcaacggcaacuucaucgcccccgaguacgccuacaagaucgugaaggagggcgacagcgccaucaugaagagcgagguggaguacggcaacugcaacaccaagugccagacccccaucggcgccaucaacagcagcaugcccuuccacaacauccacccccugaccaucggcgagugccccaaguacgugaagagcaacaagcuggugcuggccaccggccugagaaacagcccccugagagagagaagaagaaagagaggccuguucggcgccaucgccggcuucaucgagggcggcuggcagggcaugguggacggcugguacggcuaccaccacagcaacgagcagggcagcggcuacgccgccgacaaggagagcacccagaaggccaucgacggcgugaccaacaaggugaacagcaucaucgacaagaugaacacccaguucgaggccgugggcagagaguucaacaaccuggagagaagaaucgagaaccugaacaagaagauggaggacggcuuccuggacguguggaccuacaacgccgagcugcuggugcugauggagaacgagagaacccuggacuuccacgacagcaacgugaagaaccuguacgacaaggugagacugcagcugagagacaacgccaaggagcugggcaacggcugcuucgaguucuaccacaagugcgacaacgagugcauggagagcgugagaaacggcaccuacgacuacccccaguacagcgaggaggccagacugaagagagaggagaucaacggcgugaagcuggagagcaucggcaccuaccagauccugagcaucuacagcaccguggccagcagccuggcccuggccaucaugguggccggccugagccuguggaugugcagcaacggcagccugcagugcagaaucugcaucuga

SEQ ID NO: 167780 - RNA, 1704 nt, Artificial Sequence; identical to SEQ ID NO: 167779
  derived and/or modified CDS sequence (opt4) from hemagglutinin__InfluenzaA__AEO89213

SEQ ID NO: 167781 - RNA, 1704 nt, Artificial Sequence; identical to SEQ ID NO: 167779
  derived and/or modified CDS sequence (opt4) from hemagglutinin__InfluenzaA__AEO89224

SEQ ID NO: 167782 - RNA, 1704 nt, Artificial Sequence
  derived and/or modified CDS sequence (opt4) from hemagglutinin__InfluenzaA__AEO89235
auggagaagaucgugcugcugcuggccauggugagccuggugagaagcgaccagaucugcaucggcuaccacgccaacaacagcaccgagcagguggacaccaucauggagaagaacgugaccgugacccacgcccaggacauccuggagaagacccacaacggcaagcugugcgaccuggacggcgugaagccccugauccugagagacugcagcguggccggcuggcugcugggcaaccccaugugcgacgaguucaucaacgugcccgaguggagcuacaucguggagaaggccaaccccgccaacgaccugugcuaccccggcaaccugaacgacuacgaggagcugaagcaccugcugagcagaaucaaccacuucgagaagauccagaucauccccaagagcagcuggagcgaccacgaggccagccugggcgugagcagcgccugccccuaccagggcacccccagcuucuucagaaacgugaucuggcugaucaagaagaacaacaccuaccccaccaucaagagaagcuacaacaacaccaaccaggaggaccugcugauccuguggggcauccaccacagcaacgacgaggccgagcagaucaagcuguaccagaaccccaccaccuacaucagcgugggcaccagcacccugaaccagagacuggugcccaagaucgccaccagaagcaaggugaacggccagagcggcagaauggacuucuucuggaccauccugaagcccgacgacgccaucaacuucgagagcaacggcaacuucaucgcccccgaguacgccuacaagaucgugaagaagggcgacagcgccaucaugaagagcgagguggaguacggcaacugcaacaccaagugccagacccccaucggcgccaucaacagcagcaugcccuuccacaacauccacccccugaccaucggcgagugccccaaguacgugaagagcaacaagcuggugcuggccaccggccugagaaacagcccccugagagagaagagaagaaagagaggccuguucggcgccaucgccggcuucaucgagggcggcuggcagggcaugguggacggcugguacggcuaccaccacagcaacgagcagggcagcggcuacgccgccgacaaggagagcacccagaaggccaucgacggcgugaccaacaaggugaacagcaucaucgacaagaugaacacccaguucgaggccgugggcagagaguucaacaaccuggagagaagaaucgagaaccugaacaagaagauggaggacggcuuccuggacguguggaccuacaacgccgagcugcuggugcugauggagaacgagagaacccuggacuuccacgacagcaacgugaagaaccuguacgacaaggugagacugcagcugagagacaacgccaaggagcugggcaacggcugcuucgaguucuaccacaagugcgacaacgagugcauggagagcgugagaaacggcaccuacgacuacccccaguacagcgaggaggccagacugaagagagaggagaucagcggcgugaagcuggagagcaucggcaccuaccagauccugagcaucuacagcaccguggccagcagccuggcccuggccaucaugguggccggccugagccuguggaugugcagcaacggcagccugcagugcagaaucugcaucuga

SEQ ID NO: 167783 - RNA, 1704 nt, Artificial Sequence
  derived and/or modified CDS sequence (opt4) from hemagglutinin__InfluenzaA__AEO89246
auggagaagaucgugccccugcuggccauggugagccuggugaagagcgaccagaucugcaucggcuaccacgccaacaacagcaccgagcagguggacaccaucauggagaagaacgugaccgugacccacgcccaggacauccuggagaagacccacaacggcaagcugugcgaccuggacggcgugaagccccugauccugagagacugcagcguggccggcuggcugcugggcaaccccaugugcgacgaguucaucaacgugcccgaguggagcuacaucguggagaaggccaaccccgccaacgaccugugcuaccccggcaaccugaacgacuacgaggagcugaagcaccugcugagcagaaucaaccacuucgagaagauccagaucauccccaagagcagcuggagcgaccacgaggccagccugggcgugagcagcgccugccccuaccagggcacccccagcuucuucagaaacgugguguggcugaucaagaagaacaacaccuaccccaccaucaagagaagcuacaacaacaccaaccaggaggaccugcugauccuguggggcauccaccacagcaacgacgaggccgagcagaucaagcuguaccagaaccccaccaccuacaucagcgugggcaccagcacccugaaccagagacuggugcccaagaucgccaccagaagcaaggugaacggccagagcggcagaauggacuucuucuggaccauccugaagcccgacgacgccaucaacuucgagagcaacggcaacuucaucgcccccgaguacgccuacaagaucgugaagaagggcgacagcgccaucaugaagagcgagguggaguacggcaacugcaacaccaagugccagacccccaucggcgccaucaacagcagcaugcccuuccacaacauccacccccugaccaucggcgagugccccaaguacgugaagagcaacaagcuggugcuggccaccggccugagaaacagcccccugagagagagaagaagaaagagaggccuguucggcgccaucgccggcuucaucgagggcggcuggcagggcaugguggacggcugguacggcuaccaccacagcaacgagcagggcagcggcuacgccgccgacaaggagagcacccagaaggccaucgacggcgugaccaacaaggugaacagcaucaucgacaagaugaacacccaguucgaggccgugggcagagaguucagcaaccuggagagaagaaucgagaaccugaacaagaagauggaggacggcuuccuggacguguggaccuacaacgccgagcugcuggugcugauggagaacgagagaacccuggacuuccacgacagcaacgugaagaaccuguacgacaaggugagacugcagcugagagacaacgccaaggagcugggcaacggcugcuucgaguucuaccacaagugcgacaacgagugcauggagagcgugagaaacggcaccuacgacuacccccaguacagcgaggaggccagacugaagagagaggagaucagcggcgugaagcuggagagcaucggcaccuaccagauccugagcaucuacagcaccguggccagcagccuggcccuggccaucaugguggccggccugagccuguggaugugcagcaacggcagccugcagugcagaaucugcaucuga

SEQ ID NO: 167784 - RNA, 1704 nt, Artificial Sequence
  derived and/or modified CDS sequence (opt4) from hemagglutinin__InfluenzaA__AEO89257
auggagaagaucgugcugcugcuggccaucgugagccuggugagaagcgaccagaucugcaucggcuaccacgccaacaacagcaccgagcagguggacaccaucauggagaagaacgugaccgugacccacgcccaggacauccuggagaagacccacaacggcaagcugugcgaccuggacggcgugaagccccugauccugagagacugcagcguggccggcuggcugcugggcaaccccaugugcgacgaguucaucaacgugcccgaguggagcuacaucguggagaaggccaaccccgccaacgaccugugcuaccccggcaacuucaacgacuacgaggagcugaagcaccugcugagcagaaucaaccacuucgagaagauccagaucauccccaagagcagcuggagcgaccacgaggccagcagcggcgugagcagcgccugccccuaccagggcacccccagcuucuucagaaacgugguguggcugaucaagaagaacaacaccuaccccaccaucaagagaagcuacaacaacaccaaccaggaggaccugcuggugcuguggggcauccaccacagcaacgacgccgccgagcagaucaagcuguaccagaaccccaccaccuacgugagcgugggcaccagcacccugaaccagagacuggugcccaagaucgccaccagaagcaaggugaacggccagagcggcagaauggacuucuucuggaccauccugaagagcaacgacgccaucaacuucgagagcaacggcaacuucaucgcccccgaguacgccuacaagaucgugaagaagggcgacagcgccaucaugaagagcgagguggaguacggcaacugcagcaccaagugccagacccccaucggcgccaucaacagcagcaugcccuuccacaacauccacccccugaccaucggcgagugccccaaguacgugaagagcaacaagcuggugcuggccaccggccugagaaacagcccccugagagagagaagaagaaagagaggccuguucggcgccaucgccggcuucaucgagggcggcuggcagggcaugguggacggcugguacggcuaccaccacagcaacgagcagggcagcggcuacgccgccgacaaggagagcacccagaaggccaucgacggcgugaccaacaaggugaacagcaucaucgacaagaugaacacccaguucgaggccgugggcagagaguucaacaaccuggagagaagaaucgagaaccugaacaagaagauggaggacggcuuccuggacguguggaccuacaacgccgagcugcuggugcugauggagaacgagagaacccuggacuuccacgacagcaacgugaagaaccuguacgacaaggugagacugcagcugagagacaacgccaaggagcugggcaacggcugcuucgaguucuaccacaagugcgacaacgagugcauggagagcgugagaaacggcaccuacgacuacccccaguacagcgaggaggccagacugaagagagaggagaucagcggcgugaagcuggagagcaucggcaccuaccagauccugagcaucuacagcaccguggccagcagccuggugcuggccaucaugguggccggccugagccuguggaugugcagcaacggcagccugcagugcagaaucugcaucuga

SEQ ID NO: 167785 - RNA, 1704 nt, Artificial Sequence; identical to SEQ ID NO: 167784
  derived and/or modified CDS sequence (opt4) from hemagglutinin__InfluenzaA__AEO89268

SEQ ID NO: 167786 - RNA, 1704 nt, Artificial Sequence
  derived and/or modified CDS sequence (opt4) from hemagglutinin__InfluenzaA__AEO89279
auggagaagaucgugcugcugcuggccaucgugagccuggugaagagcgaccagaucugcaucggcuaccacgccaacaacagcaccgagcagguggacaccaucauggagaagaacgugaccgugacccacgcccaggacauccuggagaagacccacaacggcaagcugugcgaccuggacggcgugaagccccugauccugggcgacugcagcguggccggcuggcugcugggcaaccccaugugcgacaaguucaucaacgugcccgaguggagcuacaucguggagaaggccaaccccgccaacgaccugugcuaccccggcaacuucaacgacuacgaggagcugaagcaccugcugagcagaaucaaccacuucgagaagauccagaucauccccaagagcagcuggagcgaccacgaggccagcagcggcgugagcagcgccugccccuaccagggcacccccagcuucuucagaaacgugguguggcugaucaagaagaacaacaccuaccccaccaucaagagaagcuacaacaacaccaaccaggaggaccugcugauccuguggggcauccaccacagcaacaacgccgccgagcaggagaagcuguaccagaaccccaccaccuacaucagcgugggcaccagcacccugaaccagagacuggugcccaagaucgccaccagaagcaaggugaacggccagagcggcagaauggacuucuucuggaccauccugaagcccaacgacgccaucaacuucgagagcaacggcaacuucaucgcccccgaguacgccuacaagaucgugaagaagggcgacagcgccaucaugaagagcggcgugaaguacggcaacugcaacaccaagugccagacccccaucggcgccaucaacagcagcaugcccuuccacaacauccacccccugaccaucggcgagugccccaaguacgugaagagcaacaagcuggugcuggccaccggccugagaaacagcccccugagagagagaagaagaaagagaggccuguucggcgccaucgccggcuucaucgagggcggcuggcagggcaugguggacggcugguacggcuaccaccacagcaacgagcagggcagcggcuacgccgccgacaaggagagcacccagaaggccaucgacggcgugaccaacaaggugaacagcaucaucgacaagaugaacacccaguucgaggccgugggcagagaguucaacaaccuggagagaagaaucgagaaccugaacaagaagauggaggacggcuuccuggacguguggaccuacaacgccgagcugcuggugcugauggagaacgagagaacccuggacuuccacgacagcaacgugaagaaccuguacgacaaggugagacugcagcugagagacaacgccaaggagcugggcaacggcugcuucgaguucuaccacaagugcgacaacgagugcauggagagcgugagaaacggcaccuacgacuacccccaguacagcgaggaggccagacugaagagagaggagaucagcggcgugaagcuggagagcaucggcaccuaccagauccugagcaucuacagcaccgccgccagcagccuggcccuggccaucaugguggccggccugagccuguggaugugcagcaacggcagccugcagugcagaaucugcaucuga

SEQ ID NO: 167787 - RNA, 1704 nt, Artificial Sequence
  derived and/or modified CDS sequence (opt4) from hemagglutinin__InfluenzaA__AEO89289
auggagaagaucgugcugcugcuggccaucgugagccuggccaagagcgaccagaucugcaucggcuaccacgccaacaacagcaccgagcagguggacaccaucauggagaagaacgugaccgugacccacgcccaggacauccuggagaagacccacaacggcaagcugugcgaccuggacggcgugaagccccugauccugggcgacugcagcguggccggcuggcugcugggcaaccccaugugcgacaaguucaucaacgugcccgaguggagcuacaucguggagaaggugaaccccgccaacgaccugugcuaccccggcaacuucaacgacuacgaggagcugaagcaccugcugagcagaaucaaccacuucgagaagaucaagaucauccccaagagcagcuggagcgaccacgaggccagcagcggcgugagcagcgccugccccuaccagggcacccccagcuucuucagaaacgugguguggcugaucaagaagaacaacaccuaccccaccaucaagagaagcuacaacaacaccaaccaggaggaccugcugauccuguggggcauccaccacagcaacaacguggccgagcaggagaagcuguaccagaaccccaccaccuacaucagcgugggcaccagcacccugaaccagagacuggugcccaagaucgccaccagaagcaaggugaacggccagagcggcagaauggacuucuucuggaccauccugaagcccaacgacaccaucaacuucgagagcaacggcaacuucaucgcccccgaguacgccuacaagaucgugaagaagggcgacagcgccaucaugaagagcggcguggaguacggcaacugcaacaccaagugccagacccccaucggcgccaucaacagcagcaugcccuuccacaacauccacccccugaccaucggcgagugccccaaguacgugaagagcaacaagcuggugcuggccaccggccugagaaacagcccccugagagagagaagaagaaagagaggccuguucggcgccaucgccggcuucaucgagggcggcuggcagggcaugguggacggcugguacggcuaccaccacagcaacgagcagggcagcggcuacgccgccgacaaggagagcacccagaaggccaucgacggcgugaccaacaaggugaacagcaucaucgacaagaugaacacccaguucgaggccgugggcagagaguucaacaaccuggagagaagaaucgagaaccugaacaagaagauggaggacggcuuccuggacguguggaccuacaacgccgagcugcuggugcugauggagaacgagagaacccuggacuuccacgacagcaacgugaagaaccuguacgacaaggugagacugcagcugagagacaacgccaaggagcugggcaacggcugcuucgaguucuaccacaagugcgacaacgagugcauggagagcgugagaaacggcaccuacgacuaccccagauacagcgaggaggccagacugaagagagaggagaucagcggcgugaagcuggagagcaucggcaccuaccagauccugagcaucuacagcaccgccgccagcagccuggcccuggccaucaugguggccggccugagccuguggaugugcagcaacggcagccugcagugcagaaucugcaucuga

SEQ ID NO: 167788 - RNA, 1704 nt, Artificial Sequence
  derived and/or modified CDS sequence (opt4) from hemagglutinin__InfluenzaA__AEO89300
auggagaagaucgugcugcugcuggccaucgugagccuggugaagagcgaccagaucugcaucggcuaccacgccaacaacagcaccgagcagguggacaccaucauggagaagaacgugaccgugacccacgcccaggacauccuggagaagacccacaacggcaagcugugcgaccuggacggcgugaagccccugauccugagagacugcagcguggccggcuggcugcugggcaaccccaugugcgacgaguucaucaacgugcccgaguggagcuacaucguggagaaggccaaccccgccaacgaccugugcuaccccggcaacuucaacgacuacgaggagcugaagcaccugcugagcagaaucaaccacuucgagaagauccagaucauccccaagagcagcuggagcgaccacgaggccagcagcggcgugagcagcgccugccccuaccagggcacccccagcuucuucagaaacgugguguggcugaucaagaagaacaacaccuaccccaccaucaagagaagcuacaacaacaccaaccaggagaaccugcugauccuguggggcauccaccacagcaacgacgccgccgagcagaucaagcuguaccagcaccccaccaccuacaucagcgugggcaccagcacccugaaccagagacuggugcccaagaucgccaccagaagcaaggugaacggccagagcggcagaauggacuucuucuggaccauccugaagcccaacgacgccaucaacuucgagagcaacggcaacuucaucgcccccgaguacgccuacaagaucgugaaggagggcgacagcgccaucaugaagagcgagguggaguacggcaacugcaacaccaagugccagacccccaucggcgccaucaacagcagcaugcccuuccacaacauccacccccugaccaucggcgagugccccaaguacgugaagagcaacaagcuggugcuggccaccggccugagaaacagcccccugagagagagaagaagaaagagaggccuguucggcgccaucgccggcuucaucgagggcggcuggcagggcaugguggacggcugguacggcuaccaccacagcaacgagcagggcagcggcuacgccgccgacaaggagagcacccagaaggccaucgacggcgugaccaacaaggugaacagcaucaucgacaagaugaacacccaguucgaggccgugggcagagaguucaacaaccuggagagaagaaucgagaaccugaacaagaagauggaggacggcuuccuggacguguggaccuacaacgccgagcugcuggugcugauggagaacgagagaacccuggacuuccacgacagcaacgugaagaaccuguacgacaaggugagacugcagcugagagacaacgccaaggagcugggcaacggcugcuucgaguucuaccacaagugcgacaacgagugcauggagagcgugagaaacggcaccuacgacuacccccaguacagcgaggaggccagacugaagagagaggagaucaacggcgugaagcuggagagcaugggcaccuaccagauccugagcaucuacagcaccguggccagcagccuggcccuggccaucaugguggccggccugagcuucuggaugugcagcaacggcagccugcagugcagaaucugcaucuga

SEQ ID NO: 167789 - RNA, 1704 nt, Artificial Sequence
  derived and/or modified CDS sequence (opt4) from hemagglutinin__InfluenzaA__AEO89311
auggagaagaucgugcugcuguucgccaucgugagccuggugaagagcgaccacaucugcaucggcuaccacgccaacaacagcaccgagcagguggacaccaucauggagaagaacgugaccgugacccacgcccaggacauccuggagaagacccacaacggcaagcugugcgaccugaacggcgugaagccccugauccugaaggacugcagcguggccggcuggcugcugggcaaccccaugugcgacgaguucaucaacgugcccgaguggagcuacaucguggagaaggccaaccccgccaacgaccugugcuaccccggcaacuucaacgacuacgaggagcugaagcaccugcugagcagaaucaaccacuucgagaagauccagaucauccccaaggacagcuggagcgaccacgaggccagccugggcgugagcgccgccugccccuaccagggcaacagcagcuucuucagaaacgugguguggcugaucaagaaggacaacgccuaccccaccaucaagaagagcuacaacaacaccaaccaggaggaccugcugauccuguggggcauccaccaccccaacgacgaggccgagcagaccagacuguaccagaaccccaccaccuacaucagcaucggcaccagcacccugaaccagagacuggugcccaagaucgccaccagaagcaaggugaacggccagagcggcagaaucgacuucuucuggaccauccugaagcccaacgacgccauccacuucgagagcaacggcaacuucaucgcccccgaguacgccuacaagaucgugaagaagggcgacagcaccaucaugaagagcgagguggaguacggcaacugcaacaccagaugccagacccccaugggcgccaucaacagcagcaugcccuuccacaacauccacccccugaccaucggcgagugccccaaguacgugaagagcaccaagcuggugcuggccaccggccugagaaacagcccccagagagagagaagaagaaagagaggccuguucggcgccaucgccggcuucaucgagggcggcuggcagggcaugguggacggcugguacggcuaccaccacagcaacgagcagggcagcggcuacgccgccgacaaggagagcacccagaaggccaucgacggcgugaccaacaaggugaacagcaucaucgacaagaugaacacccaguucgaggccgugggcagagaguucaacaagcuggagagaagaaucgagaaccugaacaagaagauggaggacggcuuccuggacguguggaccuacaacgccgagcugcuggugcugauggagaacgagagaacccuggacuuccacgacagcaacgugaagaaccuguacgacaaggugagacugcagcugagagacaacgccaaggagcugggcaacggcugcuucgaguucuaccacaagugcaacaacgagugcauggagagcgugagaaacggcaccuacgacuacccccaguacagcgaggaggccagacugaagagagaggagaucagcggcgugaagcuggagagcaucggcaucuaccagauccugagcaucuacagcaccguggccagcagccuggugcuggccaucaugauggccggccugagccuguggaugugcagcaacggcagccugcagugcagaaucugcaucuga

SEQ ID NO: 167790 - RNA, 1701 nt, Artificial Sequence; identical to SEQ ID NO: 161988
  derived and/or modified CDS sequence (opt4) from hemagglutinin__InfluenzaA__AEO99215

SEQ ID NO: 167791 - RNA, 1698 nt, Artificial Sequence
  derived and/or modified CDS sequence (opt4) from hemagglutinin__InfluenzaA__AEQ38187
augaaggugaagcugcuggugcugcugugcaccuucaccgccaccuacgccgacaccaucugcaucggcuaccacgccaacaacagcaccgacaccguggacaccgugcuggagaagaacgugaccgugacccacagcgugaaccugcuggagaacagccacaacggcaagcugugccugcugaagggcaucgccccccugcagcugggcaacugcagcguggccggcuggauccugggcaaccccgagugcgagcugcugaucagcaaggagagcuggagcuacaucguggagaagcccaaccccgagaacggcaccugcuaccccggccacuucgccgacuacgaggagcugagagagcagcugagcagcgugagcagcuucgagagauucgagaucuuccccaaggagagcagcuggcccaaccacaccgugaccggcgccagcgccagcugcagccacaacggcgagaacagcuucuacagaaaccugcuguggcugaccggcaagaacggccuguaccccaaccugagcaagagcuacgccaacaacaaggagaaggaggugcuggugcuguggggcgugcaccacccccccaacaucgccgaccagaagacccuguaccacaccgagaacgccuacgugagcguggugagcagccacuacagcagaaaguucacccccgagaucgccaagagacccaaggugagagaccaggagggcagaaucaacuacuacuggacccugcuggagcccggcgacaccaucaucuucgaggccaacggcaaccugaucgcccccagauacgccuucgcccugagcagaggcuucggcagcggcaucaucaacagcaacgcccccauggacaagugcgacgccaagugccagaccccccagggcgccaucaacagcagccugcccuuccagaacgugcaccccgugaccaucggcgagugccccaaguacgugagaagcgccaagcugagaauggugaccggccugagaaacauccccagcauccagagcagaggccuguucggcgccaucgccggcuucaucgagggcggcuggaccggcaugguggacggcugguacggcuaccaccaccagaacgagcagggcagcggcuacgccgccgaccagaagagcacccagaacgccaucaacggcaucaccaacaaggugaacagcgugaucgagaagaugaacacccaguucaccgccgugggcaaggaguucaacaagcuggagagaagaauggagaaccugaacaagaagguggacgacggcuucaucgacaucuggaccuacaacgccgagcugcuggugcugcuggagaacgagagaacccuggacuuccacgacagcaacgugaagaaccuguacgagaaggugaagagccagcugaagaacaacgccaaggagaucggcaacggcugcuucgaguucuaccacaagugcaacgacgagugcauggagagcgugaagaacggcaccuacgacuaccccaaguacagcgaggagagcaagcugaacagagagaagaucgacggcgugaagcuggagagcaugggcguguaccagauccuggccaucuacagcaccguggccagcagccuggugcugcuggugagccugggcgccaucagcuucuggaugugcagcaacggcagccugcagugcagaaucugcaucuga

SEQ ID NO: 167792 - RNA, 1698 nt, Artificial Sequence; identical to SEQ ID NO: 167791
  derived and/or modified CDS sequence (opt4) from hemagglutinin__InfluenzaA__AEQ38188

SEQ ID NO: 167793 - RNA, 1698 nt, Artificial Sequence
  derived and/or modified CDS sequence (opt4) from hemagglutinin__InfluenzaA__AEQ38189
augaaggugaagcugcuggugcugcugugcaccuucaccgccaccuacgccgacaccaucugcaucggcuaccacgccaacaacagcaccgacaccguggacaccgugcuggagaagaacgugaccgugacccacagcgugaaccugcuggagaacagccacaacggcaagcugugccugcugaagggcaucgccccccugcagcugggcaacugcagcguggccggcuggauccugggcaaccccgagugcgagcugcugaucagcaaggagagcuggagcuacaucguggagaagcccaaccccgagaacggcaccugcuaccccggccacuucgccgacuacgaggagcugagagagcagcugagcagcgugagcagcuucgagagauucgagaucuuccccaaggagagcagcuggcccaaccacaccgugaccggcgugagcgccagcugcagccacaacggcgagaacagcuucuacagaaaccugcuguggcugaccggcaagaacggccuguaccccaaccugagcaagagcuacgccaacaacaaggagaaggaggugcuggugcuguggggcgugcaccacccccccaacaucgccaaccagaagacccuguaccacaccgagaacgccuacgugagcguggugagcagccacuacagcagaaaguucacccccgagaucgccaagagacccaaggugagagaccaggagggcagaaucaacuacuacuggacccugcuggagcccggcgacaccaucaucuucgaggccaacggcaaccugaucgcccccagauacgccuucgcccugagcagaggcuucggcagcggcaucaucaacagcaacgcccccauggacaagugcgacgccaagugccagaccccccagggcgccaucaacagcagccugcccuuccagaacgugcaccccgugaccaucggcgagugccccaaguacgugagaagcgccaagcugagaauggugaccggccugagaaacauccccagcauccagagcagaggccuguucggcgccaucgccggcuucaucgagggcggcuggaccggcaugguggacggcugguacggcuaccaccaccagaacgagcagggcagcggcuacgccgccgaccagaagagcacccagaacgccaucaacggcaucaccaacaaggugaacagcgugaucgagaagaugaacacccaguucaccgccgugggcaaggaguucaacaagcuggagagaagaauggagaaccugaacaagaagguggacgacggcuucaucgacaucuggaccuacaacgccgagcugcuggugcugcuggagaacgagagaacccuggacuuccacgacagcaacgugaagaaccuguacgagaaggugaagagccagcugaagaacaacgccaaggagaucggcaacggcugcuucgaguucuaccacaagugcaacgacgagugcauggagagcgugaagaacggcaccuacgacuaccccaaguacagcgaggagagcaagcugaacagagagaagaucgacggcgugaagcuggagagcaugggcguguaccagauccuggccaucuacagcaccguggccagcagccuggugcugcuggugagccugggcgccaucagcuucuggaugugcagcaacggcagccugcagugcagaaucugcaucuga

SEQ ID NO: 167794 - RNA, 1698 nt, Artificial Sequence
  derived and/or modified CDS sequence (opt4) from hemagglutinin__InfluenzaA__AEQ38190
augaaggugaagcugcuggugcugcugugcaccuucaccgccaccuacgccgacaccaucugcaucggcuaccacgccaacaacagcaccgacaccguggacaccgugcuggagaagaacgugaccgugacccacagcgugaaccugcuggagaacagccacaacggcaagcugugccugcugaagggcaucgccccccugcagcugggcaacugcagcguggccggcuggauccugggcaaccccgagugcgagcugcugaucagcaaggagagcuggagcuacaucguggagaagcccaaccccgagaacggcaccugcuaccccggccacuucgccgacuacgaggagcugagagagcagcugagcagcgugagcagcuucgagagauucgagaucuuccccaaggagagcagcuggcccaaccacaccgugaccggcgugagcgccagcugcagccacaacggcgagaacagcuucuacagaaaccugcuguggcugaccggcaagaacggccuguaccccaaccugagcaagcccuacgccaacaacaaggagaaggaggugcuggugcuguggggcgugcaccacccccccaacaucgccgugcagaagacccuguaccacaccgagaacgccuacgugagcguggugagcagccacuacagcagaaaguucacccccgagaucgccaagagacccaaggugagagaccaggagggcagaaucaacuacuacuggacccugcuggagcccggcgacaccaucaucuucgaggccaacggcaaccugaucgcccccagauacgccuucgcccugagcagaggcuucggcagcggcaucaucaacagcaacgcccccauggacaagugcgacgccaagugccagaccccccagggcgccaucaacagcagccugcccuuccagaacgugcaccccgugaccaucggcgagugccccaaguacgugagaagcgccaagcugagaauggugaccggccugagaaacauccccagcauccagagcagaggccuguucggcgccaucgccggcuucaucgagggcggcuggaccggcaugguggacggcugguacggcuaccaccaccagaacgagcagggcagcggcuacgccgccgaccagaagagcacccagaacgccaucaacggcaucaccaacaaggugaacagcgugaucgagaagaugaacacccaguucaccgccgugggcaaggaguucaacaagcuggagagaagaauggagaaccugaacaagaagguggacgacggcuucaucgacaucuggaccuacaacgccgagcugcuggugcugcuggagaacgagagaacccuggacuuccacgacagcaacgugaagaaccuguacgagaaggugaagagccagcugaagaacaacgccaaggagaucggcaacggcugcuucgaguucuaccacaagugcaacgacgagugcauggagagcgugaagaacggcaccuacgacuaccccaaguacagcgaggagagcaagcugaacagagagaagaucgacggcgugaagcuggagagcaugggcguguaccagauccuggccaucuacagcaccguggccagcagccuggugcugcuggugagccugggcgccaucagcuucuggaugugcagcaacggcagccugcagugcagaaucugcaucuga

SEQ ID NO: 167795 - RNA, 1698 nt, Artificial Sequence; identical to SEQ ID NO: 163686
  derived and/or modified CDS sequence (opt4) from hemagglutinin__InfluenzaA__AEQ38191

SEQ ID NO: 167796 - RNA, 1698 nt, Artificial Sequence
  derived and/or modified CDS sequence (opt4) from hemagglutinin__InfluenzaA__AEQ38192
augaaggugaagcugcuggugcugcugugcaccuucaccgccaccuacgccgacaccaucugcaucggcuaccacgccaacaacagcaccgacaccguggacaccgugcuggagaagaacgugaccgugacccacagcgugaaccugcuggagaacagccacaacggcaagcugugccugcugaagggcaucgccccccugcagcugggcaacugcagcguggccggcuggauccugggcaaccccgagugcgagcugcugaucagcaaggagagcuggagcuacaucguggagaagcccaaccccgagaacggcaccugcuaccccggccacuucgccgacuacgaggagcugagagagcagcugagcagcgugagcagcuucgagagauucgagaucuuccccaaggagagcagcuggcccaaccacaccgugaccggcgugagcgccagcugcagccacaacggcgagagcagcuucuacagaaaccugcuguggcugaccggcaagaacggccuguaccccaaccugagcaagagcuacgccaacaacaaggagaaggaggugcuggugcuguggggcgugcaccacccccccagcaucagcgaccagaagacccuguaccacaccgagaacgccuacgugagcguggugagcagccacuacagcagaaaguucacccccgagaucaccaagagacccaaggugagagaccaggagggcagaaucaacuacuacuggacccugcuggagcccggcgacaccaucaucuucgaggccaacggcaaccugaucgcccccagauacgccuucgcccugagcagaggcuucggcagcggcaucaucaacagcaacacccccauggacaagugcgacaccaagugccagaccccccagggcgccaucaacagcagccugcccuuccagaacgugcaccccgugaccaucggcgagugccccaaguacgugagaagcgccaagcugagaauggugaccggccugagaaacauccccagcauccagagcagaggccuguucggcgccaucgccggcuucaucgagggcggcuggaccggcaugguggacggcugguacggcuaccaccaccagaacgagcagggcagcggcuacgccgccgaccagaagagcacccagaacgccaucaacggcaucaccaacaaggugaacagcgugaucgagaagaugaacacccaguucaccgccgugggcaaggaguucaacaagcuggagagaagaauggagaaccugaacaagaagguggacgacggcuucaucgacaucuggaccuacaacgccgagcugcuggugcugcuggagaacgagagaacccuggacuuccacgacagcaacgugaagaaccuguacgagaaggugaagagccagcugaagaacaacgccaaggagaucggcaacggcugcuucgaguucuaccacaagugcaacgacgagugcauggagagcgugaagaacggcaccuacgacuaccccaaguacagcgaggagagcaagcugaacagagagaagaucgacggcgugaagcuggagagcaugggcguguaccagauccuggccaucuacagcaccguggccagcagccuggugcugcuggugagccugggcgccaucagcuucuggaugugcagcaacggcagccugcagugcagaaucugcaucuga

SEQ ID NO: 167797 - RNA, 1698 nt, Artificial Sequence
  derived and/or modified CDS sequence (opt4) from hemagglutinin__InfluenzaA__AEQ38193
augaaggugaagcugcugauccugcugugcaccuucaccgccaccuacgccgacaccaucugcaucggcuaccacgccaacaacagcaccgacaccguggacaccgugcuggagaagaacgugaccgugacccacagcgugaaccugcuggagaacagccacaacggcaagcugugccugcugaagggcaucgccccccugcagcugggcaacugcagcguggccggcuggauccugggcaaccccgagugcgagcugcugaucagcaaggagagcuggagcuacaucguggagaagcccaaccccgagaacggcaccugcuaccccggccacuucgccgacuacgaggagcugagagagcagcugagcagcgugagcagcuucgagagauucgagaucuuccccaaggagagcagcuggcccaaccacaccgugaccggcgugagcgccagcugcagccacaacggcgagagcagcuucuacagaaaccugcuguggcugaccggcaagaacggccuguaccccaaccugagcaagagcuacgccaacaacaaggagaaggaggugcuggugcuguggggcgugcaccacccccccaacaucguggaccagaagacccuguacagaaccgagaacgccuacgugagcguggugagcagccacuacagcagaaaguucacccccgagaucgccaagagacccaaggugagagaccaggagggcagaaucaacuacuacuggacccugcuggagcccggcgacaccaucaucuucgaggccaacggcaaccugaucgcccccagauacgccuucgcccugagcagaggcuucggcagcggcaucaucaacagcaacgcccccauggacaagugcgacgccaagugccagaccccccagggcgccaucaacagcagccugcccuuccagaacgugcaccccgugaccaucggcgagugccccaaguacgugagaagcgccaagcugagaauggugaccggccugagaaacauccccagcauccagagcagaggccuguucggcgccaucgccggcuucaucgagggcggcuggaccggcaugguggacggcugguacggcuaccaccaccagaacgagcagggcagcggcuacgccgccgaccagaagagcacccagaacgccaucaacggcaucaccaacaaggugaacagcgugaucgagaagaugaacacccaguucaccgccgugggcaaggaguucaacaagcuggagagaagaauggagaaccugaacaagaagguggacgacggcuucaucgacaucuggaccuacaacgccgagcugcuggugcugcuggagaacgagagaacccuggacuuccacgacagcaacgugaagaaccuguacgagaaggugaagagccagcugaagaacaacgccaaggagaucggcaacggcugcuucgaguucuaccacaagugcaacgacgagugcauggagagcgugaagaacggcaccuacgacuaccccaaguacagcgaggagagcaagcugaacagagagaagaucgacggcgugaagcuggagagcaugggcguguaccagauccuggccaucuacagcaccguggccagcagccuggugcugcuggugagccugggcgccaucagcuucuggaugugcagcaacggcagccugcagugcagaaucugcaucuga

SEQ ID NO: 167798 - RNA, 1698 nt, Artificial Sequence
  derived and/or modified CDS sequence (opt4) from hemagglutinin__InfluenzaA__AEQ38194
augaaggugaagcugcuggugcugcugugcaccuucaccgccaccuacgccgacaccaucugcaucggcuaccacgccaacaacagcaccgacaccguggacaccgugcuggagaagaacgugaccgugacccacagcgugaaccugcuggagaacagccacaacggcaagcugugccugcugaagggcaucgccccccugcagcugggcaacugcagcguggccggcuggauccugggcaaccccgagugcgagcugcugaucagcaaggagagcuggagcuacaucguggagaagcccaaccccgagaacggcaccugcuaccccggccacuucgccgacuacgaggagcugagagagcagcugagcagcgugagcagcuucgagagauucgagaucuuccccaaggagagcagcuggcccaaccacaccgugaccggcgugagcgccagcugcagccacaacggcgagagcagcuucuacagaaaccugcuguggcugaccggcaagaacggccuguaccccaaccugagcaagagcuacgccaacaacaaggagaaggaggugcuggugcuguggggcgugcaccacccccccagcaucagcgaccagaagacccuguaccacaccgagaacgccuacgugagcguggugagcagccacuacagcagaaaguucacccccgagaucgccaagagacccaaggugagagaccaggagggcagaaucaacuacuacuggacccugcuggagcccggcgacaccaucaucuucgaggccagcggcaaccugaucgcccccagauacgccuucgcccugagcagaggcuucggcagcggcaucaucaacagcaacgcccccauggacaagugcgacgccaagugccagaccccccagggcgccaucaacagcagccugcccuuccagaacgugcaccccgugaccaucggcgagugccccaaguacgugagaagcgccaagcugagaauggugaccggccugagaaacauccccagcauccagagcagaggccuguucggcgccaucgccggcuucaucgagggcggcuggaccggcaugguggacggcugguacggcuaccaccacagaaacgagcagggcagcggcuacgccgccgaccagaagagcacccagaacgccaucaacggcaucaccaacaaggugaacagcgugaucgagaagaugaacacccaguucaccgccgugggcaaggaguucaacaagcuggagagaagaauggagaaccugaacaagagaguggacgacggcuucaucgacaucuggaccuacaacgccgagcugcuggugcugcuggagaacgagagaacccuggacuuccacgacagcaacgugaagaaccuguacgagaaggugaagagccagcugaagaacaacgccaaggagaucggcaacggcugcuucgaguucuaccacaagugcaacgacgagugcauggagagcgugaagaacggcaccuacgacuaccccaaguacagcgaggagagcaagcugaacagagagaagaucgacggcgugaagcuggagagcaugggcguguaccagauccuggccaucuacagcaccguggccagcagccuggugcugcuggugagccugggcgccaucagcuucuggaugugcagcaacggcagccugcagugcagaaucugcaucuga

SEQ ID NO: 167799 - RNA, 1698 nt, Artificial Sequence
  derived and/or modified CDS sequence (opt4) from hemagglutinin__InfluenzaA__AEQ38195
augaaggugaagcugcuggugcugcugugcaccuucaccgccaccuacgccgacaccaucugcaucggcuaccacgccaacaacagcaccgacaccguggacaccgugcuggagaagaacgugaccgugacccacagcgugaaccugcuggagaacagccacaacggcaagcugugccugcugaagggcaucgccccccugcagcugggcaacugcagcguggccggcuggauccugggcaaccccgagugcgagcugcugaucagcaaggagagcuggagcuacaucguggagaagcccaaccccgagaacggcaccugcuaccccggccacuucgccgacuacgaggagcugagagagcagcugagcagcgugagcagcuucgagagauucgagaucuuccccaaggagagcagcuggcccaaccacaccgugaccggcgccagcgccagcugcagccacaacggcgagaacagcuucuacagaaaccugcuguggcugaccggcaagaacggccuguaccccaaccugagcaagagcuacgccaacaacaaggagaaggaggugcuggugcuguggggcgugcaccacccccccaacaucgccaaccagaagacccuguaccacaccgagaacgccuacgugagcguggugagcagccacuacagcagaaaguucacccccgagaucgccaagagacccaaggugagagaccaggagggcagaaucaacuacuacuggacccugcuggagcccggcgacaccaucaucuucgaggccaacggcaaccugaucgcccccagauacgccuucgcccugagcagaggcuucggcagcggcaucaucaacagcaacgcccccauggacaagugcgacgccaagugccagaccccccagggcgccaucaacagcagccugcccuuccagaacgugcaccccgugaccaucggcgagugccccaaguacgugagaagcgccaagcugagaauggugaccggccugagaaacauccccagcauccagagcagaggccuguucggcgccaucgccggcuucaucgagggcggcuggaccggcaugguggacggcugguacggcuaccaccaccagaacgagcagggcagcggcuacgccgccgaccagaagagcacccagaacgccaucaacggcaucaccaacaaggugaacagcgugaucgagaagaugaacacccaguucaccgccaugggcaaggaguucaacaagcuggagagaagaauggagaaccugaacaagaagguggacgacggcuucaucgacaucuggaccuacaacgccgagcugcuggugcugcuggagaacgagagaacccuggacuuccacgacagcaacgugaagaaccuguacgagaaggugaagagccagcugaagaacaacgccaaggagaucggcaacggcugcuucgaguucuaccacaagugcaacgacgagugcauggagagcgugaagaacggcaccuacgacuaccccaaguacagcgaggagagcaagcugaacagagagaagaucgacggcgugaagcuggagagcaugggcguguaccagauccuggccaucuacagcaccguggccagcagccuggugcugcuggugagccugggcgccaucagcuucuggaugugcagcaacggcagccugcagugcagaaucugcaucuga

SEQ ID NO: 167800 - RNA, 1698 nt, Artificial Sequence
  derived and/or modified CDS sequence (opt4) from hemagglutinin__InfluenzaA__AEQ38196
augaaggugaagcugcuggugcugcugugcaccuucaccgccaccuacgccgacaccaucugcaucggcuaccacgccaacaacagcaccgacaccguggacaccgugcuggagaagaacgugaccgugacccacagcgugaaccugcuggagaacagccacaacggcaagcugugccugcugaagggcaucgccccccugcagcugggcaacugcagcguggccggcuggauccugggcaaccccgagugcgagcugcugaucagcaaggagagcuggagcuacaucguggagaagcccaaccccgagaacggcaccugcuaccccggccacuucgccgacuacgaggagcugagagagcagcugagcagcgugagcagcuucgagagauucgagaucuuccccaaggagagcagcuggcccaaccacaccgugaccggcgccagcgccagcugcagccacaacggcgagaacagcuucuacagaaaccugcuguggcugaccggcaagaacggccuguaccccaaccugagcaagagcuacgccaacaacaaggagaaggaggugcuggugcuguggggcgugcaccacccccccaacaucgccgaccagaagacccuguaccacaccgagaacgccuacgugagcguggugagcagccacuacagcagaaaguucacccccgagaucgccaagagacccaaggugagagaccaggagggcagaaucaacuacuacuggacccugcuggagcccggcgacaccaucaucuucgaggccaacggcaaccugaucgcccccagauacgccuucgcccugagcagaggcuucggcagcggcaucaucaacagcaacgcccccauggacaagugcgacgccaagugccagaccccccagggcgccaucaacagcagccugcccuuccagaacgugcaccccgugaccaucggcgagugccccaaguacgugagaagcgccaagcugagaauggugaccggccugagaaacauccccagcauccagagcagaggccuguucggcgccaucgccggcuucaucgagggcggcuggaccggcaugguggacggcugguacggcuaccaccaccagaacgagcagggcagcggcuacgccgccgaccagaagagcacccagaacgccaucaacggcaucaccaacaaggugaacagcgugaucgagaagaugaacacccaguucaccgccgugggcaaggaguucaacaagcuggagagaagaauggagaaccugaacaagaagguggacgacggcuucaucgacaucuggaccuacaacgccgagcugcuggugcugcuggagaacgagagaacccuggacuuccacgacagcaacgugaagaaccuguacgagaaggugaagagccagcugaagaacaacgccaaggagaucggcaacggcugcuucgaguucuaccacaagugcaacgacgagugcauggagagcgugaagaacggcaccuacgaguaccccaaguacagcgaggagagcaagcugaacagagagaagaucgacggcgugaagcuggagagcaugggcguguaccagauccuggccaucuacagcaccguggccagcagccuggugcugcuggugagccugggcgccaucagcuucuggaugugcagcaacggcagccugcagugcagaaucugcaucuga

SEQ ID NO: 167801 - RNA, 1698 nt, Artificial Sequence; identical to SEQ ID NO: 167791
  derived and/or modified CDS sequence (opt4) from hemagglutinin__InfluenzaA__AEQ38197

SEQ ID NO: 167802 - RNA, 1698 nt, Artificial Sequence; identical to SEQ ID NO: 167791
  derived and/or modified CDS sequence (opt4) from hemagglutinin__InfluenzaA__AEQ38198

SEQ ID NO: 167803 - RNA, 1701 nt, Artificial Sequence; identical to SEQ ID NO: 167110
  derived and/or modified CDS sequence (opt4) from hemagglutinin__InfluenzaA__AEQ62909

SEQ ID NO: 167804 - RNA, 1701 nt, Artificial Sequence
  derived and/or modified CDS sequence (opt4) from hemagglutinin__InfluenzaA__AEQ62910
augaaggccauccugguggugaugcuguacaccuucgccaccgccaacgccgacacccugugcaucggcuaccacgccaacaacagcaccgacaccguggacaccgugcuggagaagaacgugaccgugacccacagcgugaaccugcuggaggacaagcacaacggcaagcugugcaagcugagaggcguggccccccugcaccugggcaagugcaacaucgccggcuggauccugggcaaccccgagugcgagagccugagcaccgccagcagcuggagcuacaucguggagaccgccagccccgacaacggcaccugcuaccccggcgacuucaucgacuacgaggagcugagagagcagcugagcagcgugagcagcuucgagagauucgagaucuuccccaagaccagcagcuggcccaaccacgacagcaacaagggcgugaccgccgccugcccccacgccggcgccaagagcuucuacaagaaccugauguggcuggugaagaagggcaacagcuaccccaagcugagcaagagcuacaucaacgacaagggcaaggaggugcuggugcuguggggcauccaccacccccccaccagcgccgaccagcagagccuguaccagaacgccgacgccuacguguucgugggcaccagcagauacagcaagaaguucaagcccgagaucgccaucagacccaaggugagaggccaggagggcagaaugaacuacuacuggacccugguggagcccggcgacaagaucaccuucgaggccaccggcaaccugguggugcccagauacgccuucgccauggagagaaacgccggcagcggcaucaucaucagcgacacccccgugcacgacugcaacaccaccugccagagccccaagggcgccaucaacaccagccugcccuuccagaacauccaccccaucaccaucggcgagugccccaaguacgugaagagcaccaagcugagacuggccaccggccugagaaacgugcccagcgugcagagcagaggccuguucggcgccaucgccggcuucaucgagggcggcuggaccggcaugguggacggcugguacggcuaccaccaccagaacgagcagggcagcggcuacgccgccgaccugaagagcacccagaacgccaucgacgagaucaccaacaaggugaacagcgugaucgagaagaugaacacccaguucaccgccgugggcaaggaguucaaccagcuggagaagagaaucgagaaccugaacaagaagguggacgacggcuuccuggacaucuggaccuacaacgccgagcugcuggugcugcuggagaacgagagaacccuggacuaccacgacagcaacgugaagaaccuguacgagaaggugagaagccagcugaagaacaacgccaaggagaucggcaacggcugcuucgaguucuaccacaagugcgacaacaccugcauggagagcgugaagaacggcaccuacgacuaccccaaguacagcgaggaggccaagcugaacagagaggagaucgacggcgugaagcuggagagcaccagaaucuaccagauccuggccaucuacagcaccguggccagcagccuggugcugguggugagccugggcgccaucagcuucuggaugugcagcaacggcagccugcagugcagaaucugcaucuga

SEQ ID NO: 167805 - RNA, 1701 nt, Artificial Sequence; identical to SEQ ID NO: 166927
  derived and/or modified CDS sequence (opt4) from hemagglutinin__InfluenzaA__AEQ62911

SEQ ID NO: 167806 - RNA, 1701 nt, Artificial Sequence; identical to SEQ ID NO: 167110
  derived and/or modified CDS sequence (opt4) from hemagglutinin__InfluenzaA__AEQ62912

SEQ ID NO: 167807 - RNA, 1701 nt, Artificial Sequence
  derived and/or modified CDS sequence (opt4) from hemagglutinin__InfluenzaA__AEQ62915
augaaggccauccugguggugcugcuguacaccuucgccaccgccaacgccgacacccugugcaucggcuaccacgccaacaacagcaccgacaccguggacaccgugcuggagaagaacgugaccgugacccacagcgugaaccugcuggaggacaagcacaacggcaagcugugcaagcugagaggcguggccccccugcaccugggcaagugcaacaucgccggcuggauccugggcaaccccgagugcgagagccugagcaccgccagcagcuggagcuacaucguggagaccagcagcagcgacaacggcaccugcuaccccggcgacuucaucaacuacgaggagcugagagagcagcugagcagcgugagcagcuucgagagauucgagaucuuccccaagaccagcagcuggcccaaccacgacagcaacaagggcgugaccgccgccugcccccacgccggcgccaagagcuucuacaagaaccugaucuggcuggugaagaagggcaacagcuaccccaagcugagcaagagcuacaucaacgacaagggcaaggaggugcuggugcuguggggcauccaccaccccagcaccaccgccgaccagcagagccuguaccagaacgccgacgccuacguguucgugggcaccagcagauacagcaagaaguucaagcccgagaucgccaucagacccaaggugagagaccaggagggcagaaugaacuacuacuggacccugguggagcccggcgacaagaucaccuucgaggccaccggcaaccugguggugcccagauacgccuucgccauggagagaaacgccggcagcggcaucaucaucagcgacacccccgugcacgacugcaacaccaccugccagacccccaagggcgccaucaacaccagccugcccuuccagaacauccaccccaucaccaucggcaagugccccaaguacgugaagagcaccaagcugagacuggccaccggccugagaaacgugcccagcauccagagcagaggccuguucggcgccaucgccggcuucaucgagggcggcuggaccggcaugguggacggcugguacggcuaccaccaccagaacgagcagggcagcggcuacgccgccgaccugaagagcacccagaacgccaucgacaagaucaccaacaaggugaacagcgugaucgagaagaugaacacccaguucaccgccgugggcaaggaguucaaccaccuggagaagagaaucgagaaccugaacaagaagguggacgacggcuuccuggacaucuggaccuacaacgccgagcugcuggugcugcuggagaacgagagaacccuggacuaccacgacagcaacgugaagaaccuguacgagaaggugagaaaccagcugaagaccaacgccaaggagaucggcaacggcugcuucgaguucuaccacaagugcgacaacaccugcauggagagcgugaagaacggcaccuacgacuaccccaaguacagcgaggaggccaagcugaacagagaggagaucgacggcgugaagcuggagagcaccagaaucuaccagauccuggccaucuacagcaccguggccagcagccuggugcugguggugagccugggcgccaucagcuucuggaugugcagcaacggcagccugcagugcagaaucugcaucuga

SEQ ID NO: 167808 - RNA, 1701 nt, Artificial Sequence; identical to SEQ ID NO: 163471
  derived and/or modified CDS sequence (opt4) from hemagglutinin__InfluenzaA__AER08646

SEQ ID NO: 167809 - RNA, 1701 nt, Artificial Sequence; identical to SEQ ID NO: 165479
  derived and/or modified CDS sequence (opt4) from hemagglutinin__InfluenzaA__AER08648

SEQ ID NO: 167810 - RNA, 1701 nt, Artificial Sequence
  derived and/or modified CDS sequence (opt4) from hemagglutinin__InfluenzaA__AER08652
augaagaccaucaucgcccugagcuacauccugugccugguguucgcccagaagcugcccggcaacgacaacagcaccgccacccugugccugggccaccacgccgugcccaacggcaccaucgugaagaccaucaccaacgaccagaucgaggugaccaacgccaccgagcuggugcagagcagcagcaccggcgagaucugcgacagcccccaccagauccuggacggcaagaacugcacccugaucgacgcccugcugggcgacccccagugcgacggcuuccagaacaagaagugggaccuguucguggagagaagcaaggccuacagcaacugcuaccccuacgacgugcccgacuacgccagccugagaagccugguggccagcagcggcacccuggaguucaacaacgagagcuucaacuggaccggcgugacccagaacggcaccagcagcgccugcaucagaagaagcaagaacagcuucuucagcagacugaacuggcugacccaccugaacuucaaguaccccgcccugaacgugaccaugcccaacaacgagcaguucgacaagcuguacaucuggggcgugcaccaccccggcaccgacaaggaccagaucuuccuguacgcccaggccagcggcagaaucaccgugagcaccaagagaagccagcagaccgccauccccaacaucggcagcagacccagagugagaaacauccccagcagaaucagcaucuacuggaccaucgugaagcccggcgacauccugcugaucaacagcaccggcaaccugaucgcccccagaggcuacuucaagaucagaagcggcaagagcagcaucaugagaagcgacgcccccaucggcaagugcaacagcgagugcaucacccccaacggcagcauccccagcgacaagcccuuccagaacgugaacagaaucaccuacggcgccugccccagauacgugaagcagaacacccugaagcuggccaccggcaugagaaacgugcccgagaagcagaccagaggcaucuucggcgccaucgccggcuucaucgagaacggcugggagggcaugguggacggcugguacggcuucagacaccagaacagcgagggcagaggccaggccgccgaccugaagagcacccaggccgccaucgaccagaucaacggcaagcugaacagacugaucggcaagaccaacgagaaguuccaccagaucgagaaggaguucagcgagguggagggcagaauccaggaccuggagaaguacguggaggacaccaagaucgaccuguggagcuacaacgccgagcugcugguggcccuggagaaccagcacaccaucgaccugaccgacagcgagaugaacaagcuguucgagaagaccaagaagcagcugagagagaacgccgaggacaugggcaacggcugcuucaagaucuaccacaagugcgacaacgccugcaucggcagcaucagaaacggcaccuacgaccacgacguguacagagacgaggcccugaacaacagauuccagaucaagggcguggagcugaagagcggcuacaaggacuggauccuguggaucagcuucgccaucagcugcuuccugcugugcguggcccugcugggcuucaucaugugggccugccagaagggcaacaucagaugcaacaucugcaucuga

SEQ ID NO: 167811 - RNA, 1701 nt, Artificial Sequence; identical to SEQ ID NO: 167810
  derived and/or modified CDS sequence (opt4) from hemagglutinin__InfluenzaA__AER08654

SEQ ID NO: 167812 - RNA, 1701 nt, Artificial Sequence
  derived and/or modified CDS sequence (opt4) from hemagglutinin__InfluenzaA__AER08656
augaagaccaucaucgcccugagcuacauccugugccugguguucgcccagaagcugcccggcaacgacaacagcaccgccacccugugccugggccaccacgccgugcccaacggcaccaucgugaagaccaucaccaacgaccagaucgaggugaccaacgccaccgagcuggugcagagcagcagcaccggcgagaucugcgacagcccccaccagauccuggacggcaagaacugcacccugaucgacgcccugcugggcgacccccagugcgacggcuuccagaacaagaagugggaccuguucguggagagaagcaaggccuacagcaacugcuaccccuacgacgugcccgacuacgccagccugagaagccugguggccagcagcggcacccuggaguucaacaacgagagcuucaacuggaccggcgugacccagaacggcaccagcagcgccugcaucagaagaagcaagaacagcuucuucagcagacugaacuggcugacccaccugaacuucaaguaccccgcccugaacgugaccaugcccaacaacgagcaguucgacaagcuguacaucuggggcgugcaccaccccggcaccgacaaggaccagaucuuccuguacgcccaggccagcggcagaaucaccgugagcaccaagagaagccagcagaccgugauccccaacaucggcagcagacccagagugagaaacauccccagcagaaucagcaucuacuggaccaucgugaagcccggcgacauccugcugaucaacagcaccggcaaccugaucgcccccagaggcuacuucaagaugcagagcggcaagagcagcaucaugagaagcgacgcccccaucggcaagugcaacagcgagugcaucacccccaacggcagcauccccaacgacaagcccuuccagaacgugaacagaaucaccuacggcgccugccccagauacgugaagcagaacacccugaagcuggccaccggcaugagaaacgugcccgagaagcagaccagaggcaucuucggcgccaucgccggcuucaucgagaacggcugggagggcaugguggacggcugguacggcuucagacaccagaacagcgagggcagaggccaggccgccgaccugaagagcacccaggccgccaucgaccagaucaacggcaagcugaacagacugaucggcaagaccaacgagaaguuccaccagaucgagaaggaguucagcgagguggagggcagaauccaggaccuggagaaguacguggaggacaccaagaucgaccuguggagcuacaacgccgagcugcugguggcccuggagaaccagcacaccaucgaccugaccgacagcgagaugaacaagcuguucgagaagaccaagaagcagcugagagagaacgccgaggacaugggcaacggcugcuucaagaucuaccacaagugcgacaacgccugcaucggcagcaucagaaacggcaccuacgaccacgacguguacagagacgaggcccugaacaacagauuccagaucaagggcguggagcugaagagcggcuacaaggacuggauccuguggaucagcuucgccaucagcugcuuccugcugugcguggcccugcugggcuucaucaugugggccugccagaagggcaacaucagaugcaacaucugcaucuga

SEQ ID NO: 167813 - RNA, 1701 nt, Artificial Sequence
  derived and/or modified CDS sequence (opt4) from hemagglutinin__InfluenzaA__AER08660
augaagaccaucaucgcccugagcuacauccugugccugguguucgcccagaagcugcccggcaacgacaacagcaccgccacccugugccugggccaccacgccgugcccaacggcaccaucgugaagaccaucaccaacgaccagaucgaggugaccaacgccaccgagcuggugcagagcagcagcaccggcgagaucugcaacagcccccaccagauccuggacggcgagaacugcacccugaucgacgcccugcugggcgacccccagugcgacggcuuccagaacaagaagugggaccuguucguggagagaagcaaggccuacagcaacugcuaccccuacgacgugcccgacuacgccagccugagaagccugguggccagcagcggcacccuggaguucaacaacgagagcuucaacuggaccggcgugacccagaacggcaccagcagcgccugcaucagaagaagcaacaacagcuucuucagcagacugaacuggcugacccaccugaacuucaaguaccccgcccugaacgugaccaugcccaacaacgagcaguucgacaagcuguacaucuggggcgugcaccaccccggcaccgacaaggaccagaucuuccuguacgcccaggccagcggcagaaucaccgugagcaccaagagaagccagcaggccgugauccccaacaucggcagcagacccagagugagaaacauccccagcagaaucagcaucuacuggaccaucgugaagcccggcgacauccugcugaucaacagcaccggcaaccugaucgcccccagaggcuacuucaagaucagaagcggcaagagcagcaucaugagaagcgacgcccccaucggcaagugcaacagcgccugcaucacccccaacggcagcauccccaacgacaagcccuuccagaacgugaacagaaucaccuacggcgccugccccagauacgugaagcagaacacccugaagcuggccaccggcaugagaaacgugcccgagaagcagaccagaggcaucuucggcgccaucgccggcuucaucgagaacggcugggagggcaugguggacggcugguacggcuucagacaccagaacagcgagggcagaggccaggccgccgaccugaagagcacccaggccgccaucgaccagaucaacggcaagcugaacagacugaucggcaagaccaacgagaaguuccaccagaucgagaaggaguucagcgagguggagggcagaauccaggaccuggagaaguacguggaggacaccaagaucgaccuguggagcuacaacgccgagcugcugguggcccuggagaaccagcacaccaucgaccugaccgacagcgagaugaacaagcuguucgagaagaccaagaagcagcugagagagaacgccgaggacaugggcaacggcugcuucaagaucuaccacaagugcgacaacgccugcaucggcagcaucagaaacggcaccuacgaccacgacguguacagagacgaggcccugaacaacagauuccagaucaagggcguggagcugaagagcggcuacaaggacuggauccuguggaucagcuucgccaucagcugcuuccugcugugcguggcccugcugggcuucaucaugugggccugccagaagggcaacaucagaugcaacaucugcaucuga

SEQ ID NO: 167814 - RNA, 1701 nt, Artificial Sequence
  derived and/or modified CDS sequence (opt4) from hemagglutinin__InfluenzaA__AER08664
augaagaccaucaucgcccugagcuacauccugugccugguguucgcccagaagcugcccggcaacgacaacagcaccgccacccugugccugggccaccacgccgugcccaacggcaccaucgugaagaccaucaccaacgaccagaucgaggugaccaacgccaccgagcuggugcagagcagcagcaccggcgagaucugcgacagcccccaccagauccuggacggcgagaacugcacccugaucgacgcccugcugggcgacccccagugcgacggcuuccagaacaagaagugggaccuguucguggagagaagcaaggccuacagcaacugcuaccccuacgacgugcccgacuacgccagccugagaagccugguggccagcagcggcacccuggaguucaacagcgagagcuucaacuggaccggcgugacccagaacggcaccagcagcgccugcaucagaagaagcaacaacagcuucuucagcagacugaacuggcugacccaccugaacuucaaguaccccgcccugaacgugaccaugcccaacaacgagcaguucgacaagcuguacaucuggggcgugcaccaccccggcaccgacaaggaccagaucuuccuguacgcccaggccagcggcagaaucaccgugagcaccaagagaagccagcaggccgugauccccaacaucggcagcagacccagagugagaaacauccccagcagaaucagcaucuacuggaccaucgugaagcccggcgacauccugcugaucaacagcaccggcaaccugaucgcccccagaggcuacuucaagaucagaagcggcaagagcagcaucaugagaagcgacgcccccaucggcaagugcaacagcgagugcaucacccccaacggcagcauccccaacgacaagcccuuccagaacgugaacagaaucaccuacggcgccugccccagauacgugaagcagagcacccugaagcuggccaccggcaugagaaacgugcccgagaagcagaccagaggcaucuucggcgccaucgccggcuucaucgagaacggcugggagggcaugguggacggcugguacggcuucagacaccagaacagcgagggcagaggccaggccgccgaccugaagagcacccaggccgccaucgaccagaucaacggcaagcugaacagacugaucggcaagaccaacgagaaguuccaccagaucgagaaggaguucagcgagguggagggcagaauccaggaccuggagaaguacguggaggacaccaagaucgaccuguggagcuacaacgccgagcugcugguggcccuggagaaccagcacaccaucgaccugaccgacagcgagaugaacaagcuguucgagaagaccaagaagcagcugagagagaacgccgaggacaugggcaacggcugcuucaagaucuaccacaagugcgacaacgccugcaucggcagcaucagaaacggcaccuacgaccacgacguguacagagacgaggcccugaacaacagauuccagaucaagggcguggagcugaagagcggcuacaaggacuggauccuguggaucagcuucgccaucagcugcuuccugcugugcguggcccugcugggcuucaucaugugggccugccagaagggcaacaucagaugcaacaucugcaucuga

SEQ ID NO: 167815 - RNA, 1701 nt, Artificial Sequence; identical to SEQ ID NO: 167042
  derived and/or modified CDS sequence (opt4) from hemagglutinin__InfluenzaA__AER08668

SEQ ID NO: 167816 - RNA, 1701 nt, Artificial Sequence
  derived and/or modified CDS sequence (opt4) from hemagglutinin__InfluenzaA__AER08670
augaagaccaucaucgcccugagcuacauccugugccugguguucgcccagaagcugcccggcaacgacaacagcaccgccacccugugccugggccaccacgccgugcccaacggcaccaucgugaagaccaucaccaacgaccagaucgaggugaccaacgccaccgagcuggugcagagcagcagcaccggcgagaucugcaacagcccccaccagauccuggacggcgagaacugcacccugaucgacgcccugcugggcgacccccagugcgacggcuuccagaacaagaagugggaccuguucguggagagaagcaaggcccacagcaacugcuaccccuacgacgugcccgacuacgccagccugagaagccugguggccagcagcggcacccuggaguucaacaacgagagcuucaacuggaccggcgugacccagaacggcaccagcagcgccugcaucagaagaagcaacaacagcuucuucagcagacugaacuggcugacccaccugaacuucaaguaccccgcccugaacgugaccaugcccaacaacgagcaguucgacaagcuguacaucuggggcgugcaccaccccggcaccgacaaggaccagaucuuccuguacgcccaggccagcggcagaaucaccgugagcaccaagagaagccagcaggccgugauccccaacaucggcagcagacccagagugagaaacauccccagcagagugagcaucuacuggaccaucgugaagcccggcgacauccugcugaucaacagcaccggcaaccugaucgcccccagaggcuacuucaagaucagaagcggcaagagcagcaucaugaagagcgacgcccccaucggcaagugcaacagcgccugcaucacccccaacggcagcauccccaacgacaagcccuuccagaacgugaacagaaucaccuacggcgccugccccagauacgugaagcagaacacccugaagcuggccaccggcaugagaaacgugcccgagaagcagaccagaggcaucuucggcgccaucgccggcuucaucgagaacggcugggagggcaugguggacggcugguacggcuucagacaccagaacagcgagggcagaggccaggccgccgaccugaagagcacccaggccgccaucgaccagaucaacggcaagcugaacagacugaucggcaagaccaacgagaaguuccaccagaucgagaaggaguucagcgagguggagggcagaauccaggaccuggagaaguacguggaggacaccaagaucgaccuguggagcuacaacgccgagcugcugguggcccuggagaaccagcacaccaucgaccugaccgacagcgagaugaacaagcuguucgagaagaccaagaagcagcugagagagaacgccgaggacaugggcaacggcugcuucaagaucuaccacaagugcgacaacgccugcaucggcagcaucagaaacggcaccuacgaccacgacguguacagagacgaggcccugaacaacagauuccagaucaagggcguggagcugaagagcggcuacaaggacuggauccuguggaucagcuucgccaucagcugcuuccugcugugcguggcccugcugggcuucaucaugugggccugccagaagggcaacaucagaugcaacaucugcaucuga

SEQ ID NO: 167817 - RNA, 1701 nt, Artificial Sequence
  derived and/or modified CDS sequence (opt4) from hemagglutinin__InfluenzaA__AER08672
augaagaccaucaucgcccugagcuacauccugugccugguguucgcccagaagcugcccggcaacgacaacagcaccgccacccugugccugggccaccacgccgugcccaacggcaccaucgugaagaccaucaccaacgaccagaucgaggugaccaacgccaccgagcuggugcagagcagcagcaccggcggcaucugcgacagcccccaccagauccuggacggcggcaacugcacccugaucgacgcccugcugggcgacccccagugcgacggcuuccagaacaagaagugggaccuguucguggagagaagcaaggccuacagcaacugcuaccccuacgacgugcccgacuacgccagccugagaagccugguggccagcagcggcacccuggaguucaacagcgagagcuucaacuggaccggcgugacccagaacggcaccagcagcgccugcaucagaagaagcaacaacagcuucuucagcagacugaacuggcugacccaccugaacuucaaguaccccgcccugaacgugaccaugcccaacaacgagcaguucgacaagcuguacaucuggggcgugcaccaccccggcaccgacaaggaccagaucuuccuguacgcccaggccagcggcagaaucaccgugagcaccaagagaagccagcaggccgugauccccaacaucggcagcagacccagagugagaaacauccccagcagaaucagcaucuacuggaccaucgugaagcccggcgacauccugcugaucaacagcaccggcaaccugaucgcccccagaggcuacuucaagaucagaagcggcaagagcagcaucaugagaagcgacgcccccaucggcaagugcaacagcgagugcaucacccccaacggcagcauccccaacgacaagcccuuccagaacgugaacagaaucaccuacggcgccugccccagauacgugaagcagagcacccugaagcuggccaccggcaugagaaacgugcccgagaagcagaccagaggcaucuucggcgccaucgccggcuucaucgagaacggcugggagggcaugguggacggcugguacggcuucagacaccagaacagcgagggcagaggccaggccgccgaccugaagagcacccaggccgccaucgaccagaucaacggcaagcugaacagacugaucggcaagaccaacgagaaguuccaccagaucgagaaggaguucagcgagguggagggcagaauccaggaccuggagaaguacguggaggacaccaagaucgaccuguggagcuacaacgccgagcugcugguggcccuggagaaccagcacaccaucgaccugaccgacagcgagaugaacaagcuguucgagaagaccaagaagcagcugagagagaacgccgaggacaugggcaacggcugcuucaagaucuaccacaagugcgacaacgccugcaucggcagcaucagaaacggcaccuacgaccacgacguguacagagacgaggcccugaacaacagauuccagaucaagggcguggagcugaagagcggcuacaaggacuggauccuguggaucagcuucgccaucagcugcuuccugcugugcguggcccugcugggcuucaucaugugggccugccagaagggcaacaucagaugcaacaucugcaucuga

SEQ ID NO: 167818 - RNA, 1701 nt, Artificial Sequence
  derived and/or modified CDS sequence (opt4) from hemagglutinin__InfluenzaA__AER08674
augaagaccaucaucgcccugagcuacauccugugccugguguucgcccagaagcugcccggcaacgacaacagcaccgccacccugugccugggccaccacgccgugcccaacggcaccauggugaagaccaucaccaacgaccagaucgaggugaccaacgccaccgagcuggugcagagcagcagcaccggcgagaucugcaacagcccccaccagauccuggacggcgagaacugcacccugaucgacgcccugcugggcgacccccagugcgacggcuuccagaacaagaagugggaccuguucguggagagaagcaaggcccacagcaacugcuaccccuacgacgugcccgacuacgccagccugagaagccugguggccagcagcggcacccuggaguucaacaacgagagcuucaacuggaccggcgugacccagaacggcaccagcagcgccugcaucagaagaagcaacaacagcuucuucagcagacugaacuggcugacccaccugaacuucaaguaccccgcccugaacgugaccaugcccaacaacgagcaguucgacaagcuguacaucuggggcgugcaccaccccggcaccgacaaggaccagaucuuccuguacgcccaggccagcggcagaaucaccgugagcaccaagagaagccagcaggccgugauccccaacaucggcagcagacccagagugagaaacauccccagcagagugagcaucuacuggaccaucgugaagcccggcgacauccugcugaucaacagcaccggcaaccugaucgcccccagaggcuacuucaagaucagaagcggcaagagcagcaucaugagaagcgacgcccccaucggcaagugcaacagcgccugcaucacccccaacggcagcauccccaacgacaagcccuuccagaacgugaacagaaucaccuacggcgccugccccagauacgugaagcagaacacccugaagcuggccaccggcaugagaaacgugcccgagaagcagaccagaggcaucuucggcgccaucgccggcuucaucgagaacggcugggagggcaugguggacggcugguacggcuucagacaccagaacagcgagggcagaggccaggccgccgaccugaagagcacccaggccgccaucgaccagaucaacggcaagcugaacagacugaucggcaagaccaacgagaaguuccaccagaucgagaaggaguucagcgagguggagggcagaauccaggaccuggagaaguacguggaggacaccaagaucgaccuguggagcuacaacgccgagcugcugguggcccuggagaaccagcacaccaucgaccugaccgacagcgagaugaacaagcuguucgagaagaccaagaagcagcugagagagaacgccgaggacaugggcaacggcugcuucaagaucuaccacaagugcgacaacgccugcaucggcagcaucagaaacggcaccuacgaccacgacguguacagagacgaggcccugaacaacagauuccagaucaagggcguggagcugaagagcggcuacaaggacuggauccuguggaucagcuucgccaucagcugcuuccugcugugcguggcccugcugggcuucaucaugugggccugccagaagggcaacaucagaugcaacaucugcaucuga

SEQ ID NO: 167819 - RNA, 1701 nt, Artificial Sequence; identical to SEQ ID NO: 167042
  derived and/or modified CDS sequence (opt4) from hemagglutinin__InfluenzaA__AER08676

SEQ ID NO: 167820 - RNA, 1701 nt, Artificial Sequence; identical to SEQ ID NO: 167042
  derived and/or modified CDS sequence (opt4) from hemagglutinin__InfluenzaA__AER08678

SEQ ID NO: 167821 - RNA, 1701 nt, Artificial Sequence
  derived and/or modified CDS sequence (opt4) from hemagglutinin__InfluenzaA__AER08680
augaagaccaucaucgcccugagcuacauccugugccugguguucgcccagaagcugcccggcaacgacaacagcaccgccacccugugccugggccaccacgccgugcccaacggcaccaucgugaagaccaucaccaacgaccagaucgaggugaccaacgccaccgagcuggugcagagcagcagcgccggcgagaucugcgacagcccccaccagauccuggacggcgagaacugcacccugaucgacgcccugcugggcgacccccagugcgacggcuuccagaacaagaagugggaccuguucguggagagaagcagagcccacagcaacugcuaccccuacgacgugcccgacuacgccagccugagaagccugguggccagcagcggcacccuggaguucaacaacgagagcuucaacuggaccggcgugacccagaacggcaccagcagcgccugcaucagaagaagcaacaacagcuucuucagcagacugaacuggcugacccaccugaacuucaaguaccccgcccugaacgugaccaugcccaacaacgagcaguucgacaagcuguacaucuggggcgugcaccaccccggcaccgacaaggaccagaucuuccuguacgcccaggccagcggcagaaucaccgugagcaccaagagaagccagcaggccgugauccccaacaucggcagcagacccagagugagaaacauccccagcagaaucagcaucuacuggaccaucgugaagcccggcgacauccugcugaucaacagcaccggcaaccugaucgcccccagaggcuacuucaagaucagaagcggcaagagcagcaucaugagaagcgacgcccccaucggcaagugcaacagcgagugcaucacccccaacggcagcauccccaacgacaagcccuuccagaacgugaacagaaucaccuacggcgccugccccagauacgugaagcagagcacccugaagcuggccaccggcaugagaaacgugcccgagaagcagaccagaggcaucuucggcgccaucgccggcuucaucgagaacggcugggagggcaugauggacggcugguacggcuucagacaccagaacagcgagggcagaggccaggccgccgaccugaagagcacccaggccgccaucgaccagaucaacggcaagcugaacagacugaucggcaagaccaacgagaaguuccaccagaucgagaaggaguucagcgagguggagggcagaauccaggaccuggagaaguacguggaggacaccaagaucgaccuguggagcuacaacgccgagcugcugguggcccuggagaaccagcacaccaucgaccugaccgacagcgagaugaacaagcuguucgagaagaccaagaagcagcugagagagaacgccgaggacaugggcaacggcugcuucaagaucuaccacaagugcgacaacgccugcaucggcagcaucagaaacggcaccuacgaccacgacguguacagagacgaggcccugaacaacagauuccagaucaagggcguggagcugaagagcggcuacaaggacuggauccuguggaucagcuucgccaucagcugcuuccugcugugcguggcccugcugggcuucaucaugugggccugccagaagggcaacaucagaugcaacaucugcaucuga

SEQ ID NO: 167822 - RNA, 1701 nt, Artificial Sequence
  derived and/or modified CDS sequence (opt4) from hemagglutinin__InfluenzaA__AER08682
augaagaccgugaucgcccugagcuacauccugugccugguguucgcccagaagcugcccggcaacgacaacagcaccgccacccugugccugggccaccacgccgugcccaacggcaccaucgugaagaccaucaccaacgaccagaucgaggugaccaacgccaccgagcuggugcagagcagcagcaccggcgagaucugcaacagcccccaccagauccuggacggcgagaacugcacccugaucgacgcccugcugggcgacccccagugcgacggcuuccagaacaagaagugggaccuguucguggagagaagcaaggcccacagcaacugcuaccccuacgacgugcccgacuacgccagccugagaagccugguggccagcagcggcacccuggaguucaacaacgagagcuucaacuggaccggcgugacccagaacggcaccagcagcgccugcaucagaagaagcaacaacagcuucuucagcagacugaacuggcugacccaccugaacuucaaguaccccgcccugaacgugaccaugcccaacaacgagcaguucgacaagcuguacaucuggggcgugcaccaccccggcaccgacaaggaccagaucuuccuguacgcccaggccagcggcagaaucaccgugagcaccaagagaagccagcaggccgugauccccaacaucggcagcagacccagagugagaaacauccccagcagagugagcaucuacuggaccaucgugaagcccggcgacauccugcugaucaacagcaccggcaaccugaucgcccccagaggcuacuucaagaucagaagcggcaagagcagcaucaugagaagcgacgcccccaucggcaagugcaacagcgccugcaucacccccaacggcagcauccccaacgacaagcccuuccagaacgugaacagaaucaccuacggcgccugccccagauacgugaagcagaacacccugaagcuggccaccggcaugagaaacgugcccgagaagcagaccagaggcaucuucggcgccaucgccggcuucaucgagaacggcugggagggcaugguggacggcugguacggcuucagacaccagaacagcgagggcagaggccaggccgccgaccugaagagcacccaggccgccaucgaccagaucaacggcaagcugaacagacugaucggcaagaccaacgagaaguuccaccagaucgagaaggaguucagcgagguggagggcagaauccaggaccuggagaaguacguggaggacaccaagaucgaccuguggagcuacaacgccgagcugcugguggcccuggagaaccagcacaccaucgaccugaccgacagcgagaugaacaagcuguucgagaagaccaagaagcagcugagagagaacgccgaggacaugggcaacggcugcuucaagaucuaccacaagugcgacaacgccugcaucggcagcaucagaaacggcaccuacgaccacgacguguacagagacgaggcccugaacaacagauuccagaucaagggcguggagcugaagagcggcuacaaggacuggauccuguggaucagcuucgccaucagcugcuuccugcugugcguggcccugcugggcuucaucaugugggccugccagaagggcaacaucagaugcaacaucugcaucuga

SEQ ID NO: 167823 - RNA, 1701 nt, Artificial Sequence
  derived and/or modified CDS sequence (opt4) from hemagglutinin__InfluenzaA__AER08684
augaagaccaucaucgcccugagcuacauccugugccugguguucgcccagaagcugcccggcaacgacaacagcaccgccacccugugccugggccaccacgccgugcccaacggcaccaucgugaagaccaucaccaacgaccagaucgaggugaccaacgccaccgagcuggugcagagcagcagcaccggcgagaucugcaacagcccccaccagauccuggacggcgagaacugcacccugaucgacgcccugcugggcgacccccagugcgacggcuuccagaacaagaagugggaccuguucguggagagaagcaaggcccacagcaacugcuaccccuacgacgugcccgacuacgccagccugagaagccugguggccagcagcggcacccuggaguucaacaacgagagcuucaacuggaccggcgugacccagaacggcaccagcagcgccugcaucagaagaagcaacaacagcuucuucagcagacugaacuggcugacccaccugaacuucaaguaccccgcccugaacgugaccaugcccaacaacgagcaguucgacaagcuguacaucuggggcgugcaccaccccggcaccgacaaggaccagaucuuccuguacgcccaggccagcggcagaaucaccgugagcaccaagagaagccagcaggccgugauccccaacaucggcagcagacccagagugagaaacauccccagcagagugagcaucuacuggaccaucgugaagcccggcgacauccugcugaucaacagcaccggcaaccugaucgcccccagaggcuacuucaagaucagaagcggcaagagcagcaucaugagaagcgacgcccccaucggcaagugcaacagcaccugcaucacccccaacggcagcauccccaacgacaagcccuuccagaacgugaacagaaucaccuacggcgccugccccagauacgugaagcagaacacccugaagcuggccaccggcaugagaaacgugcccgagaagcagaccagaggcaucuucggcgccaucgccggcuucaucgagaacggcugggagggcaugguggacggcugguacggcuucagacaccagaacagcgagggcagaggccaggccgccgaccugaagagcacccaggccgccaucgaccagaucaacggcaagcugaacagacugaucggcaagaccaacgagaaguuccaccagaucgagaaggaguucagcgagguggagggcagaauccaggaccuggagaaguacguggaggacaccaagaucgaccuguggagcuacaacgccgagcugcugguggcccuggagaaccagcacaccaucgaccugaccgacagcgagaugaacaagcuguucgagaagaccaagaagcagcugagagagaacgccgaggacaugggcaacggcugcuucaagaucuaccacaagugcgacaacgccugcaucggcagcaucagaaacggcaccuacgaccacgacguguacagagacgaggcccugaacaacagauuccagaucaagggcguggagcugaagagcggcuacaaggacuggauccuguggaucagcuucgccaucagcugcuuccugcugugcguggcccugcugggcuucaucaugugggccugccagaagggcaacaucagaugcaacaucugcaucuga

SEQ ID NO: 167824 - RNA, 1701 nt, Artificial Sequence
  derived and/or modified CDS sequence (opt4) from hemagglutinin__InfluenzaA__AER08686
augaagaccaucaucgcccugagcuacauccugugccugguguucgcccagaagcugcccggcaacgacaacagcaccgccacccugugccugggccaccacgccgugcccaacggcaccaucgugaagaccaucaccaacgaccagaucgaggugaccaacgccaccgagcuggugcagagcagcagcaccggcgagaucugcaacagcccccaccagauccuggacggcgagaacugcacccugaucgacgcccugcugggcgacccccagugcgacggcuuccagaacaagaagugggaccuguucguggagagaagcaaggcccacagcaacugcuaccccuacgacgugcccgacuacgccagccugagaagccugguggccagcagcggcacccuggaguucaacaacgagagcuucaacuggaccggcgugacccagaacggcaccagcagcgccugcaucagaagaagcaacaacagcuucuucagcagacugaacuggcugacccaccugaacuucaaguaccccgcccugaacgugaccaugcccaacaacgagcaguucgacaagcuguacaucuggggcgugcaccaccccggcaccgacaaggaccagaucuuccuguacgcccaggccagcggcagaaucaccgugagcaccaagagaagccagcaggccgugauccccaacaucggcagcagacccagagugagaaacauccccagcagagugagcaucuacuggaccaucgugaagcccggcgacauccugcugaucaacagcaccggcaaccugaucgcccccagaggcuacuucaagaucagaagcggcaagagcagcaucaugagaagcgacgcccccaucggcaagugcaacagcaccugcaucacccccaacggcagcauccccaacgacaagcccuuccagaacgugaacagaaucaccuacggcgccugccccagauacgugaagcagaacacccugaagcuggccaccggcaugagaaacgugcccgagaagcagaccagaggcaucuucggcgccaucgccggcuucaucgagaacggcugggagggcaugguggacggcugguacggcuucagacaccagaacagcgagggcagaggccaggccgccgaccugaagagcacccaggccgccaucgaccagaucaacggcaagcugaacagacugaucggcaagaccaacgagaaguuccaccagaucgagaaggaguucagcgagguggagggcagaauccaggaccuggagaaguacaucgaggacaccaagaucgaccuguggagcuacaacgccgagcugcugguggcccuggagaaccagcacaccaucgaccugaccgacagcgagaugaacaagcuguucgagaagaccaagaagcagcugagagagaacgccgaggacaugggcaacggcugcuucaagaucuaccacaagugcgacaacgccugcaucggcagcaucagaaacggcaccuacgaccacgacguguacagagacgaggcccugaacaacagauuccagaucaagggcguggagcugaagagcggcuacaaggacuggauccuguggaucagcuucgccaucagcugcuuccugcugugcguggcccugcugggcuucaucaugugggccugccagaagggcaacaucagaugcaacaucugcaucuga

SEQ ID NO: 167825 - RNA, 1701 nt, Artificial Sequence; identical to SEQ ID NO: 167042
  derived and/or modified CDS sequence (opt4) from hemagglutinin__InfluenzaA__AER08688

SEQ ID NO: 167826 - RNA, 1701 nt, Artificial Sequence
  derived and/or modified CDS sequence (opt4) from hemagglutinin__InfluenzaA__AER08690
augaagaccaucaucgcccugagcuacauccugugccugguguucgcccagaagcugcccgagaacgacaacagcaccgccacccugugccugggccaccacgccgugcccaacggcaccaucgugaagaccaucaccaacgaccagaucgaggugaccaacgccaccgagcuggugcagagcagcagcaccggcgagaucugcaacagcccccaccagauccuggacggcgagaacugcacccugaucgacgcccugcugggcgacccccagugcgacggcuuccagaacaagaagugggaccuguucguggagagaagcaaggcccacagcaacugcuaccccuacgacgugcccgacuacgccagccugagaagccugguggccagcagcggcacccuggaguucaacaacgagagcuucaacuggaccggcgugacccagaacggcaccagcagcgccugcaucagaagaagcaacaacagcuucuucagcagacugaacuggcugacccaccugaacuucaaguaccccgcccugaacgugaccaugcccaacaacgagcaguucgacaagcuguacaucuggggcgugcaccaccccggcaccgacaaggaccagaucuuccuguacgcccaggccagcggcagaaucaccgugagcaccaagagaagccagcaggccgugauccccaacaucggcagcagacccagagugagaaacauccccagcagagugagcaucuacuggaccaucgugaagcccggcgacauccugcugaucaacagcaccggcaaccugaucgcccccagaggcuacuucaagaucagaagcggcaagagcagcaucaugagaagcgacgcccccaucggcaagugcaacagcaccugcaucacccccaacggcagcauccccaacgacaagcccuuccagaacgugaacagaaucaccuacggcgccugccccagauacgugaagcagaacacccugaagcuggccaccggcaugagaaacgugcccgagaagcagaccagaggcaucuucggcgccaucgccggcuucaucgagaacggcugggagggcaugguggacggcugguacggcuucagacaccagaacagcgagggcagaggccaggccgccgaccugaagagcacccaggccgccaucgaccagaucaacggcaagcugaacagacugaucggcaagaccaacgagaaguuccaccagaucgagaaggaguucagcgagguggagggcagaauccaggaccuggagaaguacguggaggacaccaagaucgaccuguggagcuacaacgccgagcugcugguggcccuggagaaccagcacaccaucgaccugaccgacagcgagaugaacaagcuguucgagaagaccaagaagcagcugagagagaacgccgaggacaugggcaacggcugcuucaagaucuaccacaagugcgacaacgccugcaucggcagcaucagaaacggcaccuacgaccacgacguguacagagacgaggcccugaacaacagauuccagaucaagggcguggagcugaagagcggcuacaaggacuggauccuguggaucagcuucgccaucagcugcuuccugcugugcguggugcugcugggcuucaucaugugggccugccagaagggcaacaucagaugcaacaucugcaucuga

SEQ ID NO: 167827 - RNA, 1701 nt, Artificial Sequence; identical to SEQ ID NO: 167042
  derived and/or modified CDS sequence (opt4) from hemagglutinin__InfluenzaA__AER08692

SEQ ID NO: 167828 - RNA, 1701 nt, Artificial Sequence
  derived and/or modified CDS sequence (opt4) from hemagglutinin__InfluenzaA__AER08698
augaagaccaccaucgcccugagccacauccugugccugguguucgcccagaagcugcccggcaacgacaacagcaccgccacccugugccugggccaccacgccgugcccaacggcaccaucgugaagaccaucaccaacgaccagaucgaggugaccaacgccaccgagcuggugcagagcagcagcgccggcgagaucugcgacagcccccaccagauccuggacggcgagaacugcacccugaucgacgcccugcugggcgacccccagugcgacggcuuccagaacaagaagugggaccuguucguggagagaagcagagccuacagcaacugcuaccccuacgacgugcccgacuacgccagccugagaagccugguggccagcagcggcacccuggaguucaacaacgagagcuucaacuggaccggcgugacccagaacggcaccagcagcgccugcaucagaagaagcaacaacagcuucuucagcagacugaacuggcugacccaccugaacuucaaguaccccgcccugaacgugaccaugcccaacaacgagcaguucgacaagcuguacaucuggggcgugcaccaccccggcaccgacaaggaccagaucuuccuguacgcccaggccagcggcagaaucaccgugagcaccaagagaagccagcaggccgugauccccaacaucggcagcagacccagagugagaaacauccccagcagaaucagcaucuacuggaccaucgugaagcccggcgacauccugcugaucaacagcaccggcaaccugaucgcccccagaggcuacuucaagaucagaagcggcaagagcagcaucaugagaagcgacgcccccaucggcaagugcaacagcgagugcaucacccccaacggcagcauccccaacgacaagcccuuccagaacgugaacagaaucaccuacggcgccugccccagauacgugaagcagagcacccugaagcuggccaccggcaugagaaacgugcccgagaagcagaccagaggcaucuucggcgccaucgccggcuucaucgagaacggcugggagggcaugguggacggcugguacggcuucagacaccagaacagcgagggcagaggccaggccgccgaccugaagagcacccaggccgccaucgaccagaucaacggcaagcugaacagacugaucggcaagaccaacgagaaguuccaccagaucgagaaggaguucagcgagguggagggcagaauccaggaccuggagaaguacguggaggacaccaagaucgaccuguggagcuacaacgccgagcugcugguggcccuggagaaccagcacaccaucgaccugaccgacagcgagaugaacaagcuguucgagaagaccaagaagcagcugagagagaacgccgaggacaugggcaacggcugcuucaagaucuaccacaagugcgacaacgccugcaucggcagcaucagaaacggcaccuacgaccacgacguguacagagacgaggcccugaacaacagauuccagaucaagggcguggagcugaagagcggcuacaaggacuggauccuguggaucagcuucgccaucagcugcuuccugcugugcguggcccugcugggcuucaucaugugggccugccagaagggcaacaucagaugcaacaucugcaucuga

SEQ ID NO: 167829 - RNA, 1701 nt, Artificial Sequence; identical to SEQ ID NO: 167042
  derived and/or modified CDS sequence (opt4) from hemagglutinin__InfluenzaA__AER08700

SEQ ID NO: 167830 - RNA, 1701 nt, Artificial Sequence
  derived and/or modified CDS sequence (opt4) from hemagglutinin__InfluenzaA__AER92712
augaaggccauccugguggugcugcuguacaccuucgccaccgccaacgccgacacccugugcaucggcuaccacgccaacaacagcaccgacaccguggacaccgugcuggagaagaacgugaccgugacccacagcguggaccugcuggaggacaagcacaacggcaagcugugcaagcugagaggcguggccccccugcaccugggcaagugcaacaucgccggcuggauccugggcaaccccgagugcgagagccugagcaccgccagcagcuggagcuacaucguggagaccagcaacagcgacaacggcaccugcuaccccggcgacuucaucgacuacgaggagcugagagagcagcugagcagcgugagcagcuucgagagauucgagaucuuccccaagaccagcagcuggcccaaccacgacagcaacaagggcgugaccgccgccugcccccacgccggcgccaagagcuucuacaagaaccugaucuggcuggugaagaagggcaacagcuaccccaagcugaacaagagcuacaucaacgacaagggcaaggaggugcuggugcuguggggcauccaccaccccagcaccagcaccgaccagcagagccuguaccagaacgccgacgccuacguguucgugggcaccagcagauacagcaagaaguucaagcccgagaucgccaucagacccaaggugagaaaccaggagggcagaaugaacuacuacuggacccugguggagcccggcgacaagaucaccuucgaggccaccggcaaccugguggugcccagauacgccuucaccaucgagagaaacgccggcagcggcaucaucaucagcgacacccccauccacgacugcaacaccaccugccagacccccaagggcgccaucaacaccagccugcccuuccagaacauccaccccaucaccaucggcaagugccccaaguacgugaagagcaccaagcugagacuggccaccggccugagaaacgugcccagcauccagagcagaggccuguucggcgccaucgccggcuucaucgagggcggcuggaccggcaugguggacggcugguacggcuaccaccaccagaacgagcagggcagcggcuacgccgccgaccugaagagcacccagaacgccaucgacgagaucaccaacaaggugaacagcgugaucgagaagaugaacacccaguucaccgccgugggcaaggaguucaaccaccuggagaagagaaucgagaaccugaacaagaagguggacgacggcuuccuggacaucuggaccuacaacgccgagcugcuggugcugcuggagaacgagagaacccuggacuaccacgacagcaacgugaagaaccuguacgagaaggugagaagccagcugaagaacaacgccaaggagaucggcaacggcugcuucgaguucuaccacaagugcgacaacaccugcauggagagcgugaagaacggcaccuacgacuaccccaaguacagcgaggaggccaagcugaacagagaggagaucgacggcgugaagcuggagagcaccagaaucuaccagauccuggccaucuacagcaccguggccagcagccuggugcugguggugagccugggcgccaucagcuucuggaugugcagcaacggcagccugcagugcagaaucugcaucuga

SEQ ID NO: 167831 - RNA, 1701 nt, Artificial Sequence; identical to SEQ ID NO: 165593
  derived and/or modified CDS sequence (opt4) from hemagglutinin__InfluenzaA__AET10090

SEQ ID NO: 167832 - RNA, 1701 nt, Artificial Sequence; identical to SEQ ID NO: 165593
  derived and/or modified CDS sequence (opt4) from hemagglutinin__InfluenzaA__AET10091

SEQ ID NO: 167833 - RNA, 1701 nt, Artificial Sequence; identical to SEQ ID NO: 165593
  derived and/or modified CDS sequence (opt4) from hemagglutinin__InfluenzaA__AET10092

SEQ ID NO: 167834 - RNA, 1701 nt, Artificial Sequence
  derived and/or modified CDS sequence (opt4) from hemagglutinin__InfluenzaA__AET10094
augaagaccaucaucgcccugagcugcauccugugccugguguucgcccagaagcugcccggcaacgacaacagcaccgccacccugugccugggccaccacgccgugcccaacggcaccaucgugaagaccaucaccaacgaccagaucgaggugaccaacgccaccgagcuggugcagagcagcagcaccggcgagaucugcgacagcccccaccagauccuggacggcgagaacugcacccugaucgacgcccugcugggcgacccccagugcgacggcuuccagaacaagaagugggaccuguucguggagagaagcaaggccuacagcagcugcuaccccuacgacgugcccgacuacgccagccugagaagccugguggccagcagcggcacccuggaguucaacaacgagagcuucaacuggaccggcgugacccagaacggcaccagcagcgccugcaucagaagaagcaacaacagcuucuucagcagacugaacuggcugacccaccugaacuucaaguaccccgcccugaacgugaccaugcccaacaacgagcaguucgacaagcuguacaucuggggcgugcaccaccccggcaccgacaaggaccagaucuuccuguacgcccaggccagcggcagaaucaccgugagcaccaagagaagccagcaggccgugauccccaacaucggcagcagacccagagugagaaacauccccagcagaaucagcaucuacuggaccaucgugaagcccggcgacauccugcugaucaacagcaccggcaaccugaucgcccccagaggcuacuucaagaucagaagcggcaagagcagcaucaugagaagcgacgcccccaucggcaagugcaacagcgagugcaucacccccaacggcagcauccccaacgacaagcccuuccagaacgugaacagaaucaccuacggcgccugccccagauacgugaagcagagcacccugaagcuggccaccggcaugagaaacgugcccgagaagcagaccagaggcaucuucggcgccaucgccggcuucaucgagaacggcugggagggcaugguggacggcugguacggcuucagacaccagaacagcgagggcagaggccaggccgccgaccugaagagcacccaggccgccaucgaccagaucaacggcaagcugaacagacugaucggcaagaccaacgagaaguuccaccagaucgagaaggaguucagcgagguggagggcagaauccaggaccuggagaaguacguggaggacaccaagaucgaccuguggagcuacaacgccgagcugcugguggcccuggagaaccagcacaccaucgaccugaccgacagcgagaugaacaagcuguucgagaagaccaagaagcagcugagagagaacgccgaggacaugggcaacggcugcuucaccaucuaccacaagugcgacaacgccugcaucggcagcaucagaaacggcaccuacgaccacaacguguacagagacgaggcccugaacaacagauuccagaucaagggcguggagcugaagagcggcuacaaggacuggauccuguggaucagcuucgccaucagcugcuuccugcugugcguggcccugcugggcuucaucaugugggccugccagaagggcaacaucagaugcaacaucugcaucuga

SEQ ID NO: 167835 - RNA, 1701 nt, Artificial Sequence
  derived and/or modified CDS sequence (opt4) from hemagglutinin__InfluenzaA__AET10095
augaagaccaucaucgcccugagcuacauccugugccugguguucgcccagaagcugcccggcaacgacaacagcaccgccacccugugccugggccaccacgccgugcccaacggcaccaucgugaagaccaucaccaacgaccagaucgaggugaccaacgccaccgagcuggugcagagcagcagcaccggcgagaucugcgacagcccccaccagauccuggacggcgagaacugcacccugaucgacgcccugcugggcgacccccagugcgacggcuuccagaacaagaagugggaccuguucguggagagaagcaaggccuacagcaacugcuaccccuacgacgugcccgacuacgccagccugagaagccugguggccagcagcggcacccuggaguucaacaacgagagcuucaacuggaccggcgugacccagaacggcaccagcagcgccugcaucagaagaagcaacaacagcuucuucagcagacugaacuggcugacccaccugaacuucaaguaccccgcccugaacgugaccaugcccaacaacgagcaguucgacaagcuguacaucuggggcgugcaccaccccggcaccgacaaggaccagaucuuccuguacgcccaggccagcggcagaaucaccgugagcaccaagagaagccagcaggccgugauccccaacaucggcagcagacccagagugagaaacauccccagcagaaucagcaucuacuggaccaucgugaagcccggcgacauccugcugaucaacagcaccggcaaccugaucgcccccagaggcuacuucaagaucagaagcggcaagagcagcaucaugagaagcgacacccccaucggcaagugcaacagcgagugcaucacccccaacggcagcauccccaacgacaagcccuuccagaacgugaacagaaucaccuacggcgccugccccagauacgugaagcagaacacccugaagcuggccaccggcaugagaaacgugcccgagaagcagaccagaggcaucuucggcgccaucgccggcuucaucgagaacggcugggagggcaugguggacggcugguacggcuucagacaccagaacagcgagggcagaggccaggccgccgaccugaagagcacccaggccgccaucgaccagaucaacggcaagcugaacagacugaucggcaagaccaacgagaaguuccaccagaucgagaaggaguucagcgagguggagggcagaauccaggaccuggagaaguacguggaggacaccaagaucgaccuguggagcuacaacgccgagcugcugguggcccuggagaaccagcacaccaucgaccugaccgacagcgagaugaacaagcuguucgagaagaccaagaagcagcugagagagaacgccgaggacaugggcaacggcugcuucaagaucuaccacaagugcgacaacgccugcaucgagagcaucagaaacggcaccuacgaccacgacguguacagagacgaggcccugaacaacagauuccagaucaagggcguggagcugaagagcggcuacaaggacuggauccuguggaucagcuucgccaucagcugcuuccugcugugcguggcccugcugggcuucaucaugugggccugccagaagggcaacaucagaugcaacaucugcaucuga

SEQ ID NO: 167836 - RNA, 1701 nt, Artificial Sequence
  derived and/or modified CDS sequence (opt4) from hemagglutinin__InfluenzaA__AET10096
augaagaccaucaucgcccugagcuacauccugugccugguguucgcccagaaguuccccggcaacgacaacagcaccgccacccugugccugggccaccacgccgugcccaacggcaccaucgugaagaccaucaccaacgaccagaucgaggugaccaacgccaccgagcuggugcagaacagcagcaccggcgagaucugcgacagcccccaccagaucaucgacggcgagaacugcacccugaucgacgcccugcugggcgacccccagugcgacggcuuccagaacaagaaguggaaccuguucguggagagaagcaaggccuacagcaacugcuaccccuacgacgugcccgacuacgccagccugagaagccugguggccagcagcggcacccuggaguucaacaacgagagcuucaacuggaccggcgugacccagaacggcaccagcagcgccugcaucagaagaagcaacaacagcuucuucagcagacugaacuggcugacccaccugaacuucaaguaccccgcccugaacgugaccaugcccaacaacgagcaguucgacaagcuguacaucuggggcgugcaccaccccggcaccgacaaggaccagaucuuccuguacgcccaggccagcggcagaaucaccgugagcaccaagagaagccagcaggccgugauccccaacaucggcagcagacccagagugagaaacauccccagcagaaucagcaucuacuggaccaucgugaagcccggcgacauccugcugaucaacagcaccggcaaccugaucgcccccagaggcuacuucaagaucagaagcggcaagagcagcaucaugagaagcgacgcccccaucggcaagugcaacagcgagugcaucacccccaacggcagcauccccaacgacaagcccuuccagaacgugaacagaaucaccuacggcgccugccccagauacgugaagcagaacacccugaagcuggccaccggcaugagaaacgugcccgagaagcagaccagaggcaucuucggcgccaucgccggcuucaucgagaacggcugggagggcaugguggacggcugguacggcuucagacaccagaacagcgagggcagaggccaggccgccgaccugaagagcacccaggccgccaucgaccagaucaacggcaagcugaacagacugaucggcaagaccaacgagaaguuccaccagaucgagaaggaguucagcgagguggagggcagaauccaggaccuggagaaguacguggaggacaccaagaucgaccuguggagcuacaacgccgagcugcugguggcccuggagaaccagcacaccaucgaccugaccgacagcgagaugaacaagcuguucgagaagaccaagaagcagcugagagagaacgccgaggacaugggcaacggcugcuucaagaucuaccacaagugcgacaacgccugcaucggcagcaucagaaacggcaccuacgaccacgacguguacagagacgaggcccugaacaacagauuccagaucaagggcguggagcugaagagcggcuacaaggacuggauccuguggaucagcuucgccaucagcugcuuccugcugugcguggcccugcugggcuucaucaugugggccugccagaagggcaacaucagaugcaacaucugcaucuga

SEQ ID NO: 167837 - RNA, 1701 nt, Artificial Sequence
  derived and/or modified CDS sequence (opt4) from hemagglutinin__InfluenzaA__AET10098
augaagaccaucaucgcccugagcuacauccugugccugguguucgcccagaaguuccccggcaacgacaacagcaccgccacccugugccugggccaccacgccgugcccaacggcaccaucgugaagaccaucaccaacgaccagaucgaggugaccaacgccaccgagcuggugcagaacagcagcaccggcgagaucugcgacagcccccaccagaucaucgacggcgagaacugcacccugaucgacgcccugcugggcgacccccagugcgacggcuuccagaacaagaagugggaccuguucguggagagaagcaaggccuacagcaacugcuaccccuacgacgugcccgacuacgccagccugagaagccugguggccagcagcggcacccuggaguucaacaacgagagcuucaacuggaccggcgugacccagaacggcaccagcagcgccugcaucagaagaagcaacaacagcuucuucagcagacugaacuggcugacccaccugaacuucaaguaccccgcccugaacgugaccaugcccaacaacgagcaguucgacaagcuguacaucuggggcgugcaccaccccggcaccgacaaggaccagaucuuccuguacgcccaggccagcggcagaaucaccgugagcaccaagagaagccagcaggccgugauccccaacaucggcagcagacccagagugagaaacauccccagcagaaucagcaucuacuggaccaucgugaagcccggcgacauccugcugaucaacagcaccggcaaccugaucgcccccagaggcuacuucaagaucagaagcggcaagagcagcaucaugagaagcgacgcccccaucggcaagugcaacagcgagugcaucacccccaacggcagcauccccaacgacaagcccuuccagaacgugaacagaaucaccuacggcgccugccccagauacgugaagcagaacacccugaagcuggccaccggcaugagaaacgugcccgagaagcagaccagaggcaucuucggcgccaucgccggcuucaucgagaacggcugggagggcaugguggacggcugguacggcuucagacaccagaacagcgagggcagaggccaggccgccgaccugaagagcacccaggccgccaucgaccagaucaacggcaagcugaacagacugaucggcaagaccaacgagaaguuccaccagaucgagaaggaguucagcgagguggagggcagaauccaggaccuggagaaguacguggaggacaccaagaucgaccuguggagcuacaacgccgagcugcugguggcccuggagaaccagcacaccaucgaccugaccgacagcgagaugaacaagcuguucgagaagaccaagaagcagcugagagagaacgccgaggacaugggcaacggcugcuucaagaucuaccacaagugcgacaacgccugcaucggcagcaucagaaacggcaccuacgaccacgacguguacagagacgaggcccugaacaacagauuccagaucaagggcguggagcugaagagcggcuacaaggacuggauccuguggaucagcuucgccaucagcugcuuccugcugugcguggcccugcugggcuucaucaugugggccugccagaagggcaacaucagaugcaacaucugcaucuga

SEQ ID NO: 167838 - RNA, 1701 nt, Artificial Sequence; identical to SEQ ID NO: 166915
  derived and/or modified CDS sequence (opt4) from hemagglutinin__InfluenzaA__AET10099

SEQ ID NO: 167839 - RNA, 1701 nt, Artificial Sequence; identical to SEQ ID NO: 167042
  derived and/or modified CDS sequence (opt4) from hemagglutinin__InfluenzaA__AET10100

SEQ ID NO: 167840 - RNA, 1701 nt, Artificial Sequence
  derived and/or modified CDS sequence (opt4) from hemagglutinin__InfluenzaA__AET10101
augaagaccaucaucgcccugagcugcauccugugccugguguucgcccagaagcugcccggcaacgacaacagcaccgccacccugugccugggccaccacgccgugcccaacggcaccaucgugaagaccaucaccaacgaccagaucgaggugaccaacgccaccgagcuggugcagagcagcagcaccggcgagaucugcgacagcccccaccagauccuggacggcgagaacugcacccugaucgacgcccugcugggcgacccccagugcgacggcuuccagaacaagaagugggaccuguucguggagagaagcaaggccuacagcaacugcuaccccuacgacgugcccgacuacgccagccugagaagccugguggccagcagcggcacccuggaguucaacaacgagagcuucaacuggaccggcgugacccagaacggcaccagcagcgccugcaucagaagaagcaacaacagcuucuucagcagacugaacuggcugacccaccugaacuucaaguaccccgcccugaacgugaccaugcccaacaacgagcaguucgacaagcuguacaucuggggcgugcaccaccccggcgccgacaaggaccagaucuuccuguacgcccaggccagcggcagaaucaccgugagcaccaagagaagccagcaggccgugauccccaacaucggcagcagacccagagugagaaacauccccagcagaaucagcaucuacuggaccaucgugaagcccggcgacauccugcugaucaacagcaccggcaaccugaucgcccccagaggcuacuucaagaucagaagcggcaagagcagcaucaugagaagcgacgcccccaucggcaagugcaacagcgagugcaucacccccaacggcagcauccccaacgacaagcccuuccagaacgugaacagaaucaccuacggcgccugccccagauacgugaagcagagcacccugaagcuggccaccggcaugagaaacgugcccgagaagcagaccagaggcaucuucggcgccaucgccggcuucaucgagaacggcugggagggcaugguggacggcugguacggcuucagacaccagaacagcgagggcagaggccaggccgccgaccugaagagcacccaggccgccaucgaccagaucaacggcaagcugaacagacugaucggcaagaccaacgagaaguuccaccagaucgagaaggaguucagcgagguggagggcagaauccaggaccuggagaaguacguggaggacaccaagaucgaccuguggagcuacaacgccgagcugcugguggcccuggagaaccagcacaccaucgaccugaccgacagcgagaugaacaagcuguucgagaagaccaagaagcagcugagagagaacgccgaggacaugggcaacggcugcuucaccaucuaccacaagugcgacaacgccugcaucggcagcaucagaaacggcaccuacgaccacaacguguacagagacgaggcccugaacaacagauuccagaucaagggcguggagcugaagagcggcuacaaggacuggauccuguggaucagcuucgccaucagcugcuuccugcugugcguggcccugcugggcuucaucaugugggccugccagaagggcaacaucagaugcaacaucugcaucuga

SEQ ID NO: 167841 - RNA, 1701 nt, Artificial Sequence
  derived and/or modified CDS sequence (opt4) from hemagglutinin__InfluenzaA__AET10102
augaagaccaucaucgcccugagcuacauccugugccugguguucacccagaagcugcccggcaacgacaacagcaccgccacccugugccugggccaccacgccgugcccaacggcaccaucgugaagaccaucaccaacgaccagaucgaggugaccaacgccaccgagcuggugcagagcagcagcaccggcgagaucugcgacagcccccaccagauccuggacggcaagaacugcacccugaucgacgcccugcugggcgacccccagugcgacggcuuccagaacaagaagugggaccuguucguggagagaagcaaggccuacagcaacugcuaccccuucgacgugcccgacuacgccagccugagaagccugguggccagcagcggcacccuggaguucaacaacgagagcuucaacuggaccggcgugacccagaacggcaccagcagcgccugcaugagaagaagcaagagcagcuucuucagcagacugaacuggcugacccaccugaacuucaaguaccccgcccugaacgugaccaugcccaacgacgagcaguucgacaagcuguacaucuggggcgugcaccaccccggcaccgacaaggaccagaucuuccuguacgcccaggccagcggcagaaucaccgugagcaccaagagaagccagcagaccgugauccccaacaucggcagcagacccagaaucagaaacauccccagcagaaucagcaucuacuggaccaucgugaagcccggcgacauccugcugaucaacagcaccggcaaccugaucgcccccagaggcuacuucaagaucagaagcggcaagagcagcaucaugagaagcgacgcccccaucggcaagugcaacagcgagugcaucacccccaacggcagcauccccaacgacaagcccuuccagaacgugaacagaaucaccuacggcgccugccccagauacgugaagcagaacacccugaagcuggccaccggcaugagaaacgugcccgagaagcagaccagaggcaucuucggcgccaucgccggcuucaucgagaacggcugggagggcaugguggacggcugguacggcuucagacaccagaacagcgagggcagaggccaggccgccgaccugaagagcacccaggccgccaucgaccagaucaacggcaagcugaacagacugaucggcagaaccaacgagaaguuccaccagaucgagaaggaguucagcgagguggagggcagaauccaggaccuggagaaguacguggaggacaccaagaucgaccuguggagcuacaacgccgagcugcugguggcccuggagaaccagcacaccaucgaccugaccgacagcgagaugaacaagcuguucgagaagaccagaaagcagcugagagagaacgccgaggacaugggcaacggcugcuucaagaucuaccacaagugcgacaacgccugcaucggcagcaucagaaacggcaccuacgaccacgacguguacagagacgaggcccugaacaacagauuccagaucaagggcguggagcugaagagcggcuacaaggacuggauccuguggaucagcuucgccaucagcugcuuccugcugugcguggccagccugggcuucaucaugugggccugccagaagggcaacaucagaugcaacaucugcaucuga

SEQ ID NO: 167842 - RNA, 1701 nt, Artificial Sequence
  derived and/or modified CDS sequence (opt4) from hemagglutinin__InfluenzaA__AET10103
augaagaccaucaucgcccugagcuacauccugugccugguguucgcccagaagcugcccggcaacgacaacagcaccgccacccugugccugggccaccacgccgugcccaacggcaccaucgugaagaccaucaccaacgaccagaucgaggugaccaacgccaccgagcuggugcagaacagcagcaccggcgagaucugcgacagcccccaccagauccuggacggcgagaacugcacccugaucgacgcccugcugggcgacccccagugcgacggcuuccagaacaagaagugggaccuguucguggagagaagcaaggccuacagcaacugcuaccccuacgacgugcccgacuacgccagccugagaagccugguggccagcagcggcacccuggaguucaacaacgagagcuucaacuggaccggcgugacccagaacggcaccagcagcgccugcaucagaagaagcaacaacagcuucuucagcagacugaacuggcugacccaccugaacuucaaguaccccgcccugaacgugaccaugcccaacaacgagcaguucgacaagcuguacaucuggggcgugcaccaccccggcaccgacaaggaccagaucuuccuguacgcccaggccagcggcagaaucaccgugagcaccaagagaagccagcaggccgugauccccaacaucggcagcagacccagagugagaaacauccccagcagaaucagcaucuacuggaccaucgugaagcccggcgacauccugcugaucaacagcaccggcaaccugaucgcccccagaggcuacuucaagaucagaagcggcaagagcagcaucaugagaagcgacgcccccaucggcaagugcaacagcgagugcaucacccccaacggcagcauccccaacgacaagcccuuccagaacgugaacagaaucaccuacggcgccugccccagauacgugaagcagaacacccugaagcuggccaccggcaugagaaacgugcccgagaagcagaccagaggcaucuucggcgccaucgccggcuucaucgagaacggcugggagggcaugguggacggcugguacggcuucagacaccagaacagcgagggcagaggccaggccgccgaccugaagagcacccaggccgccaucgaccagaucaacggcaagcugaacagacugaucggcaagaccaacgagaaguuccaccagaucgagaaggaguucagcgagguggagggcagaauccaggaccuggagaaguacguggaggacaccaagaucgaccuguggagcuacaacgccgagcugcugguggcccuggagaaccagcacaccaucgaccugaccgacagcgagaugaacaagcuguucgagaagaccaagaagcagcugagagagaacgccgaggacaugggcaacggcugcuucaagaucuaccacaagugcgacaacgccugcaucggcagcaucagaaacggcaccuacgaccacgacguguacagagacgaggcccugaacaacagauuccagaucaagggcguggagcugaagagcggcuacaaggacuggauccuguggaucagcuucgccaucagcugcuuccugcugugcguggcccugcugggcuucaucaugugggccugccagaagggcaacaucagaugcaacaucugcaucuga

SEQ ID NO: 167843 - RNA, 1701 nt, Artificial Sequence
  derived and/or modified CDS sequence (opt4) from hemagglutinin__InfluenzaA__AET10104
augaagaccaucaucgcccugagcuacauccugugccugguguucgcccagaaguuccccggcaacgacaacagcaccgccacccugugccugggccaccacgccgugcccaacggcaccaucgugaagaccaucaccaacgaccagaucgaggugaccaacgccaccgagcuggugcagaacagcagcaccggcgagaucugcgacagcccccaccagaucaucgacggcgagaacugcacccugaucgacgcccugcugggcgacccccagugcgacggcuuccagaacaagaagugggaccuguucguggagagaagcaaggccuacagcaacugcuaccccuacgacgugcccgacuacgccagccugagaagccugguggccagcagcggcacccuggaguucaacaacgagagcuucaacuggaccggcgugacccagaacggcaccagcagcgccugcaucagaagaagcaacaacagcuucuucagcagacugaacuggcugacccaccugaacuucaaguaccccgcccugaacgugaccaugcccaacaacgagcaguucgacaagcuguacaucuggggcgugcaccaccccggcaccgacaaggaccagaucuuccuguacgcccaggccagcggcagaaucaccgugagcaccaagagaagccagcaggccgugauccccaacaucggcagcagacccagagugagaaacauccccagcagaaucagcaucuacuggaccaucgugaagcccggcgacauccugcugaucaacagcaccggcaaccugaucgcccccagaggcuacuucaagaucagaagcggcaagagcagcaucaugagaagcgacgcccccaucggcaagugcaacagcgagugcaucacccccaacggcagcauccccaacgacaagcccuuccagaacgugaacagaaucaccuacggcgccugccccagauacgugaagcagaacacccugaagcuggccaccggcaugagaaacgugcccgagaagcagaccagaggcaucuucggcgccaucgccggcuucaucgagaacggcugggagggcaugguggacggcugguacggcuucagacaccagaacagcgagggcagaggccaggccgccgaccugaagagcacccaggccgccaucgaccagaucaacggcaagcugaacagacugaucggcaagaccaacgagaaguuccaccagaucgagaaggaguucagcgagguggagggcagaauccaggaccugggcaaguacguggaggacaccaagaucgaccuguggagcuacaacgccgagcugcugguggcccuggagaaccagcacaccaucgaccugaccgacagcgagaugaacaagcuguucgagaagaccaagaagcagcugagagagaacgccgaggacaugggcaacggcugcuucaagaucuaccacaagugcgacaacgccugcaucggcagcaucagaaacggcaccuacgaccacgacguguacagagacgaggcccugaacaacagauuccagaucaagggcguggagcugaagagcggcuacaaggacuggauccuguggaucagcuucgccaucagcugcuuccugcugugcguggcccugcugggcuucaucaugugggccugccagaagggcaacaucagaugcaacaucugcaucuga

SEQ ID NO: 167844 - RNA, 1701 nt, Artificial Sequence
  derived and/or modified CDS sequence (opt4) from hemagglutinin__InfluenzaA__AET10105
augaagaccaucaucgcccugagcuacauccugugccugguguucgcccaggagcugcccggcaacgacaacagcaccgccacccugugccugggccaccacgccgugcccaacggcaccaucgugaagaccaucaccaacgaccagaucgaggugaccaacgccaccgagcuggugcagagcagcagcaccggcgagaucugcaacagcccccaccagauccuggacggcgagaacugcacccugaucgacgcccugcugggcgacccccagugcgacggcuuccagaacaagaagugggaccuguucguggagagaagcaaggcccacagcaacugcuaccccuacgacgugcccgacuacgccagccugagaagccugguggccagcagcggcacccuggaguucaacaacgagagcuucaacuggaccggcgugacccagaacggcaccagcagcgccugcaucagaagaagcaacaacagcuucuucagcagacugaacuggcugacccaccugaacuucaaguaccccgcccugaacgugaccaugcccaacaacgagcaguucgacaagcuguacaucuggggcgugcaccaccccggcaccgacaaggaccagaucuuccuguacgcccaggccgccggcagaaucaccgugagcaccaagagaagccagcaggccgugauccccaacaucggcagcagacccagagugagaaacauccccagcagagugagcaucuacuggaccaucgugaagcccggcgacauccugcugaucaacagcaccggcaaccugaucgcccccagaggcuacuucaagaucagaagcggcaagagcagcaucaugagaagcgacgcccccaucggcaagugcaacagcgccugcaucacccccaacggcagcauccccaacgacaagcccuuccagaacgugaacagaaucaccuacggcgccugccccagauacgugaagcagaacacccugaagcuggccaccggcaugagaaacgugcccgagaagcagaccagaggcaucuucggcgccaucgccggcuucaucgagaacggcugggagggcaugguggacggcugguacggcuucagacaccagaacagcgagggcagaggccaggccgccgaccugaagagcacccaggccgccaucgaccagaucaacggcaagcugaacagacugaucggcaagaccaacgagaaguuccaccagaucgagaaggaguucagcgagguggagggcagaauccaggaccuggagaaguacguggaggacaccaagaucgaccuguggagcuacaacgccgagcugcugguggcccuggagaaccagcacaccaucgaccugaccgacagcgagaugaacaagcuguucgagaagaccaagaagcagcugagagagaacgccgaggacaugggcaacggcugcuucaagaucuaccacaagugcgacaacgccugcaucggcagcaucagaaacggcaccuacgaccacgacguguacagagacgaggcccugaacaacagauuccagaucaagggcguggagcugaagagcggcuacaaggacuggauccuguggaucagcuucgccaucagcugcuuccugcugugcguggcccugcugggcuucaucaugugggccugccagaagggcaacaucagaugcaacaucugcaucuga

SEQ ID NO: 167845 - RNA, 1701 nt, Artificial Sequence
  derived and/or modified CDS sequence (opt4) from hemagglutinin__InfluenzaA__AET10106
augaagaccaucaucgcccugagcuacauccugugccugguguucgcccagaagcugcccggcaacuacaacagcaccgccacccugugccugggccaccacgccgugcccaacggcaccaucgugaagaccaucaccaacgaccagaucgaggugaccaacgccaccgagcuggugcagagcagcagcaccggcgagaucugcaacagcccccaccagauccuggacggcgagaacugcacccugaucgacgcccugcugggcgacccccagugcgacggcuuccagaacaagaagugggaccuguucguggagagaagcaaggcccacagcaacugcuaccccuacgacgugcccgacuacgccagccugagaagccugguggccagcagcggcacccuggaguucaacaacgagagcuucaacuggaccggcgugacccagaacggcaccagcagcgccugcaucagaagaagcaacaacagcuucuucagcagacugaacuggcugacccaccugaacuucaaguaccccgcccugaacgugaccaugcccaacaacgagcaguucgacaagcuguacaucuggggcgugcaccaccccggcaccgacaaggaccagaucuuccuguacgcccaggccagcggcagaaucaccgugagcaccaagagaagccagcaggccgugauccccaacaucggcagcagacccagagugagaaacauccccagcagagugagcaucuacuggaccaucgugaagcccggcgacauccugcugaucaacagcaccggcaaccugaucgcccccagaggcuacuucaagaucagaagcggcaagagcagcaucaugagaagcgacgcccccaucggcaagugcaacagcgccugcaucacccccaacggcagcauccccaacgacaagcccuuccagaacgugaacagaaucaccuacggcgccugccccagauacgugaagcagaacacccugaagcuggccaccggcaugagaaacgugcccgagaagcagaccagaggcaucuucggcgccaucgccggcuucaucgagaacggcugggagggcaugguggacggcugguacggcuucagacaccagaacagcgagggcagaggccaggccgccgaccugaagagcacccaggccgccaucgaccagaucaacggcaagcugaacagacugaucggcaagaccaacgagaaguuccaccagaucgagaaggaguucagcgagguggagggcagaauccaggaccuggagaaguacguggaggacaccaagaucgaccuguggagcuacaacgccgagcugcugguggcccuggagaaccagcacaccaucgaccugaccgacagcgagaugaacaagcuguucgagaagaccaagaagcagcugagagagaacgccgaggacaugggcaacggcugcuucaagaucuaccacaagugcgacaacgccugcaucggcagcaucagaaacggcaccuacgaccacgacguguacagagacgaggcccugaacaacagauuccagaucaagggcguggagcugaagagcggcuacaaggacuggauccuguggaucagcuucgccaucagcugcuuccugcugugcguggcccugcugggcuucaucaugugggccugccagaagggcaacaucagaugcaacaucugcaucuga

SEQ ID NO: 167846 - RNA, 1701 nt, Artificial Sequence
  derived and/or modified CDS sequence (opt4) from hemagglutinin__InfluenzaA__AET10107
augaagaccaucaucgcccugagcuacauccugugccugguguucgcccaggagauccccggcaacgacaacagcaccgccacccugugccugggccaccacgccgugcccaacggcaccaucgugaagaccaucaccaacgaccagaucgaggugaccaacgccaccgagcuggugcagagcagcagcaccggcgagaucugcaacagcccccaccagauccuggacggcgagaacugcacccugaucgacgcccugcugggcgacccccagugcgacggcuuccagaacaagaagugggaccuguucguggagagaagcaaggcccacagcaacugcuaccccuacgacgugcccgacuacgccagccugagaagccugguggccagcagcggcacccuggaguucaacaacgagagcuucaacuggaccggcgugacccagaacggcaccagcagcgccugcaucagaagaagcaacaacagcuucuucagcagacugaacuggcugacccaccugaacuucaaguaccccgcccugaacgugaccaugcccaacaacgagcaguucgacaagcuguacaucuggggcgugcaccaccccggcaccgacaaggaccagaucuuccuguacgcccaggccagcggcagaaucaccgugagcaccaagagaagccagcaggccgugauccccaacaucggcagcagacccagagugagaaacauccccagcagagugagcaucuacuggaccaucgugaagcccggcgacauccugcugaucaacagcaccggcaaccugaucgcccccagaggcuacuucaagaucagaagcggcaagagcagcaucaugagaagcgacgcccccaucggcaagugcaacagcgccugcaucacccccaacggcagcauccccaacgacaagcccuuccagaacgugaacagaaucaccuacggcgccugccccagauacgugaagcagaacacccugaagcuggccaccggcaugagaaacgugcccgagaagcagaccagaggcaucuucggcgccaucgccggcuucaucgagaacggcugggagggcaugguggacggcugguacggcuucagacaccagaacagcgagggcagaggccaggccgccgaccugaagagcacccaggccgccaucgaccagaucaacggcaagcugaacagacugaucggcaagaccaacgagaaguuccaccagaucgagaaggaguucagcgagguggagggcagaauccaggaccuggagaaguacguggaggacaccaagaucgaccuguggagcuacaacgccgagcugcugguggcccuggagaaccagcacaccaucgaccugaccgacagcgagaugaacaagcuguucgagaagaccaagaagcagcugagagagaacgccgaggacaugggcaacggcugcuucaagaucuaccacaagugcgacaacgccugcaucggcagcaucagaaacggcaccuacgaccacgacguguacagagacgaggcccugaacaacagauuccagaucaagggcguggagcugaagagcggcuacaaggacuggauccuguggaucagcuucgccaucagcugcuuccugcugugcguggcccugcugggcuucaucaugugggccugccagaagggcaacaucaagugcaacaucugcaucuga

SEQ ID NO: 167847 - RNA, 1701 nt, Artificial Sequence; identical to SEQ ID NO: 163471
  derived and/or modified CDS sequence (opt4) from hemagglutinin__InfluenzaA__AET10108

SEQ ID NO: 167848 - RNA, 1701 nt, Artificial Sequence; identical to SEQ ID NO: 167042
  derived and/or modified CDS sequence (opt4) from hemagglutinin__InfluenzaA__AET10109

SEQ ID NO: 167849 - RNA, 1701 nt, Artificial Sequence
  derived and/or modified CDS sequence (opt4) from hemagglutinin__InfluenzaA__AET10110
augaagaccaucaucgcccugagcuacauccugugccugguguucgcccagaagcugcccggcaacgacaacagcaccgccacccugugccugggccaccacgccgugcccaacggcaccaucgugaagaccaucaccaacgaccagaucgaggugaccaacgccaccgagcuggugcagagcagcagcaccggcgagaucugcaacagcccccaccagauccuggacggcgagaacugcacccugaucgacgcccugcugggcgacccccagugcgacggcuuccagaacaagaagugggaccuguucguggagagaagcaaggccuacagcaacugcuaccccuacgacgugcccgacuacgccagccugagaagccugguggccagcagcggcacccuggaguucaacaacgagagcuucaacuggaccggcgugacccagaacggcaccagcagcgccugcaucagaagaagcaacaacagcuucuucagcagacugaacuggcugacccaccugaacuucaaguaccccgcccugaacgugaccaugcccaacaacgagcaguucgacaagcuguacaucuggggcgugcaccaccccggcaccgacaaggaccagaucuuccuguacgcccaggccagcggcagaaucaccgugagcaccaagagaagccagcaggccgugauccccaacaucggcagcagacccagagugagaaacauccccagcagagugagcaucuacuggaccaucgugaagcccggcgacauccugcugaucaacagcaccggcaaccugaucgcccccagaggcuacuucaagaucagaagcggcaagagcagcaucaugagaagcgacgcccccaucggcaagugcaacagcgccugcaucacccccaacggcagcauccccaacgacaagcccuuccagaacgugaacagaaucaccuacggcgccugccccagauacgugaagcagaacacccugaagcuggccaccggcaugagaaacgugcccgagaagcagaccagaggcaucuucggcgccaucgccggcuucaucgagaacggcugggagggcaugguggacggcugguacggcuucagacaccagaacagcgagggcagaggccaggccgccgaccugaagagcacccaggccgccaucgaccagaucaacggcaagcugaacagacugaucggcaagaccaacgagaaguuccaccagaucgagaaggaguucagcgagguggagggcagaauccaggaccuggagaaguacguggaggacaccaagaucgaccuguggagcuacaacgccgagcugcugguggcccuggagaaccagcacaccaucgaccugaccgacagcgagaugaacaagcuguucgagaagaccaagaagcagcugagagagaacgccgaggacaugggcaacggcugcuucaagaucuaccacaagugcgacaacgccugcaucggcagcaucagaaacggcaccuacgaccacgacguguacagagacgaggcccugaacaacagauuccagaucaagggcguggagcugaagagcggcuacaaggacuggauccuguggaucagcuucgccaucagcugcuuccugcugugcguggcccugcugggcuucaucaugugggccugccagaagggcaacaucaagugcaacaucugcaucuga

SEQ ID NO: 167850 - RNA, 1701 nt, Artificial Sequence
  derived and/or modified CDS sequence (opt4) from hemagglutinin__InfluenzaA__AET10111
augaagaccaucaucgcccugagcuacauccugugccugguguucgcccaggagauccccggcaacgacaacagcaccgccacccugugccugggccaccacgccgugcccaacggcaccaucgugaagaccaucaccaacgaccagaucgaggugaccaacgccaccgagcuggugcagagcagcagcaccggcgagaucugcaacagcccccaccagauccuggacggcgagaacugcacccugaucgacgcccugcugggcgacccccagugcgacggcuuccagaacaagaagugggaccuguucguggagagaagcaaggcccacagcaacugcuaccccuacgacgugcccgacuacgccagccugagaagccugguggccagcagcggcacccuggaguucaacaacgagagcuucaacuggaccggcgugacccagaacggcaccagcagcgccugcaucagaagaagcaacaacagcuucuucagcagacugaacuggcugacccaccugaacuucaaguaccccgcccugaacgugaccaugcccaacaacgagcaguucgacaagcuguacaucuggggcgugcaccaccccggcaccgacaaggaccagaucuuccuguacgcccaggccagcggcagaaucaccgugagcaccaagagaagccagcaggccgugauccccaacaucggcagcagacccagagugagaaacauccccagcagagugagcaucuacuggaccaucgugaagcccggcgacauccugcugagcaacagcaccggcaaccugaucggccccagaggcuacuucaagaucagaagcggcaagagcagcaucaugagaagcgacgcccccaucggcaagugcaacagcgccugcaucacccccaacggcagcauccccaacgacaagcccuuccagaacgugaacagaaucaccuacggcgccugccccagauacgugaagcagaacacccugaagcuggccaccggcaugagaaacgugcccgagaagcagaccagaggcaucuucggcgccaucgccggcuucaucgagaacggcugggagggcaugguggacggcugguacggcuucagacaccagaacagcgagggcagaggccaggccgccgaccugaagagcacccaggccgccaucgaccagaucaacggcaagcugaacagacugaucggcaagaccaacgagaaguuccaccagaucgagaaggaguucagcgagguggagggcagaauccaggaccuggagaaguacguggaggacaccaagaucgaccuguggagcuacaacgccgagcugcugguggcccuggagaaccagcacaccaucgaccugaccgacagcgagaugaacaagcuguucgagaagaccaagaagcagcugagagagaacgccgaggacaugggcaacggcugcuucaagaucuaccacaagugcgacaacgccugcaucggcagcaucagaaacggcaccuacgaccacgacguguacagagacgaggcccugaacaacagauuccagaucaagggcguggagcugaagagcggcuacaaggacuggauccuguggaucagcuucgccaucagcugcuuccugcugugcguggcccugcugggcuucaucaugugggccugccagaagggcaacaucagaugcaacaucugcaucuga

SEQ ID NO: 167851 - RNA, 1701 nt, Artificial Sequence
  derived and/or modified CDS sequence (opt4) from hemagglutinin__InfluenzaA__AET10113
augaagaccaucaucgcccugagcuacauccugugccugguguucgcccaggagcugcccggcaacgacaacagcaccgccacccugugccugggccaccacgccgugcagaacggcaccaucgugaagaccaucaccaacgaccagaucgaggugaccaacgccaccgagcuggugcagagcagcagcaccggcgagaucugcaacagcccccaccagauccuggacggcgagaacugcacccugaucgacgcccugcugggcgacccccagugcgacggcuuccagaacaagaagugggaccuguucguggagagaagcaaggcccacagcaacugcuaccccuacgacgugcccgacuacgccagccugagaagccugguggccagcagcggcacccuggaguucaacaacgagagcuucaacuggaccggcgugacccagaacggcaccagcagcgccugcaucagaagaagcaacaacagcuucuucagcagacugaacuggcugacccaccugaacuucaaguaccccgcccugaacgugaccaugcccaacaacgagcaguucgacaagcuguacaucuggggcgugcaccaccccggcaccgacaaggaccagaucuuccuguacgcccaggccagcggcagaaucaccgugagcaccaagagaagccagcaggccgugauccccaacaucggcagcagacccagagugagaaacauccccagcagagugagcaucuacuggaccaucgugaagcccggcgacauccugcugaucaacagcaccggcaaccugaucgcccccagaggcuacuucaagaucagaagcggcaagagcagcaucaugagaagcgacgcccccaucggcaagugcaacagcgccugcaucacccccaacggcagcauccccaacgacaagcccuuccagaacgugaacagaaucaccuacggcgccugccccagauacgugaagcagaacacccugaagcuggccaccggcaugagaaacgugcccgagaagcagaccagaggcaucuucggcgccaucgccggcuucaucgagaacggcugggagggcaugguggacggcugguacggcuucagacaccagaacagcgagggcagaggccaggccgccgaccugaagagcacccaggccgccaucgaccagaucaacggcaagcugaacagacugaucggcaagaccaacgagaaguuccaccagaucgagaaggaguucagcgagguggagggcagaauccaggaccuggagaaguacguggaggacaccaagaucgaccuguggagcuacaacgccgagcugcugguggcccuggagaaccagcacaccaucgaccugaccgacagcgagaugaacaagcuguucgagaagaccaagaagcagcugagagagaacgccgaggacaugggcaacggcugcuucaagaucuaccacaagugcgacaacgccugcaucggcagcaucagaaacggcaccuacgaccacgacguguacagagacgaggcccugaacaacagauuccagaucaagggcguggagcugaagagcggcuacaaggacuggauccuguggaucagcuucgccaucagcugcuuccugcugugcguggcccugcugggcuucaucaugugggccugccagaagggcaacaucagaugcaacaucugcaucuga

SEQ ID NO: 167852 - RNA, 1701 nt, Artificial Sequence
  derived and/or modified CDS sequence (opt4) from hemagglutinin__InfluenzaA__AET10114
augaagaccaucaucgcccugagcuacauccugugccugguguucgcccaggagcugcccggcaacgacgacagcaccgccacccugugccugggccaccacgccgugcccaacggcaccaucgugaagaccaucaccaacgaccagaucgaggugaccaacgccaccgagcuggugcagagcagcagcaccggcgagaucugcaacagcccccaccagauccuggacggcgagaacugcacccugaucgacgcccugcugggcgacccccagugcgacggcuuccagaacaagaagugggaccuguucguggagagaagcaaggcccacagcaacugcuaccccuacgacgugcccgacuacgccagccugagaagccugguggccagcagcggcacccuggaguucaacaacgagagcuucaacuggaccggcgugacccagaacggcaccagcagcgccugcaucagaagaagcaacaacagcuucuucagcagacugaacuggcugacccaccugaacuucaaguaccccgcccugaacgugaccaugcccaacaacgagcaguucgacaagcuguacaucuggggcgugcaccaccccggcaccgacaaggaccagaucuuccuguacgcccaggccagcggcagaaucaccgugagcaccaagagaagccagcaggccgugauccccaacaucggcagcagacccagagugagaaacauccccagcagagugagcaucuacuggaccaucgugaagcccggcgacauccugcugaucaacagcaccggcaaccugaucgcccccagaggcuacuucaagaucagaagcggcaagagcagcaucaugagaagcgacgcccccaucggcaagugcaacagcgccugcaucacccccaacggcagcaucagcaacgacaagcccuuccagaacgugaacagaaucaccuacggcgccugccccagauacgugaagcagaacacccugaagcuggccaccggcaugagaaacgugcccgagaagcagaccagaggcaucuucggcgccaucgccggcuucaucgagaacggcugggagggcaugguggacggcugguacggcuucagacaccagaacagcgagggcagaggccaggccgccgaccugaagagcacccaggccgccaucgaccagaucaacggcaagcugaacagacugaucggcaagaccaacgagaaguuccaccagaucgagaaggaguucagcgagguggagggcagaauccaggaccuggagaaguacguggaggacaccaagaucgaccuguggagcuacaacgccgagcugcugguggcccuggagaaccagcacaccaucgaccugaccgacagcgagaugaacaagcuguucgagaagaccaagaagcagcugagagagaacgccgaggacaugggcaacggcugcuucaagaucuaccacaagugcgacaacgccugcaucggcagcaucagaaacggcaccuacgaccacgacguguacagagacgaggcccugaacaacagauuccagaucaagggcguggagcugaagagcggcuacaaggacuggauccuguggaucagcuucgccaucagcugcuuccugcugugcguggcccugcugggcuucaucaugugggccugccagaagggcaacaucaugugcaacaucugcaucuga

SEQ ID NO: 167853 - RNA, 1698 nt, Artificial Sequence
  derived and/or modified CDS sequence (opt4) from hemagglutinin__InfluenzaA__AET50439
augaaggugaagcugcuggugcugcugugcaccuucaccgccaccuacgccgacaccaucugcaucggcuaccacgccaacaacagcaccgacaccguggacaccgugcuggagaagaacgugaccgugacccacagcgugaaccugcuggagaacagccacaacggcaagcugugccugcugaagggcaucgccccccugcagcugggcaacugcagcguggccggcuggauccugggcaaccccgagugcgagcugcugaucagcaaggagagcuggagcuacaucguggagaagcccaaccccgagaacggcaccugcuaccccggccacuucgccgacuacgaggagcugagagagcagcugagcagcgugagcagcuucgagagauucgagaucuuccccaaggagagcagcuggcccaaccacaccgugaccggcgugagcgccagcugcagccacaacggcgagagcagcuucuacagaaaccugcuguggcugaccggcaagaacggccuguaccccaaccugagcaagagcuacgccaacaacaaggagaaggaggugcuggugcuguggggcgugcaccacccccccaacaucggcaaccagaaggcccuguaccacaccgagaacgccuacgugagcguggugagcagccacuacagcagaaaguucacccccgagaucgccaagagacccaaggugagagaccaggagggcagaaucaacuacuacuggacccugcuggagcccggcgacaccaucaucuucgaggccaacggcaaccugaucgcccccagauacgccuucgcccugagcagaggcuucggcagcggcaucaucaacagcaacgcccccauggacaagugcgacgccaagugccagaccccccagggcgccaucaacagcagccugcccuuccagaacgugcaccccgugaccaucggcgagugccccaaguacgugagaagcgccaagcugagaauggugaccggccugagaaacauccccagcauccagagcagaggccuguucggcgccaucgccggcuucaucgagggcggcuggaccggcaugguggacggcugguacggcuaccaccaccagaacgagcagggcagcggcuacgccgccgaccagaagagcacccagaacgccaucaacggcaucaccaacaaggugaacagcgugaucgagaagaugaacacccaguucaccgccgugggcaaggaguucaacaagcuggagagaagaauggagaaccugaacaagaagguggacgacggcuucaucgacaucuggaccuacaacgccgagcugcuggugcugcuggagaacgagagaacccuggacuuccacgacagcaacgugaagaaccuguacgagaaggugaagagccagcugaagaacaacgccaaggagaucggcaacggcugcuucgaguucuaccacaagugcaacgacgagugcauggagagcgugaagaacggcaccuacgacuaccccaaguacagcgaggagagcaagcugaacagagagaagaucgacggcgugaagcuggagagcaugggcguguaccagauccuggccaucuacagcaccguggccagcagccuggugcugcuggugagccugggcgccaucagcuucuggaugugcagcaacggcagccugcagugcagaaucugcaucuga

SEQ ID NO: 167854 - RNA, 1698 nt, Artificial Sequence
  derived and/or modified CDS sequence (opt4) from hemagglutinin__InfluenzaA__AET50440
augaaggugaagcugcuggugcugcugugcaccuucaccgccaccuacgccgacaccaucugcaucggcuaccacgccaacaacagcaccgacaccguggacaccgugcuggagaagaacgugaccgugacccacagcgugaaccugcuggagaacagccacaacggcaagcugugccugcugaagggcaucgccccccugcagcugggcaacugcagcguggccggcuggauccugggcaaccccgagugcgagcugcugaucagcaaggagagcuggagcuacaucguggagaagcccaaccccgagaacggcaccugcuaccccggccacuucgccgacuacgaggagcugagagagcagcugagcagcgugagcagcuucgagagauucgagaucuuccccaaggagagcagcuggcccacccacaccgugaccggcgugagcgccagcugcagccacaacggcgagagcagcuucuacagaaaccugcuguggcugaccggcaagaacggccuguaccccaaccugagcaagagcuacgccaacaacaaggagaaggaggugcuggugcuguggggcgugcaccacccccccaacaucggcaaccagaaggcccuguaccacaccgagaacgccuacgugagcguggugagcagccacuacagcagaaaguucacccccgagaucgccaagagacccaaggugagagaccaggagggcagaaucaacuacuacuggacccugcuggagcccggcgacaccaucaucuucgaggccaacggcaaccugaucgcccccagauacgccuucgcccugagcagaggcuucggcagcggcaucaucaacagcaacgcccccauggacaagugcgacgccaagugccagaccccccagggcgccaucaacagcagccugcccuuccagaacgugcaccccgugaccaucggcgagugccccaaguacgugagaagcgccaagcugagaauggugaccggccugagaaacauccccagcauccagagcagaggccuguucggcgccaucgccggcuucaucgagggcggcuggaccggcaugguggacggcugguacggcuaccaccaccagaacgagcagggcagcggcuacgccgccgaccagaagagcacccagaacgccaucaacggcaucaccaacaaggugaacagcgugaucgagaagaugaacacccaguucaccgccgugggcaaggaguucaacaagcuggagagaagaauggagaaccugaacaagaagguggacgacggcuucaucgacaucuggaccuacaacgccgagcugcuggugcugcuggagaacgagagaacccuggacuuccacgacagcaacgugaagaaccuguacgagaaggugaagagccagcugaagaacaacgccaaggagaucggcaacggcugcuucgaguucuaccacaagugcaacgacgagugcauggagagcgugaagaacggcaccuacgacuaccccaaguacagcgaggagagcaagcugaacagagagaagaucgacggcgugaagcuggagagcaugggcguguaccagauccuggccaucuacagcaccguggccagcagccuggugcugcuggugagccugggcgccaucagcuucuggaugugcagcaacggcagccugcagugcagaaucugcaucuga

SEQ ID NO: 167855 - RNA, 1698 nt, Artificial Sequence
  derived and/or modified CDS sequence (opt4) from hemagglutinin__InfluenzaA__AET50441
augaaggugaagcugcuggugcugcugugcaccuucaccgccaccuacgccgacaccaucugcaucggcuaccacgccaacaacagcaccgacaccguggacaccgugcuggagaagaacgugaccgugacccacagcgugaaccugcuggagaacagccacaacggcaagcugugccugcugaagggcaucgccccccugcagcugggcaacugcagcguggccggcuggauccugggcaaccccgagugcgagcugcugaucagcaaggagagcuggagcuacaucguggagaagcccaaccccgagaacggcaccugcuaccccggccacuucgccgacuacgaggagcugagagagcagcugagcagcgugagcagcuucgagagauucgagaucuuccccaaggagagcagcuggcccacccacaccgugaccggcgugagcgccagcugcagccacaacggcgagagcagcuucuacagaaaccugcuguggcugaccggcaagaacggccuguaccccaaccugagcaagagcuacgccaacaacaaggagaaggaggugcuggugcuguggggcgugcaccacccccccaacaucggcaaccagaaggcccuguaccacaccgagaacgccuacgugagcguggugagcagccacuacagcagaaaguucacccccgagaucgccaagagacccaaggugagaggccaggagggcagaaucaacuacuacuggacccugcuggagcccggcgacaccaucaucuucgaggccaacggcaaccugaucgcccccagauacgccuucgcccugagcagaggcuucggcagcggcaucaucaacagcaacgcccccauggacaagugcgacgccaagugccagaccccccagggcgccaucaacagcagccugcccuuccagaacgugcaccccgugaccaucggcgagugccccaaguacgugagaagcgccaagcugagaauggugaccggccugagaaacauccccagcauccagagcagaggccuguucggcgccaucgccggcuucaucgagggcggcuggaccggcaugguggacggcugguacggcuaccaccaccagaacgagcagggcagcggcuacgccgccgaccagaagagcacccagaacgccaucaacggcaucaccaacaaggugaacagcgugaucgagaagaugaacacccaguucaccgccgugggcaaggaguucaacaagcuggagagaagaauggagaaccugaacaagaagguggacgacggcuucaucgacaucuggaccuacaacgccgagcugcuggugcugcuggagaacgagagaacccuggacuuccacgacagcaacgugaagaaccuguacgagaaggugaagagccagcugaagaacaacgccaaggagaucggcaacggcugcuucgaguucuaccacaagugcaacgacgagugcauggagagcgugaagaacggcaccuacgacuaccccaaguacagcgaggagagcaagcugaacagagagaagaucgacggcgugaagcuggagagcaugggcguguaccagauccuggccaucuacagcaccguggccagcagccuggugcugcuggugagccugggcgccaucagcuucuggaugugcagcaacggcagccugcagugcagaaucugcaucuga

SEQ ID NO: 167856 - RNA, 1698 nt, Artificial Sequence
  derived and/or modified CDS sequence (opt4) from hemagglutinin__InfluenzaA__AET50442
augaaggugaagcugcuggugcugcugugcaccuucaccgccaccuacgccgacaccaucugcaucggcuaccacgccaacaacagcaccgacaccguggacaccgugcuggagaagaacgugaccgugacccacagcgugaaccugcuggagaacagccacaacggcaagcugugccugcugaagggcaucgccccccugcagcugggcaacugcagcguggccggcuggauccugggcaaccccgagugcgagcugcugaucagcaaggagagcuggagcuacaucguggagaagcccaaccccgagaacggcaucugcuaccccggccacuucgccgacuacgaggagcugagagagcagcugagcagcgugagcagcuucgagagauucgagaucuuccccaaggagagcagcuggcccacccacaccgugaccggcgugagcgccagcugcagccacaacggcgagagcagcuucuacagaaaccugcuguggcugaccggcaagaacggccuguaccccaaccugagcaagagcuacgccaacaacaaggagaaggaggugcuggugcuguggggcgugcaccacccccccaacaucggcaaccagaaggcccuguaccacaccgagaacgccuacgugagcguggugagcagccacuacagcagaaaguucacccccgagaucgccaagagacccaaggugagaggccaggagggcagaaucaacuacuacuggacccugcuggagcccggcgacaccaucaucuucgaggccaacggcaaccugaucgcccccagauacgccuucgcccugagcagaggcuucggcagcggcaucaucaacagcaacgcccccauggacaagugcgacgccaagugccagaccccccagggcgccaucaacagcagccugcccuuccagaacgugcaccccgugaccaucggcgagugccccaaguacgugagaagcgccaagcugagaauggugaccggccugagaaacauccccagcauccagagcagaggccuguucggcgccaucgccggcuucaucgagggcggcuggaccggcaugguggacggcugguacggcuaccaccaccagaacgagcagggcagcggcuacgccgccgaccagaagagcacccagaacgccaucaacggcaucaccaacaaggugaacagcgugaucgagaagaugaacacccaguucaccgccgugggcaaggaguucaacaagcuggagagaagaauggagaaccugaacaagaagguggacgacggcuucaucgacaucuggaccuacaacgccgagcugcuggugcugcuggagaacgagagaacccuggacuuccacgacagcaacgugaagaaccuguacgagaaggugaagagccagcugaagaacaacgccaaggagaucggcaacggcugcuucgaguucuaccacaagugcaacgacgagugcauggagagcgugaagaacggcaccuacgacuaccccaaguacagcgaggagagcaagcugaacagagagaagaucgacggcgugaagcuggagagcaugggcguguaccagauccuggccaucuacagcaccguggccagcagccuggugcugcuggugagccugggcgccaucagcuucuggaugugcagcaacggcagccugcagugcagaaucugcaucuga

SEQ ID NO: 167857 - RNA, 1698 nt, Artificial Sequence
  derived and/or modified CDS sequence (opt4) from hemagglutinin__InfluenzaA__AET84163
augaaggugaagcugcuggugcugcugugcaccuucaccgccaccuacgccgacaccaucugcaucggcuaccacgccaacaacagcaccgacaccguggacaccgugcuggagaagaacgugaccgugacccacagcgugaaccugcuggagaacagccacaacggcaagcugugccugcugaagggcaucgccccccugcagcugggcaacugcagcguggccggcuggauccugggcaaccccgagugcgagagccugaucagcaaggagagcuggagcuacaucguggagaagcccaaccccgagaacggcaccugcuaccccggccacuucgccgacuacgaggagcugagagagcagcugagcagcgugagcagcuucgagagauucgagaucuuccccaaggagagcagcuggcccaaccacaccgugaccggcgugagcgccagcugcagccacaacggcgagagcagcuucuacagaaaccugcuguggcugaccggcaagaacggccuguaccccaaccugagcaagagcuacgccaacaacaaggagaaggaggugcuggugcuguggggcgugcaccacccccccagcaucagcaaccagaagacccuguaccacaccgagaacgccuacgugagcguggugagcagccacuacagcagaaaguucacccccgagguggccaagagacccaaggugagagaccaggagggcagaaucaacuacuacuggacccugcuggagcccggcgacaccaucaucuucgaggccaacggcaaccugaucgcccccagauacgccuucgcccugagcagaggcuucggcagcggcaucaucaacagcaacgcccccauggacaagugcgacgccaagugccagaccccccagggcgccaucaacagcagccugcccuuccagaacgugcaccccgugaccaucggcgagugccccaaguacgugagaagcgccaagcugagaauggugaccggccugagaaacauccccagcauccagagcagaggccuguucggcgccaucgccggcuucaucgagggcggcuggaccggcaugguggacggcugguacggcuaccaccaccagaacgagcagggcagcggcuacgccgccgaccagaagagcacccagaacgccaucaacggcaucaccaacaaggugaacagcgugaucgagaagaugaacacccaguucaccgccgugggcaaggaguucaacaagcuggagagaagaauggagaaccugaacaagaagguggacgacggcuucaucgacaucuggaccuacaacgccgagcugcuggugcugcuggagaacgagagaacccuggacuuccacgacagcaacgugaagaaccuguacgagaaggugaagagccagcugaagaacaacgccaaggagaucggcaacggcugcuucgaguucuaccacaagugcaacgacgagugcauggagagcgugaagaacggcaccuacgacuaccccaaguacagcgaggagagcaagcugaacagagagaagaucgacggcgugaagcuggagagcaugggcguguaccagauccuggccaucuacagcaccguggccagcagccuggugcugcuggugagccugggcgccaucagcuucuggaugugcagcaacggcagccugcagugcagaaucugcaucuga

SEQ ID NO: 167858 - RNA, 1698 nt, Artificial Sequence
  derived and/or modified CDS sequence (opt4) from hemagglutinin__InfluenzaA__AET84174
augaaggugaagcugcuggugcugcugugcaccuucaccgccaccuacgccgacaccaucugcaucggcuaccacgccaacaacagcaccgacaccguggacaccgugcuggagaagaacgugaccgugacccacagcgugaaccugcuggagaacagccacaacggcaagcugugccugcugaagggcaucgccccccugcagcugggcaacugcagcguggccggcuggauccugggcaaccccgagugcgagcugcugaucagcaaggagagcuggagcuacaucguggagaagcccaaccccgagaacggcaccugcuaccccggccacuucgccgacuacgaggagcugagagagcagcugagcagcgugagcagcuucgagagauucgagaucuuccccaaggagagcagcuggcccaaccacaccgugaccggcgugagcgccagcugcagccacaacggcgagagcagcuucuacagaaaccugcuguggcugaccggcaagaacggccuguaccccaaccugagcaagagcuacgccaacaacaaggagaaggaggugcuggugcuguggggcgugcaccacccccccaacaucguggaccagaagacccuguacagaaccgagaacgccuacgugagcguggugagcagccacuacagcagaaaguucacccccgagaucgccaagagacccaaggugagagaccaggagggcagaaucaacuacuacuggacccugcuggagcccggcgacaccaucaucuucgaggccaacggcaaccugaucgcccccagauacgccuucgcccugaucagaggcuucggcagcggcaucaucaacagcaacgcccccaugggcaagugcgacgccaagugccagaccccccagggcgccaucaacagcagccugcccuuccagaacgugcaccccgugaccaucggcgagugccccaaguacgugagaagcgccaagcugagaauggugaccggccugagaaacauccccagcauccagagcagaggccuguucggcgccaucgccggcuucaucgagggcggcuggaccggcaugguggacggcugguacggcuaccaccaccagaacgagcagggcagcggcuacgccgccgaccagaagagcacccagaacgccaucaacggcaucaccaacaaggugaacagcgugaucgagaagaugaacacccaguucaccgccgugggcaaggaguucaacaagcuggagagaagaauggagaaccugaacaagaagguggacgacggcuucaucgacaucuggaccuacaacgccgagcugcuggugcugcuggagaacgagagaacccuggacuuccacgacagcaacgugaagaaccuguacgagaaggugaagagccagcugaagaacaacgccaaggagaucggcaacggcugcuucgaguucuaccacaagugcaacgacgagugcauggagagcgugaagaacggcaccuacgacuaccccaaguacagcgaggagagcaagcugaacagagagaagaucgacggcgugaagcuggagagcaugggcguguaccagauccuggccaucuacagcaccguggccagcagccuggugcugcuggugagccugggcgccaucagcuucuggaugugcagcaacggcagccugcagugcagaaucugcaucuga

SEQ ID NO: 167859 - RNA, 1698 nt, Artificial Sequence
  derived and/or modified CDS sequence (opt4) from hemagglutinin__InfluenzaA__AET84196
augaaggugaagcugcuggugcugcugugcaccuucaccgccaccuacgccgacaccaucugcaucggcuaccacgccaacaacagcaccgacaccguggacaccgugcuggagaagaacgugaccgugacccacagcgugaaccugcuggagaacagccacaacggcaagcugugccugcugaagggcaucgccccccugcagcugggcaacugcagcguggccggcuggauccugggcaaccccgagugcgagagccugaucagcaaggagagcuggagcuacaucguggagaagcccaaccccgagaacggcaccugcuaccccggccacuucgccgacuacgaggagcugagagagcagcugagcagcgugagcagcuucgagagauucgagaucuuccccaaggagagcagcuggcccaaccacaccgugaccggcgugagcgccagcugcagccacaacggcgagagcagcuucuacagaaaccugcuguggcugaccagaaagaacggccuguaccccacccugagcaagagcuacgccaacaacaaggagaaggaggugcuggugcuguggggcgugcaccacccccccagcaucaacgaccagaagacccuguaccacaccgagaacgccuacgugagcguggugagcagccacuacagcagaaaguucacccccgagaucgccaagagacccaaggugagagaccaggagggcagaaucaacuacuacuggacccugcuggagcccggcgacaccaucaucuucgaggccaacggcaaccugaucgcccccagauacgccuucgcccugagcagaggcuucggcagcggcaucaucaacagcagcgcccccauggacaagugcgacgccaagugccagaccccccagggcgccaucaacagcagccugcccuuccagaacgugcaccccgugaccaucggcgagugccccaaguacgugagaagcgccaagcugagaauggugaccggccugagaaacauccccagcauccagagcagaggccuguucggcgccaucgccggcuucaucgagggcggcuggaccggcaugguggacggcugguacggcuaccaccaccagaacgagcagggcagcggcuacgccgccgaccagaagagcacccagaacgccaucaacggcaucaccaacaaggugaacagcgugaucgagaagaugaacacccaguucaccgccgugggcaaggaguucaacaagcuggagagaagaauggagaaccugaacaagaagguggacgacggcuucaucgacaucuggaccuacaacgccgagcugcuggugcugcuggagaacgagagaacccuggacuuccacaacagcaacgugaagaaccuguacgagaaggugaagagccagcugaagaacaacgccaaggagaucggcaacggcugcuucgaguucuaccacaagugcaacgacgagugcauggagagcgugaagaacggcaccuacgacuaccccaaguacagcgaggagagcaagcugaacagagagaagaucgacggcgugaagcuggagagcaugggcguguaccagauccuggccaucuacagcaccguggccagcagccuggugcugcuggugagccugggcgccaucagcuucuggaugugcagcaacggcagccugcagugcagaaucugcaucuga

SEQ ID NO: 167860 - RNA, 1698 nt, Artificial Sequence
  derived and/or modified CDS sequence (opt4) from hemagglutinin__InfluenzaA__AET84207
augaaggugaagcugcuggugcugcugugcaccuucaccgccaccuacgccgacaccaucugcaucggcuaccacgccaacaacagcaccgacaccguggacaccgugcuggagaagaacgugaccgugacccacagcgugaaccugcuggagaacagccacaacggcaagcugugccugcugaagggcaucgccccccugcagcugggcaacugcagcguggccggcuggauccugggcaaccccgagugcgagcugcugaucagcaaggagagcuggagcuacaucguggagaagcccaaccccgagaacggcaccugcuaccccggccacuucgccgacuacgaggagcugagagagcagcugagcagcgugcccagcuucgagagauucgagaucuuccccaaggagagcagcuggcccaaccacaccgugaccggcgugagcgccagcugcagccacaacggcgagagcagcuucuacagaaaccugcuguggcugaccggcaagaacggccuguaccccaaccugagcaagagcuacgccaacaacaaggagaaggaggugcuggugcuguggggcgugcaccacccccccagcaucaacgaccagaagacccuguaccacaccgagaacgccuacgugagcguggugagcagccacuacagcagaaaguucacccccgagaucgccaagagacccaaggugagagaccaggagggcagaaucaacuacuacuggacccugcuggagcccagagacaccaucaucuucgaggccaacggcaaccugaucgcccccagauacgccuucgcccugagcagaggcuucggcagcggcaucaucaacagcaacgcccccauggacaagugcgacgccaagugccagaccccccagggcgccaucaacagcagccugcccuuccagaacgugcaccccgugaccaucggcgagugccccaaguacgugagaagcgccaagcugagaauggugaccggccugagaaacauccccagcauccagagcagaggccuguucggcgccaucgccggcuucaucgagggcggcuggaccggcaugguggacggcugguacggcuaccaccaccagaacgagcagggcagcggcuacgccgccgaccagaagagcacccagaacgccaucaacggcaucaccaacaaggugaacagcgugaucgagaagaugaacacccaguucaccgccgugggcaaggaguucaacaagcuggagagaagaauggagaaccugaacaagaagguggacgacggcuucaucgacaucuggaccuacaacgccgagcugcuggugcugcuggagaacgagagaacccuggacuuccacgacagcaacgugaagaaccuguacgagaaggugaagagccagcugaagaacaacgccaaggagaucggcaacggcugcuucgaguucuaccacaagugcaacgacgagugcauggagagcgugaagaacggcaccuacgacuaccccaaguacagcgaggagagcaagcugaacagagagaagaucgacggcgugaagcuggagagcaugggcguguaccagauccuggccaucuacagcaccguggccagcagccuggugcugcuggugagccugggcgccaucagcuucuggaugugcagcaacggcagccugcagugcagaaucugcaucuga

SEQ ID NO: 167861 - RNA, 1698 nt, Artificial Sequence
  derived and/or modified CDS sequence (opt4) from hemagglutinin__InfluenzaA__AET84218
augaaggugaagcugcuggugcugcugugcaccuucaccgccaccuacgccgacaccaucugcaucggcuaccacgccaacaacagcaccgacaccguggacaccgugcuggagaagaacgugaccgugacccacagcgugaaccugcuggagaacagccacaacggcaagcugugccugcugaagggcaucgccccccugcagcugggcaacugcagcguggccggcuggauccugggcaaccccgagugcgagcugcugaucagcaaggagagcuggagcuacaucguggagaagcccaaccccgagaacggcaccugcuaccccggccacuucgccgacuacgaggagcugagagagcagcugagcagcgugagcagcuucgagagauucgagaucuuccccaaggagagcagcuggcccaaccacaccgugaccggcgugagcgccagcugcagccacaacggcgagagcagcuucuacagaaaccugcuguggcugaccggcaagaacggccuguaccccaaccugagcaagagcuacgccaacaacaaggagaaggaggugcuggugcuguggggcgugcaccacccccccaacaucagcaaccagaagacccuguaccacaccgagaacgccuacgugagcguggugagcagccacuacagcagaaaguucacccccgagaucgccaagagacccaaggugagagaccaggagggcagaaucaacuacuacuggacccugcuggagcccggcgacaccaucaucuucgaggccagcggcaaccugaucgcccccagauacgccuucgcccugagcagaggcuucggcagcggcaucaucaacagcaacgcccccauggacaagugcgacgccaagugccagaccccccagggcgccaucaacagcagccugcccuuccagaacgugcaccccgugaccaucggcgagugccccaaguacgugagaagcgccaagcugagaauggugaccggccugagaaacauccccagcauccagagcagaggccuguucggcgccaucgccggcuucaucgagggcggcuggaccggcaugguggacggcugguacggcuaccaccaccagaacgagcagggcagcggcuacgccgccgaccagaagagcacccagaacgccaucaacggcaucaccaacaaggugaacagcgugaucgagaagaugaacacccaguucaccgccgugggcaaggaguucaacaagcuggagagaagaauggagaaccugaacaagaagguggacgacggcuucaucgacaucuggaccuacaacgccgagcugcuggugcugcuggagaacgagagaacccuggacuuccacgacagcaacgugaagaaccuguacgagaaggugaagagccagcugaagaacaacgccaaggagaucggcaacggcugcuucgaguucuaccacaagugcaacgacgagugcauggagagcgugaagaacggcaccuacgacuaccccaaguacagcgaggagagcaagcugaacagagagaagaucgacggcgugaagcuggagagcaugggcguguaccagauccuggccaucuacagcaccguggccagcagccuggugcugcuggugagccugggcgccaucagcuucuggaugugcagcaacggcagccugcagugcagaaucugcaucuga

SEQ ID NO: 167862 - RNA, 1698 nt, Artificial Sequence
  derived and/or modified CDS sequence (opt4) from hemagglutinin__InfluenzaA__AET84229
augaaggugaagcugcuggugcugcugugcaccuucaccgccaccuacgccgacaccaucugcaucggcuaccacgccaacaacagcaccgacaccguggacaccgugcuggagaagaacgugaccgugacccacagcgugaaccugcuggagaacagccacaacggcaagcugugccugcugaagggcaucgccccccugcagcugggcaacugcagcguggccggcuggauccugggcaaccccgagugcgagcugcugaucagcaaggagagcuggagcuacaucguggagaagcccaaccccgagaacggcaccugcuaccccggccacuucgccgacuacgaggagcugagagagcagcugagcagcgugagcagcuucgagagauucgagaucuuccccaaggagagcagcuggcccaaccacaccgugaccggcgugagcgccagcugcagccacaacggcgagagcagcuucuacagaaaccugcuguggcugaccggcaagaacggccuguaccccacccugagcaagagcuacgccaacaacaaggagaaggaggugcuggugcuguggggcgugcaccacccccccaacaucguggaccagaagacccuguacagaaccgagaacgccuacgugagcguggugagcagccacuacagcagaaaguucacccccgagaucgccaagagacccaaggugagagaccaggagggcagaaucaacuacuacuggacccugcuggagcccggcgacaccaucaucuucgaggccaacggcaaccugaucgcccccagauacgccuucgcccugagcagaggcuucggcagcggcaucaucaacagcaacgcccccaugggcaagugcgacgccaagugccagaccccccagggcgccaucaacagcagccugcccuuccagaacgugcaccccgugaccaucggcgagugccccaaguacgugagaagcgccaagcugagaauggugaccggccugagaaacaucccccccauccagagcagaggccuguucggcgccaucgccggcuucaucgagggcggcuggaccggcaugguggacggcugguacggcuaccaccaccagaacgagcagggcagcggcuacgccgccgaccagaagagcacccagaacgccaucaacggcaucaccaacaaggugaacagcgugaucgagaagaugaacacccaguucaccgccgugggcaaggaguucaacaagcuggagagaagaauggagaaccugaacaagaagguggacgacggcuucaucgacaucuggaccuacaacgccgagcugcuggugcugcuggagaacgagagaacccuggacuuccacgacagcaacgugaagaaccuguacgagaaggugaagagccagcugaagaacaacgccaaggagaucggcaacggcugcuucgaguucuaccacaagugcaacgacgagugcauggagagcgugaagaacggcaccuacgacuaccccaaguacagcgaggagagcaagcugaacagagagaagaucgacggcgugaagcuggagagcaugggcguguaccagauccuggccaucuacagcaccguggccagcagccuggugcugcuggugagccugggcgccaucagcuucuggaugugcagcaacggcagccugcagugcagaaucugcaucuga

SEQ ID NO: 167863 - RNA, 1698 nt, Artificial Sequence
  derived and/or modified CDS sequence (opt4) from hemagglutinin__InfluenzaA__AET84240
augaaggugaagcugcuggugcugcugugcaccuucaccgccaccuacgccgacaccaucugcaucggcuaccacgccaacaacagcaccgacaccguggacaccgugcuggagaagaacgugaccgugacccacagcgugaaccugcuggagaacagccacaacggcaagcugugccugcugaagggcaucgccccccugcagcugggcaacugcagcguggccggcuggauccugggcaaccccgagugcgagcugcugaucagcaaggagagcuggagcuacaucguggagaagcccaaccccgagaacggcaccugcuaccccggcuacuucgccgacuacgaggagcugagagagcagcugagcagcgugagcagcuucgagagauucgagaucuuccccaaggagagcagcuggcccaaccacaccgugaccggcgugagcgccagcugcagccacaacggcgagagcagcuucuacagaaaccugcuguggcugaccggcaagaacggccuguaccccaaccugagcaagagcuacgccaacaacaaggagaaggaggugcuggugcuguggggcgugcaccacccccccaacaucguggaccagaagacccuguacagaaccgagaacgccuacgugagcguggugagcagccacuacagcagaaaguucacccccgagaucgccaagagacccaaggugagagaccaggagggcagaaucaacuacuacuggacccugcuggagcccggcgacaccaucaucuucgaggccaacggcaaccugaucgcccccagauacgccuucgcccugagcagaggcuucggcagcggcaucaucaacagcaacgcccccaugggcaagugcgacgccaagugccagaccccccagggcgccaucaacagcagccugcccuuccagaacgugcaccccgugaccaucggcgagugccccaaguacgugagaagcgccaagcugagaauggugaccggccugagaaacauccccagcauccagagcagaggccuguucggcgccaucgccggcuucaucgagggcggcuggaccggcaugguggacggcugguacggcuaccaccaccagaacgagcagggcagcggcuacgccgccgaccagaagagcacccagaacgccaucaacggcaucaccaacaaggugaacagcgugaucgagaagaugaacacccaguucaccgccgugggcaaggaguucaacaagcuggagagaagaauggagaaccugaacaagaagguggacgacggcuucaucgacaucuggaccuacaacgccgagcugcuggugcugcuggagaacgagagaacccuggacuuccacgacagcaacgugaagaaccuguacgagaaggugaagagccagcugaagaacaacgccaaggagaucggcaacggcugcuucgaguucuaccacaagugcaacaacgagugcauggagagcgugaagaacggcaccuacgacuaccccaaguacagcgaggagagcaagcugaacagagagaagaucgacggcgugaagcuggagagcaugggcguguaccagauccuggccaucuacagcaccguggccagcagccuggugcugcuggugagccugggcgccaucagcuucuggaugugcagcaacggcagccugcagugcagaaucugcaucuga

SEQ ID NO: 167864 - RNA, 1698 nt, Artificial Sequence
  derived and/or modified CDS sequence (opt4) from hemagglutinin__InfluenzaA__AET84251
augaaggugaagcugcuggugcugcugugcaccuucaccgccaccuacgccgacaccaucugcaucggcuaccacgccaacaacagcaccgacaccguggacaccgugcuggagaagaacgugaccgugacccacagcgugaaccugcuggagaacagccacaacggcaagcugugccugcugaagggcaucgccccccugcagcugggcaacugcagcguggccggcuggauccugggcaaccccgagugcgagcugcugaucagcaaggagagcuggagcuacaucguggagaagcccaaccccgagaacggcaccugcuaccccggccacuucgccgacuacgaggagcugagagagcagcugagcagcgugagcagcuucgagagauucgagaucuuccccaaggagagcagcuggcccaaccacaccgugaccggcgugagcgccagcugcagccacaacggcgagagcagcuucuacagaaaccugcuguggcugaccggcaagaacggccuguaccccaaccugagcaagagcuacgccaacaacaaggagaaggaggugcuggugcuguggggcgugcaccacccccccaacaucgugaaccagaagacccuguacagaaccgagaacgccuacgugagcguggugagcagccacuacagcagaaaguucacccccgagaucgccaagagacccaaggugagagaccaggagggcagaaucaacuacuacuggacccugcuggagcccggcgacaccaucaucuucgaggccaacggcaaccugaucgcccccagauacgccuucgcccugagcagaggcuucggcagcggcaucaucaacagcaacgcccccaugggcaagugcgacgccaagugccagaccccccacggcgccaucaacagcugccugcccuuccagaacgugcaccccgugaccaucggcgagugccccaaguacgugagaagcgccaagcugagaauggugaccggccugagaaacauccccagcauccagagcagaggccuguucggcgccaucgccggcuucaucgagggcggcuggaccggcaugguggacggcugguacggcuaccaccaccagaacgagcagggcagcggcuacgccgccgaccagaagagcacccagaacgccaucaacggcaucaccaacaaggugaacagcgugaucgagaagaugaacacccaguucaccgccgugggcaaggaguucaacaagcuggagagaagaauggagaaccugaacaagaagguggacgacggcuucaucgacaucuggaccuacaacgccgagcugcuggugcugcuggagaacgagagaacccuggacuuccacgacagcaacgugaagaaccuguacgagaaggugaagagccagcugaagaacaacgccaaggagaucggcaacggcugcuucgaguucuaccacaagugcaacgacgagugcauggagagcgugaagaacggcaccuacgacuaccccaaguacagcgaggagagcaagcugaacaaggagaagaucgacggcgugaagcuggagagcaugggcguguaccagauccuggccaucuacagcaccguggccagcagccuggugcugcuggugagccugggcgccaucagcuucuggaugugcagcaacggcagccugcagugcagaaucugcaucuga

SEQ ID NO: 167865 - RNA, 1698 nt, Artificial Sequence
  derived and/or modified CDS sequence (opt4) from hemagglutinin__InfluenzaA__AET84262
augaaggugaagcugcuggugcugcugugcaccuucaccgccaccuacgccgacaccaucugcaucggcuaccacgccaacaacagcaccgacaccguggacaccgugcuggagaagaacgugaccgugacccacagcgugaaccugcuggagaacagccacaacggcaagcugugccugcugaagggcaucgccccccugcagcugggcaacugcagcguggccggcuggauccugggcaaccccgagugcgagcugcugaucagcaaggagagcuggagcuacaucguggagaagcccaaccccgagaacggcaccugcuaccccggccacuucgccgacuacgaggagcugagagagcagcugagcagcgugagcagcuucgagagauucgagaucuuccccaaggagagcagcuggcccaaccacaccgugaccggcgugagcgccagcugcagccacaacggcgagagcagcuucuacagaaaccugcuguggcugaccggcaagaacggccuguaccccaaccugagcaagagcuacgccaacaacaaggagaaggaggugcuggugcuguggggcgugcaccacccccccaacaucguggaccagaagacccuguacagaaccgagaacgccuacgugagcguggugagcagccacuacagcagaaaguucacccccgagaucgccaagagacccaaggugagagaccaggagggcagaaucaacuacuacuggacccugcuggagcccggcgacaccaucaucuucgaggccaacggcaaccugaucgcccccagauacgccuucgcccugagcagaggcuucggcagcggcaucaucaacagcaacgcccccauggacaagugcgacgccaagugccagaccccccacggcgccaucaacagcugccugcccuuccagaacgugcaccccgugaccaucggcgagugccccaaguacgugagaagcgccaagcugagaauggugaccggccugagaaacauccccagcauccagagcagaggccuguucggcgccaucgccggcuucaucgagggcggcuggaccggcaugguggacggcugguacggcuaccaccaccagaacgagcagggcagcggcuacgccgccgaccagaagagcacccagaacgccaucaacggcaucaccaacaaggugaacagcgugaucgagaagaugaacacccaguucaccgccgugggcaaggaguucaacaagcuggagagaagaauggagaaccugaacaagaagguggacgacggcuucaucgacaucuggaccuacaacgccgagcugcuggugcugcuggagaacgagagaacccuggacuuccacgacagcaacgugaagaaccuguacgagaaggugaagagccagcugaagaacaacgccaaggagaucggcaacggcugcuucgaguucuaccacaagugcaacgacgagugcauggagagcgugaagaacggcaccuacgacuaccccaaguacagcgaggagagcaagcugaacagagagaagaucgacggcgugaagcuggagagcaugggcguguaccagauccuggccaucuacagcaccguggccagcagccuggugcugcuggugagccugggcgccaucagcuucuggaugugcagcaacggcagccugcagugcagaaucugcaucuga

SEQ ID NO: 167866 - RNA, 1698 nt, Artificial Sequence; identical to SEQ ID NO: 167793
  derived and/or modified CDS sequence (opt4) from hemagglutinin__InfluenzaA__AET84284

SEQ ID NO: 167867 - RNA, 1698 nt, Artificial Sequence
  derived and/or modified CDS sequence (opt4) from hemagglutinin__InfluenzaA__AET84306
augaaggugaagcugcuggugcugcugugcaccuucaccgccaccuacgccgacaccaucugcaucggcuaccacgccaacaacagcaccgacaccguggacaccgugcuggagaagaacgugaccgugacccacagcgugaaccugcuggagaacagccacaacggcaagcugugccugcugaagggcaucgccccccugcagcugggcaacugcagcguggccggcuggauccugggcaaccccgagugcgagcugcugaucagcaaggagagcuggagcuacaucguggagaagcccaaccccgagaacggcaccugcuaccccggccacuucgccgacuacgaggagcugagagagcagcugagcagcgugagcagcuucgagagauucgagaucuuccccaaggagagcagcuggcccaaccacaccgugaccggcgugagcgccagcugcagccacaacggcgagagcagcuucuacagaaaccugcuguggcugaccggcaagaacggccuguaccccaaccugagcaagagcuacgccaacaacaaggagaaggaggugcuggugcuguggggcgugcaccacccccccaacaucggcaaccagaaggcccuguaccacaccgagaacgccuacgugagcguggugagcagccacuacagcaucaaguucacccccgagaucgccaagagacccaaggugagagaccaggagggcagaaucaacuacuacuggacccugcuggagcccggcgacaccaucaucuucgaggccaacggcaaccugaucgcccccagauacgccuucgcccugagcagaggcuucggcagcggcaucaucaacagcaacgcccccauggacaagugcgacgccaagugccagaccccccagggcgccaucaacagcagccugcccuuccagaacgugcaccccgugaccaucggcgagugccccaaguacgugagaagcgccaagcugagaauggugaccggccugagaaacauccccagcauccagagcagaggccuguucggcgccaucgccggcuucaucgagggcggcuggaccggcaugguggacggcugguacggcuaccaccaccagaacgagcagggcagcggcuacgccgccgaccagaagagcacccagaacgccaucaacggcaucaccaacaaggugaacagcgugaucgagaagaugaacacccaguucaccgccgugggcaaggaguucaacaagcuggagagaagaauggagaaccugaacaagaagguggacgacggcuucaucgacaucuggaccuacaacgccgagcugcuggugcugcuggagaacgagagaacccuggacuuccacgacagcaacgugaagaaccuguacgagaaggugaagagccagcugaagaacaacgccaaggagaucggcaacggcugcuucgaguucuaccacaagugcaacgacgagugcauggagagcgugaagaacggcaccuacgacuaccccaaguacagcgaggagagcaagcugaacagagagaagaucgacggcgugaagcuggagagcaugggcguguaccagauccuggccaucuacagcaccguggccagcagccuggugcugcuggugagccugggcgccaucagcuucuggaugugcagcaacggcagccugcagugcagaaucugcaucuga

SEQ ID NO: 167868 - RNA, 1698 nt, Artificial Sequence
  derived and/or modified CDS sequence (opt4) from hemagglutinin__InfluenzaA__AET84339
augaaggugaagcugcuggugcugcugugcaccuucaccgccaccuacgccgacaccaucugcaucggcuaccacgccaacaacagcaccgacaccguggacaccgugcuggagaagaacgugaccgugacccacagcgugaaccugcuggagaacagccacaacggcaagcugugccugcugaagggcaucgccccccugcagcugggcaacugcagcguggccggcuggauccugggcaaccccgagugcgagcugcugaucagcaaggagagcuggagcuacaucguggagaagcccaaccccgagaacggcaccugcuaccccggccacuucgccgacuacgaggagcugagagagcagcugagcagcgugagcagcuucgagagauucgagaucuuccccaaggagagcagcuggcccaaccacaccgugaccggcgugagcgccagcugcagccacaacggcgagagaagcuucuacagaaaccugcuguggcugaccggcaagaacggccuguaccccaaccugagcaagagcuacgccaacaacaaggagaaggaggugcuggugcuguggggcgugcaccacccccccaacaucggcaaccagaagacccuguaccacaccgagaacgccuacgugagcguggugagcagccacuacagcagaaaguucacccccgagaucgccaagagacccaaggugagagaccaggagggcagaaucaacuacuacuggacccugcuggagcccggcgacaccaucaucuucgaggccaacggcaaccugaucgcccccagauacgccuucgcccugagcagaggcuucggcagcggcaucaucaacagcaacgcccccauggacaagugcgacgccaagugccagaccccccagggcgccaucaacagcagccugcccuuccagaacgugcaccccgugaccaucggcgagugccccaaguacgugagaagcgccaagcugagaauggugaccggccugagaaacauccccagcauccagagcagaggccuguucggcgccaucgccggcuucaucgagggcggcuggaccggcaugguggacggcugguacggcuaccaccaccagaacgagcagggcagcggcuacgccgccgaccagaagagcacccagaacgccaucaacggcaucaccaacaaggugaacagcgugaucgagaagaugaacacccaguucaccgccgugggcaaggaguucaacaagcuggagagaagaauggagaaccugaacaagaagguggacgacggcuucaucgacaucuggaccuacaacgccgagcugcuggugcugcuggagaacgagagaacccuggacuuccacgacagcaacgugaagaaccuguacgagaaggugaagagccagcugaagaacaacgccaaggagaucggcaacggcugcuucgaguucuaccacaagugcaacgacgagugcauggagagcgugaagaacggcaccuacgacuaccccaaguacagcgaggagagcaagcugaacagagagaagaucgacggcgugaagcuggagagcaugggcguguaccagauccuggccaucuacagcaccguggccagcagccuggugcugcuggugagccugggcgccaucagcuucuggaugugcagcaacggcagccugcagugcagaaucugcaucuga

SEQ ID NO: 167869 - RNA, 1698 nt, Artificial Sequence; identical to SEQ ID NO: 167868
  derived and/or modified CDS sequence (opt4) from hemagglutinin__InfluenzaA__AET84361

SEQ ID NO: 167870 - RNA, 1698 nt, Artificial Sequence
  derived and/or modified CDS sequence (opt4) from hemagglutinin__InfluenzaA__AET84372
augaaggugaagcugcuggugcugcugugcaccuucaccgccaccuacgccgacaccaucugcaucggcuaccacgccaacaacagcaccgacaccguggacaccgugcuggagaagaacgugaccgugacccacagcgugaaccugcuggagaacagccacaacggcaagcugugccugcugaagggcaucgccccccugcagcugggcaacugcagcguggccggcuggauccugggcaaccccgagugcgagcugcugaucagcaaggagagcuggagcuacaucguggagaagcccaaccccgagaacggcaccugcuaccccggccacuucgccgacuacgaggagcugagagagcagcugagcagcgugagcagcuucgagagauucgagaucuuccccaaggagagcagcuggcccaaccacaccgugaccggcgugagcgccagcugcagccacaacggcgagagaagcuucuacagaaaccugcuguggcugaccggcaagaacggccuguaccccaaccugagcaagagcuacgccaacaacaaggagaaggaggugcuggugcuguggggcgugcaccacccccccaacaucggcgaccagaagacccuguaccacaccgagaacgccuacgugagcguggugagcagccacuacagcagaaaguucacccccgagaucgccaagagacccaaggugagagaccaggagggcagaaucaacuacuacuggacccugcuggagcccggcgacaccaucaucuucgaggccaacggcaaccugaucgcccccagauacgccuucgcccugagcagaggcuucggcagcggcaucaucaacagcaacgcccccauggacaagugcgacgccaagugccagaccccccagggcgccaucaacagcagccugcccuuccagaacgugcaccccgugaccaucggcgagugccccaaguacgugagaagcgccaagcugagaauggugaccggccugagaaacauccccagcauccagagcagaggccuguucggcgccaucgccggcuucaucgagggcggcuggaccggcaugguggacggcugguacggcuaccaccaccagaacgagcagggcagcggcuacgccgccgaccagaagagcacccagaacgccaucaacggcaucaccaacaaggugaacagcgugaucgagaagaugaacacccaguucaccgccgugggcaaggaguucaacaagcuggagagaagaauggagaaccugaacaagaagguggacgacggcuucaucgacaucuggaccuacaacgccgagcugcuggugcugcuggagaacgagagaacccuggacuuccacgacagcaacgugaagaaccuguacgagaaggugaagagccagcugaagaacaacgccaaggagaucggcaacggcugcuucgaguucuaccacaagugcaacgacgagugcauggagagcgugaagaacggcaccuacgacuaccccaaguacagcgaggagagcaagcugaacagagagaagaucgacggcgugaagcuggagagcaugggcguguaccagauccuggccaucuacagcaccguggccagcagccuggugcugcuggugagccugggcgccaucagcuucuggaugugcagcaacggcagccugcagugcagaaucugcaucuga

SEQ ID NO: 167871 - RNA, 1698 nt, Artificial Sequence
  derived and/or modified CDS sequence (opt4) from hemagglutinin__InfluenzaA__AET84394
augaaggugaagcugcuggugcugcugugcaccuucaccgccaccuacgccgacaccaucugcaucggcuaccacgccaacaacagcaccgacaccguggacaccgugcuggagaagaacgugaccgugacccacagcgugaaccugcuggagaacagccacaacggcaagcugugccugcugaagggcaucgccccccugcagcugggcaacugcagcguggccggcuggauccugggcaaccccgagugcgagcugcugaucagcaaggagagcuggagcuacaucguggagaagcccaaccccgagaacggcaccugcuaccccggccacuucgccgacuacgaggagcugagagagcagcugagcagcgugagcagcuucgagagauucgagaucuuccccaaggagagcagcuggcccaaccacaccgugaccggcgugagcgccagcugcagccacaacggcgagagaagcuucuacagaaaccugcuguggcugaccggcaagaacggccuguaccccaaccugagcaagagcuacgccaacaacaaggagaaggaggugcuggugcuguggggcgugcaccacccccccgacaucggcaaccagaagacccuguaccacaccgagaacgccuacgugagcguggugagcagccacuacagcagaaaguucacccccgagaucgccaagagacccaaggugagagaccaggagggcagaaucaacuacuacuggacccugcuggagcccggcgacaccaucaucuucgaggccaacggcaaccugaucgcccccagauacgccuucgcccugagcagaggcuucggcagcggcaucaucaacagcaacgcccccauggacaagugcgacgccaagugccagaccccccagggcgccaucaacagcagccugcccuuccagaacgugcaccccgugaccaucggcgagugccccaaguacgugagaagcgagaagcugagaauggugaccggccugagaaacauccccagcauccagagcagaggccuguucggcgccaucgccggcuucaucgagggcggcuggaccggcaugguggacggcugguacggcuaccaccaccagaacgagcagggcagcggcuacgccgccgaccagaagagcacccagaacgccaucaacggcaucaccaacaaggugaacagcgugaucgagaagaugaacacccaguucaccgccgugggcaaggaguucaacaagcuggagagaagaauggagaaccugaacaagaagguggacgacggcuucaucgacaucuggaccuacaacgccgagcugcuggugcugcuggagaacgagagaacccuggacuuccacgacagcaacgugaagaaccuguacgagaaggugaagagccagcugaagaacaacgccaaggagaucggcaacggcugcuucgaguucuaccacaagugcaacgacgagugcauggagagcgugaagaacggcaccuacgacuaccccaaguacagcgaggagagcaagcugaacagagagaagaucgacggcgugaagcuggagagcaugggcguguaccagauccuggccaucuacagcaccguggccagcagccuggugcugcuggugagccugggcgccaucagcuucuggaugugcagcaacggcagccugcagugcagaaucugcaucuga

SEQ ID NO: 167872 - RNA, 1698 nt, Artificial Sequence; identical to SEQ ID NO: 165576
  derived and/or modified CDS sequence (opt4) from hemagglutinin__InfluenzaA__AET84405

SEQ ID NO: 167873 - RNA, 1698 nt, Artificial Sequence
  derived and/or modified CDS sequence (opt4) from hemagglutinin__InfluenzaA__AET84416
augaaggugaagcugcuggugcugcugugcaccuucaccgccaccuacgccgacaccaucugcaucggcuaccacgccaacaacagcaccgacaccguggacaccgugcuggagaagaacgugaccgugacccacagcgugaaccugcuggagaacagccacaacggcaagcugugccugcugaagggcaucgccccccugcagcugggcaacugcagcguggccggcuggauccugggcaaccccgagugcgagcugcugaucagcaaggagagcuggagcuacaucguggagaagcccaaccccgagaacggcaccugcuaccccggccacuucgccgacuacgaggagcugagagagcagcugagcagcgugagcagcuucgagagauucgagaucuuccccaaggagagcagcuggcccaaccacaccgugaccggcgugagcgccagcugcagccacaacggcgagagaagcuucuacagaaaccugcuguggcugaccggcaagaacggccuguaccccacccugagcaagagcuacgccaacaacaaggagaaggaggugcuggugcuguggggcgugcaccacccccccgacaucggcgaccagaagacccuguaccacaccgagaacgccuacgugagcguggugagcagccacuacagcagaaaguucacccccgagaucgccaagagacccaaggugagagaccaggagggcagaaucaacuacuacuggacccugcuggagcccggcgacaccaucaucuucgaggccaacggcaaccugaucgcccccagauacgccuucgcccugagcagaggcuucggcagcggcaucaucaacagcaacgcccccauggacaagugcgacgccaagugccagaccccccagggcgccaucaacagcagccugcccuuccagaacgugcaccccgugaccaucggcgagugccccaaguacgugagaagcgccaagcugagaauggugaccggccugagaaacauccccagcauccagagcagaggccuguucggcgccaucgccggcuucaucgagggcggcuggaccggcaugguggacggcugguacggcuaccaccaccagaacgagcagggcagcggcuacgccgccgaccagaagagcacccagaacgccaucaacggcaucaccaacaaggugaacagcgugaucgagaagaugaacacccaguucaccgccgugggcaaggaguucaacaagcuggagagaagaauggagaaccugaacaagaagguggacgacggcuucaucgacaucuggaccuacaacgccgagcugcuggugcugcuggagaacgagagaacccuggacuuccacgacagcaacgugaagaaccuguacgagaaggugaagagccagcugaagaacaacgccaaggagaucggcaacggcugcuucgaguucuaccacaagugcaacgacgagugcauggagagcgugaagaacggcaccuacgacuaccccaaguacagcgaggagagcaagcugaacagagagaagaucgacggcgugaagcuggagagcaugggcguguaccagauccuggccaucuacagcaccguggccagcagccuggugcugcuggugagccugggcgccaucagcuucuggaugugcagcaacggcagccugcagugcagaaucugcaucuga

SEQ ID NO: 167874 - RNA, 1698 nt, Artificial Sequence
  derived and/or modified CDS sequence (opt4) from hemagglutinin__InfluenzaA__AET84427
augaaggugaagcugcuggugcugcugugcaccuucaccgccaccuacgccgacaccaucugcaucggcuaccacgccaacaacagcaccgacaccguggacaccgugcuggagaagaacgugaccgugacccacagcgugaaccugcuggagaacagccacaacggcaagcugugccugcugaagggcaucgccccccugcagcugggcaacugcagcguggccggcuggauccugggcaaccccgagugcgagcugcugaucagcaaggagagcuggagcuacaucguggagaagcccaaccccgagaacggcaccugcuaccccggccacuucgccgacuacgaggagcugagagagcagcugagcagcgugagcagcuucgagagauucgagaucuuccccaaggagagcagcuggcccaaccacaccgugaccggcgugagcgccagcugcagccacaacggcgagagcagcuucuacagaaaccugcuguggcugaccggcaagaacggccuguaccccaaccugagcaagagcuacgccaacaacaaggagaaggaggugcuggugcuguggggcgugcaccacccccccaacaucggcaaccagaagacccuguaccacaccgagaacgccuacgugagcguggugagcagccacuacagcagaaaguucacccccgagaucgccaagagacccaaggugagagaccaggagggcagaaucaacuacuacuggacccugcuggagcccggcgacaccaucaucuucgaggccaacggcaaccugaucgcccccagauacgccuucgcccugagcagaggcuucggcagcggcaucaucaacagcaacgcccccauggacaagugcgacgccaagugccagaccccccagggcgccaucaacagcagccugcccuuccagaacgugcaccccgugaccaucggcgagugccccaaguacgugagaagcgccaagcugagaauggugaccggccugagaaacauccccagcauccagagcagaggccuguucggcgccaucgccggcuucaucgagggcggcuggaccggcaugguggacggcugguacggcuaccaccaccagaacgagcagggcagcggcuacgccgccgaccagaagagcacccagaacgccaucaacggcaucaccaacaaggugaacagcgugaucgagaagaugaacacccaguucaccgccgugggcaaggaguucaacaagcuggagagaagaauggagaaccugaacaagaagguggacgacggcuucaucgacaucuggaccuacaacgccgagcugcuggugcugcuggagaacgagagaacccuggacuuccacgacagcaacgugaagaaccuguacgagaaggugaagagccagcugaagaacaacgccaaggagaucggcaacggcugcuucgaguucuaccacaagugcaacgacgagugcauggagagcgugaagaacggcaccuacgacuaccccaaguacagcgaggagagcaagcugaacagagagaagaucgacggcgugaagcuggagagcaugggcguguaccagauccuggccaucuacagcaccguggccagcagccuggugcugcuggugagccugggcgccaucagcuucuggaugugcagcaacggcagccugcagugcagaaucugcaucuga

SEQ ID NO: 167875 - RNA, 1698 nt, Artificial Sequence
  derived and/or modified CDS sequence (opt4) from hemagglutinin__InfluenzaA__AET84438
augaaggugaagcugcuggugcugcugugcaccuucaccgccaccuacgccgacaccaucugcaucggcuaccacgccaacaacagcaccgacaccguggacaccgugcuggagaagaacgugaccgugacccacagcgugaaccugcuggagaacagccacaacggcaagcugugccugcugaagggcaucgccccccugcagcugggcaacugcagcguggccggcuggauccugggcaaccccgagugcgagcugcugaucagcaaggagagcuggagcuacaucguggagaagcccaaccccgagaacggcaccugcuaccccggccacuucgccgacuacgaggagcugagagagcagcugagcagcgugagcagcuucgagagauucgagaucuuccccaaggagagcagcuggcccaaccacaccgugaccggcgugagcgccagcugcagccacaacggcgagagcagcuucuacagaaaccugcuguggcugaccggcaagaacggccuguaccccaaccugagcaagagcuacgccaacaacaaggagaaggaggugcuggugcuguggggcgugcaccacccccccaacaucggcgugcagaagacccuguacaacaccgagaacgccuacgugagcguggugagcagccacuacagcagaaaguucacccccgagaucgccaagagacccaaggugagagaccaggagggcagaaucaacuacuacuggacccugcuggagcccggcgacaccaucauguucgaggccaacggcaaccugaucgcccccagauacgccuucgcccugagcagaggcuucggcagcggcaucaucaacagcaacgcccccauggacaagugcgacgccaagugccagaccccccagggcgccaucaacagcagccugcccuuccagaacgugcaccccgugaccaucggcgagugccccaaguacgugagaagcgccaagcugagaauggugaccggccugagaaacauccccagcauccagagcagaggccuguucggcgccaucgccggcuucaucgagggcggcuggaccggcaugguggacggcugguacggcuaccaccaccagaacgagcagggcagcggcuacgccgccgaccagaagagcacccagaacgccaucaacggcaucaccaacaaggugaacagcgugaucgagaagaugaacacccaguucaccgccgugggcaaggaguucaacaagcuggagagaagaauggagaaccugaacaagaagguggacgacggcuucaucgacaucuggaccuacaacgccgagcugcuggugcugcuggagaacgagagaacccuggacuuccacgacagcaacgugaagaaccuguacgagaaggugaagagccagcugaagaacaacgccaaggagaucggcaacggcugcuucgaguucuaccacaagugcaacgacgagugcauggagagcgugaagaacggcaccuacgacuaccccaaguacagcgaggagagcaagcugaacagagagaagaucgacggcgugaagcuggagagcaugggcguguaccagauccuggccaucuacagcaccguggccagcagccuggugcugcuggugagccugggcgccaucagcuucuggaugugcagcaacggcagccugcagugcagaaucugcaucuga

SEQ ID NO: 167876 - RNA, 1698 nt, Artificial Sequence
  derived and/or modified CDS sequence (opt4) from hemagglutinin__InfluenzaA__AET84449
augaaggugaagcugcuggugcugcugugcaccuucaccgccaccuacgccgacaccaucugcaucggcuaccacgccaacaacagcaccgacaccguggacaccgugcuggagaagaacgugaccgugacccacagcgugaaccugcuggaggacagccacaacggcaagcugugccugcugaagggcaucgccccccugcagcugggcaacugcagcguggccggcuggauccugggcaaccccgagugcgagcugcugaucagcagagagagcuggagcuacaucguggagaagcccaaccccgagaacggcaccugcuaccccggccacuucgccgacuacgaggagcugagagagcagcugagcagcgugagcagcuucgagagauucgagaucuuccccaaggagagcagcuggcccaaccacaccaccaccggcgugagcgccagcugcagccacaacggcgagagcagcuucuacaagaaccugcuguggcugaccggcaagaacggccuguaccccaaccugagcaagagcuacgccaacaacaaggagaaggaggugcuggugcuguggggcgugcaccacccccccaacaucggcgaccagagagcccuguaccacaccgagaacgccuacgugagcguggugagcagccacuacagcagaaaguucacccccgagaucgccaagagacccaaggugagagaccaggagggcagaaucaacuacuacuggacccugcuggagcccggcgacaccaucaucuucgaggccaacggcaaccugaucgcccccagauacgccuucgcccugagcagaggcuucggcagcggcaucaucaacagcaacgcccccauggacggcugcgacgccaagugccagaccccccagggcgccaucaacagcagccugcccuuccagaacgugcaccccgugaccaucggcgagugccccaaguacgugagaagcgccaagcugagaauggugaccggccugagaaacauccccagcauccagagcagaggccuguucggcgccaucgccggcuucaucgagggcggcuggaccggcaugguggacggcugguacggcuaccaccaccagaacgagcagggcagcggcuacgccgccgaccagaagagcacccagaacgccaucaacggcaucaccaacaaggugaacagcgugaucgagaagaugaacacccaguucaccgccgugggcaaggaguucaacaagcuggagagaagaauggagaaccugaacaagaagguggacgacggcuucaucgacaucuggaccuacaacgccgagcugcuggugcugcuggagaacgagagaacccuggacuuccacgacagcaacgugaagaaccuguacgagaaggugaagagccagcugaagaacaacgccaaggagaucggcaacggcugcuucgaguucuaccacaagugcaacgacgagugcauggagagcgugaagaacggcaccuacgacuaccccaaguacagcgaggagagcaagcugaacagagagaagaucgacggcgugaagcuggagagcaugggcguguaccagauccuggccaucuacagcaccguggccagcagccuggugcugcuggugagccugggcgccaucagcuucuggaugugcagcaacggcagccugcagugcagaaucugcaucuga

SEQ ID NO: 167877 - RNA, 1701 nt, Artificial Sequence
  derived and/or modified CDS sequence (opt4) from hemagglutinin__InfluenzaA__AET98600
augaagaccaucaucgcccugagcuacauccugugccugguguucgcccagaagcugcccggcaacgacaacagcaccgccacccugugccugggccaccacgccgugcccaacggcaccaucgugaagaccaucaccaacgaccagaucgaggugaccaacgccaccgagcuggugcagagcagcagcaccggcgagaucugcgacagcccccaccagauccuggacggcgagaacugcacccugaucgacgcccugcugggcgacccccagugcgacggcuuccagaacaagaagugggaccuguucguggagagaagcaaggccuacagcaacugcuaccccuacgacgugcccgacuacgccagccugagaagccugguggccagcagcggcacccuggaguucaacaacgagagcuucaacuggaccggcgugacccagaacggcaccagcagcgccugcaucagaagaagcaacaacagcuucuucagcagacugaacuggcugacccaccugaacuucaaguaccccgcccugaacgugaccgugcccaacaacgagcaguucgacaagcuguacaucuggggcgugcaccaccccggcaccgacaaggaccagaucuuccuguacgcccaggccagcggcagaaucaccgugagcaccaagagaagccagcaggccgugauccccaacaucggcagcagacccagagugagaaacauccccagcagaaucagcaucuacuggaccaucgugaagcccggcgacauccugcugaucaacagcaccggcaaccugaucgcccccagaggcuacuucaagaucagaagcggcaagagcagcaucaugagaagcgacgcccccaucggcaagugcaacagcgagugcaucacccccaacggcagcauccccaacgacaagcccuuccagaacgugaacagaaucaccuacggcgccugccccagauacgugaagcagagcacccugaagcuggccaccggcaugagaaacgugcccgagaagcagaccagaggcaucuucggcgccaucgccggcuucaucgagaacggcugggagggcaugguggacggcugguacggcuucagacaccagaacagcgagggcagaggccaggccgccgaccugaagagcacccaggccgccaucgaccagaucaacggcaagcugaacagacugaucggcaagaccaacgagaaguuccaccagaucgagaaggaguucagcgagguggagggcagaauccaggaccuggagaaguacguggaggacaccaagaucgaccuguggagcuacaacgccgagcugcugguggcccuggagaaccagcacaccaucgaccugaccgacagcgagaugaacaagcuguucgagaagaccaagaagcagcugagagagaacgccgaggacaugggcaacggcugcuucaccaucuaccacaagugcgacaacgccugcaucggcagcaucagaaacggcaccuacgaccacaacguguacagagacgaggcccugaacaacagauuccagaucaagggcguggagcugaagagcggcuacaaggacuggauccuguggaucagcuucgccaucagcugcuuccugcugugcguggcccugcugggcuucaucaugugggccugccagaagggcaacaucagaugcaacaucugcaucuga

SEQ ID NO: 167878 - RNA, 1701 nt, Artificial Sequence
  derived and/or modified CDS sequence (opt4) from hemagglutinin__InfluenzaA__AEV76874
augaaggccauccugguggugcugcuguacaccuucgccaccgccaacgccgacacccugugcaucggcuaccacgccaacaacagcaccgacaccguggacaccgugcuggagaagaacgugaccgugacccacagcgugaaccugcuggaggacaagcacaacggcaagcugugcaagcugagaggcguggccccccugcaccugggcaagugcaacaucgccggcuggauccugggcaaccccgagugcgagagcuucagcaccgccagcagcuggagcuacaucguggagaccagcagcagcgacaacggcaccugcuaccccggcgacuucaucgacuacgaggagcugagagagcagcugagcagcgugagcagcuucgagagauucgagaucuuccccaagaccagcagcuggcccaaccacgacagcaacaagggcgugaccgccgccugcccccacgccggcgccaagggcuucuacaagaaccugaucuggcuggugaagaagggcaacagcuaccccaagcugagcaagagcuacaucaacgacaagggcaaggaggugcuggugcuguggggcauccaccaccccagcaccaccgccgaccagcagagccuguaccagaacgccgacaccuacguguucgugggcaccagcagauacagcaagaaguucaaccccgagaucgagaucagacccaaggugagagaccaggagggcagaaugaacuacuacuggacccugguggagcccggcgacaagaucaccuucgaggccaccggcaaccugguggugcccagauacgccuucgccauggagagaaacgccggcagcggcaucaucaucagcgacacccccgugcacgacugcaacaccaccugccagacccccaagggcgccaucaacaccagccugcccuuccagaacauccaccccaucaccaucggcaagugccccaaguacgugaagagcaccaagcugagacuggccaccggccugagaaacgugcccagcauccagagcagaggccuguucggcgccaucgccggcuucaucgagggcggcuggaccggcaugguggacggcugguacggcuaccaccaccagaacgagcagggcagcggcuacgccgccgaccugaagagcacccagaacgccaucgacaagaucaccaacaaggugaacagcgugaucgagaagaugaacacccaguucaccgccgugggcaaggaguucaaccaccuggagaagagaaucgagaaccugaacaagaagguggacgacggcuuccuggacaucuggaccuacaacgccgagcugcuggugcugcuggagaacgagagaacccuggacuaccacgacagcaacgugaagaaccuguacgagaaggugagaaaccagcugaagaacaacgccaaggagaucggcaacggcugcuucgaguucuaccacaagugcgacaacaccugcauggagagcgugaagaacggcaccuacgacuaccccaaguacagcgaggaggccaagcugaacagagaggagaucgacggcgugaagcuggagagcaccagaaucuaccagauccuggccaucuacagcaccguggccagcagccuggugcugguggugagccugggcgccaucagcuucuggaugugcagcaacggcagccugcagugcagaaucugcaucuga

SEQ ID NO: 167879 - RNA, 1701 nt, Artificial Sequence; identical to SEQ ID NO: 162729
  derived and/or modified CDS sequence (opt4) from hemagglutinin__InfluenzaA__AEW10574

SEQ ID NO: 167880 - RNA, 1701 nt, Artificial Sequence; identical to SEQ ID NO: 162729
  derived and/or modified CDS sequence (opt4) from hemagglutinin__InfluenzaA__AEW10584

SEQ ID NO: 167881 - RNA, 1701 nt, Artificial Sequence; identical to SEQ ID NO: 163082
  derived and/or modified CDS sequence (opt4) from hemagglutinin__InfluenzaA__AEW10594

SEQ ID NO: 167882 - RNA, 1701 nt, Artificial Sequence; identical to SEQ ID NO: 163082
  derived and/or modified CDS sequence (opt4) from hemagglutinin__InfluenzaA__AEW10604

SEQ ID NO: 167883 - RNA, 1701 nt, Artificial Sequence; identical to SEQ ID NO: 163082
  derived and/or modified CDS sequence (opt4) from hemagglutinin__InfluenzaA__AEW10614

SEQ ID NO: 167884 - RNA, 1701 nt, Artificial Sequence; identical to SEQ ID NO: 163082
  derived and/or modified CDS sequence (opt4) from hemagglutinin__InfluenzaA__AEW10624

SEQ ID NO: 167885 - RNA, 1701 nt, Artificial Sequence; identical to SEQ ID NO: 162729
  derived and/or modified CDS sequence (opt4) from hemagglutinin__InfluenzaA__AEW10634

SEQ ID NO: 167886 - RNA, 1701 nt, Artificial Sequence; identical to SEQ ID NO: 162716
  derived and/or modified CDS sequence (opt4) from hemagglutinin__InfluenzaA__AEW10644

SEQ ID NO: 167887 - RNA, 1701 nt, Artificial Sequence
  derived and/or modified CDS sequence (opt4) from hemagglutinin__InfluenzaA__AEW10654
augaaggccauccugguggugcugcuguacaccuucgccaccgccaacgccgacacccugugcaucggcuaccacgccaacaacagcaccgacaccguggacaccgugcuggagaagaacgugaccgugacccacagcgugaaccugcuggaggacaagcacaacggcaagcugugcaagcugagaggcguggccccccugcaccugggcaagugcaacaucgccggcuggauccugggcaaccccgagugcgagagccugagcaccgccagcagcuggagcuacaucguggagaccagcagcagcgacaacggcaccugcuaccccggcgacuucaucgacuacgaggagcugagagagcagcugagcagcgugagcagcuucgagagauucgagaucuuccccaagaccagcagcuggcccaaccacgacagcaacaagggcgugaccgccgccugcccccacgccggcgccaagagcuucuacaagaaccugaucuggcuggugaagaagggcaacagcuaccccaagcugaacaagagcuacaucaacgacaagggcaaggaggugcuggugcuguggggcauccaccaccccagcaccagcgccgaccagcagagccuguaccagaacgccgacgccuacguguucgugggcagcagcagauacagcaagaaguucaagcccgagaucgccaucagacccaaggugagagaccaggagggcagaaugaacuacuacuggacccugguggagcccggcgacaagaucaccuucgaggccaccggcaaccugguggugcccagauacgccuucgccauggagagaaacgccggcagcggcaucaucaucagcgacacccccgugcacgacugcaacaccaccugccagacccccaagggcgccaucaacaccagccugcccuuccagaacauccaccccaucaccaucggcaagugccccaaguacgugaagagcaccaagcugagacuggccaccggccugagaaacgugcccagcauccagagcagaggccuguucggcgccaucgccggcuucaucgagggcggcuggaccggcaugguggacggcugguacggcuaccaccaccagaacgagcagggcagcggcuacgccgccgaccugaagagcacccagaacgccaucgacgagaucaccaacaaggugaacagcgugaucgagaagaugaacacccaguucaccgccgugggcaaggaguucaaccaccuggagaagagaaucgagaaccugaacaagaagguggacgacggcuuccuggacaucuggaccuacaacgccgagcugcuggugcugcuggagaacgagagaacccuggacuaccacgacagcaacgugaagaaccuguacgagaaggugagaagccagcugaagaacaacgccaaggagaucggcaacggcugcuucgaguucuaccacaagugcgacaacaccugcauggagagcgugaagaacggcaccuacgacuaccccaaguacagcgaggaggccaagcugaacagagaggagaucgacggcgugaagcuggagagcaccagaaucuaccagauccuggccaucuacagcaccguggccagcagccuggugcugguggugagccugggcgccaucagcuucuggaugugcagcaacggcagccugcagugcagaaucugcaucuga

SEQ ID NO: 167888 - RNA, 1701 nt, Artificial Sequence; identical to SEQ ID NO: 162716
  derived and/or modified CDS sequence (opt4) from hemagglutinin__InfluenzaA__AEW10664

SEQ ID NO: 167889 - RNA, 1701 nt, Artificial Sequence
  derived and/or modified CDS sequence (opt4) from hemagglutinin__InfluenzaA__AEW10674
augaaggccauccugguggugcugcuguacaccuucgccaccgccaacgccgacacccugugcaucggcuaccacgccaacaacagcaccgacaccguggacaccgugcuggagaagaacgugaccgugacccacagcgugaaccugcuggaggacaagcacaacggcaagcugugcaagcugagaggcguggccccccugcaccugggcaagugcaacaucgccggcuggauccugggcaaccccgagugcgagagccugagcaccgccagcagcuggagcuacaucguggagaccagcagcagcgacaacggcaccugcuaccccggcgacuucaucgacuacgaggagcugagagagcagcugagcagcgugagcagcuucgagagauucgagaucuuccccaagaccagcagcuggcccaaccacgacagcaacaagggcgugaccgccgccugcccccacgccgaggccaagagcuucuacaagaaccugaucuggcuggugaagaagggcaacagcuaccccaagcugagcaagagcuacaucaacgacaagggcaaggaggugcuggugcuguggggcauccaccaccccagcaccagcgccgaccagcagagccuguaccagaacgccgacgccuacguguucgugggcaccagcagauacagcaagaaguucaagcccgagaucgccaucagacccaaggugagagaccaggagggcagaaugaacuacuacuggacccugguggagcccggcgacaagaucaccuucgaggccaccggcaaccugguggugcccagauacgccuucgccauggagagaaacgccggcagcggcaucaucaucagcgacacccccgugcacgacugcaacaccaccugccagacccccaagggcgccaucaacaccagccugcccuuccagaacauccaccccaucaccaucggcaagugccccaaguacgugaagagcaccaagcugagacuggccaccggccugagaaacgugcccagcauccagagcagaggccuguucggcgccaucgccggcuucaucgagggcggcuggaccggcaugguggacggcugguacggcuaccaccaccagaacgagcagggcagcggcuacgccgccgaccugaagagcacccagaacgccaucgacgagaucaccaacaaggugaacagcgugaucgagaagaugaacacccaguucaccgccgugggcaaggaguucaaccaccuggagaagagaaucgagaaccugaacaagaagguggacgacggcuuccuggacaucuggaccuacaacgccgagcugcuggugcugcuggagaacgagagaacccuggacuaccacgacagcaacgugaagaaccuguacgagaaggugagaagccagcugaagaacaacgccaaggagaucggcaacggcugcuucgaguucuaccacaagugcgacaacaccugcauggagagcgugaagaacggcaccuacgacuaccccaaguacagcgaggaggccaagcugaacagagaggagaucgacggcgugaagcuggagagcaccagaaucuaccagauccuggccaucuacagcaccguggccagcagccuggugcugguggugagccugggcgccaucagcuucuggaugugcagcaacggcagccugcagugcagaaucugcaucuga

SEQ ID NO: 167890 - RNA, 1701 nt, Artificial Sequence; identical to SEQ ID NO: 162729
  derived and/or modified CDS sequence (opt4) from hemagglutinin__InfluenzaA__AEW10684

SEQ ID NO: 167891 - RNA, 1701 nt, Artificial Sequence; identical to SEQ ID NO: 162716
  derived and/or modified CDS sequence (opt4) from hemagglutinin__InfluenzaA__AEW10694

SEQ ID NO: 167892 - RNA, 1701 nt, Artificial Sequence; identical to SEQ ID NO: 162716
  derived and/or modified CDS sequence (opt4) from hemagglutinin__InfluenzaA__AEW10704

SEQ ID NO: 167893 - RNA, 1701 nt, Artificial Sequence; identical to SEQ ID NO: 167887
  derived and/or modified CDS sequence (opt4) from hemagglutinin__InfluenzaA__AEW10724

SEQ ID NO: 167894 - RNA, 1701 nt, Artificial Sequence; identical to SEQ ID NO: 162729
  derived and/or modified CDS sequence (opt4) from hemagglutinin__InfluenzaA__AEW10734

SEQ ID NO: 167895 - RNA, 1701 nt, Artificial Sequence
  derived and/or modified CDS sequence (opt4) from hemagglutinin__InfluenzaA__AEW10744
augaaggccauccugguggugcugcuguacaccuucgccaccgccaacgccgacacccugugcaucggcuaccacgccaacaacagcaccgacaccguggacaccgugcuggagaagaacgugaccgugacccacagcgugaacauccuggaggacaagcacaacggcaagcugugcaagcugagaggcguggccccccugcaccugggcaagugcaacaucgccggcuggauccugggcaaccccgagugcgagagccugagcaccgccagcagcuggagcuacaucguggagaccagcagcagcgacaacggcaccugcuaccccggcgacuucaucgacuacgaggagcugagagagcagcugagcagcgugagcagcuucgagagauucgagaucuuccccaagaccagcagcuggcccaaccacgacagcaacaagggcgugaccgccgccugcccccacgccggcgccaagagcuucuacaagaaccugaucuggcuggugaagaagggcaacagcuaccccaagcugagcaagagcuacaucaacgacaagggcaaggaggugcuggugcuguggggcauccaccaccccagcaccagcgccgaccagcagagccuguaccagaacgccgacgccuacguguucgugggcagcagcagauacagcaagaaguucaagcccgagaucgccaucagacccaaggugagagaccaggagggcagaaugaacuacuacuggacccugguggagcccggcgacaagaucaccuucgaggccaccggcaaccugguggugcccagauacgccuucgccauggagagaaacgccggcagcggcaucaucaucagcgacacccccgugcacgacugcaacaccaccugccagacccccaagggcgccaucaacaccagccugcccuuccagaacauccaccccaucaccaucggcaagugccccaaguacgugaagagcaccaagcugagacuggccaccggccugagaaacgugcccagcauccugagcagaggccuguucggcgccaucgccggcuucaucgagggcggcuggaccggcaugguggacggcugguacggcuaccaccaccagaacgagcagggcagcggcuacgccgccgaccugaagagcacccagaacgccaucgacgagaucaccaacaaggugaacagcgugaucgagaagaugaacacccaguucaccgccgugggcaaggaguucaaccaccuggagaagagaaucgagaaccugaacaagaagguggacgacggcuuccuggacaucuggaccuacaacgccgagcugcuggugcugcuggagaacgagagaacccuggacuaccacgacagcaacgugaagaaccuguacgagaaggugagaagccagcugaagaacaacgccaaggagaucggcaacggcugcuucgaguucuaccacaagugcgacaacaccugcauggagagcgugaagaacggcaccuacgacuaccccaaguacagcgaggaggccaagcugaacagagaggagaucgacggcgugaagcuggagagcaccagaaucuaccagauccuggccaucuacagcaccguggccagcagccuggugcugguggugagccugggcgccaucagcuucuggaugugcagcaacggcagccugcagugcagaaucugcaucuga

SEQ ID NO: 167896 - RNA, 1701 nt, Artificial Sequence; identical to SEQ ID NO: 167895
  derived and/or modified CDS sequence (opt4) from hemagglutinin__InfluenzaA__AEW10754

SEQ ID NO: 167897 - RNA, 1701 nt, Artificial Sequence
  derived and/or modified CDS sequence (opt4) from hemagglutinin__InfluenzaA__AEW10764
augaaggccauccugguggugcugcuguacaccuucgccaccgccaacgccgacacccugugcaucggcuaccacgccaacaacagcaccgacaccguggacaccgugcuggagaagaacgugaccgugacccacagcgugaacauccuggaggacaagcacaacggcaagcugugcaagcugagaggcguggccccccugcaccugggcaagugcaacaucgccggcuggauccugggcaaccccgagugcgagagccugagcaccgccagcagcuggagcuacaucguggagaccagcagcagcgacaacggcaccugcuaccccggcgacuucaucgacuacgaggagcugagagagcagcugagcagcgugagcagcuucgagagauucgagaucuuccccaagaccagcagcuggcccaaccacgacagcaacaagggcgugaccgccgccugcccccacgccggcgccaagagcuucuacaagaaccugaucuggcuggugaagaagggcaacagcuaccccaagcugagcaagagcuacaucaacgacaagggcaaggaggugcuggugcuguggggcauccaccaccccagcaccagcgccgaccagcagagccuguaccagaacgccaacgccuacguguucgugggcagcagcagauacagcaagaaguucaagcccgagaucgccaucagacccaaggugagagaccaggagggcagaaugaacuacuacuggacccugguggagcccggcgacaagaucaccuucgaggccaccggcaaccugguggugcccagauacgccuucgccauggagagaaacgccggcagcggcaucaucaucagcgacacccccgugcacgacugcaacaccaccugccagacccccaagggcgccaucaacaccagccugcccuuccagaacauccaccccaucaccaucggcaagugccccaaguacgugaagagcaccaagcugagacuggccaccggccugagaaacgugcccagcauccagagcagaggccuguucggcgccaucgccggcuucaucgagggcggcuggaccggcaugguggacggcugguacggcuaccaccaccagaacgagcagggcagcggcuacgccgccgaccugaagagcacccagaacgccaucgacgagaucaccaacaaggugaacagcgugaucgagaagaugaacacccaguucaccgccgugggcaaggaguucaaccaccuggagaagagaaucgagaaccugaacaagaagguggacgacggcuuccuggacaucuggaccuacaacgccgagcugcuggugcugcuggagaacgagagaacccuggacuaccacgacagcaacgugaagaaccuguacgagaaggugagaagccagcugaagaacaacgccaaggagaucggcaacggcugcuucgaguucuaccacaagugcgacaacaccugcauggagagcgugaagaacggcaccuacgacuaccccaaguacagcgaggaggccaagcugaacagagaggagaucgacggcgugaagcuggagagcaccagaaucuaccagauccuggccaucuacagcaccguggccagcagccuggugcugguggugagccugggcgccaucagcuucuggaugugcagcaacggcagccugcagugcagaaucugcaucuga

SEQ ID NO: 167898 - RNA, 1701 nt, Artificial Sequence; identical to SEQ ID NO: 162973
  derived and/or modified CDS sequence (opt4) from hemagglutinin__InfluenzaA__AEW10774

SEQ ID NO: 167899 - RNA, 1701 nt, Artificial Sequence; identical to SEQ ID NO: 162716
  derived and/or modified CDS sequence (opt4) from hemagglutinin__InfluenzaA__AEW10784

SEQ ID NO: 167900 - RNA, 1701 nt, Artificial Sequence; identical to SEQ ID NO: 162716
  derived and/or modified CDS sequence (opt4) from hemagglutinin__InfluenzaA__AEW10794

SEQ ID NO: 167901 - RNA, 1701 nt, Artificial Sequence; identical to SEQ ID NO: 162909
  derived and/or modified CDS sequence (opt4) from hemagglutinin__InfluenzaA__AEW10804

SEQ ID NO: 167902 - RNA, 1701 nt, Artificial Sequence; identical to SEQ ID NO: 162727
  derived and/or modified CDS sequence (opt4) from hemagglutinin__InfluenzaA__AEW10814

SEQ ID NO: 167903 - RNA, 1701 nt, Artificial Sequence; identical to SEQ ID NO: 162820
  derived and/or modified CDS sequence (opt4) from hemagglutinin__InfluenzaA__AEW10824

SEQ ID NO: 167904 - RNA, 1701 nt, Artificial Sequence; identical to SEQ ID NO: 162716
  derived and/or modified CDS sequence (opt4) from hemagglutinin__InfluenzaA__AEW10834

SEQ ID NO: 167905 - RNA, 1701 nt, Artificial Sequence; identical to SEQ ID NO: 162909
  derived and/or modified CDS sequence (opt4) from hemagglutinin__InfluenzaA__AEW10844

SEQ ID NO: 167906 - RNA, 1701 nt, Artificial Sequence
  derived and/or modified CDS sequence (opt4) from hemagglutinin__InfluenzaA__AEW10854
augaaggccauccugguggugcugcuguacaccuucgccaccgccaacgccgacacccugugcaucggcuaccacgccaacaacagcaccgacaccguggacaccgugcuggagaagaacgugaccgugacccacagcgugaacauccuggaggacaagcacaacggcaagcugugcaagcugagaggcguggccccccugcaccugggcaagugcaacaucgccggcuggauccugggcaaccccgagugcgagagccugagcaccgccagcagcuggagcuacaucguggagaccagcagcagcgacaacggcaccugcuaccccggcgacuucaucgacuacgaggagcugagagagcagcugagcagcgugagcagcuucgagagauucgagaucuuccccaagaccagcagcuggcccaaccacgacagcaacaagggcgugaccgccgccugcccccacgccggcgccaagagcuucuacaagaaccugaucuggcuggugaagaagggcaacagcuaccccaagcugagcaagagcuacaucaacgacaagggcaaggaggugcuggugcuguggggcauccaccaccccagcaccagcgccgaccagcagagccuguaccagaacgccgacgccuacguguucgugggcagcagcagauacagcaagaaguucaagcccgagaucaccaucagacccaaggugagagaccaggagggcagaaugaacuacuacuggacccugguggagcccggcgacaagaucaccuucgaggccaccggcaaccugguggugcccagauacgccuucgccauggagagaaacgccggcagcggcaucaucaucagcgacacccccgugcacgacugcaacaccaccugccagacccccaagggcgccaucaacaccagccugcccuuccagaacauccaccccaucaccaucggcaagugccccaaguacgugaagagcaccaagcugagacuggccaccggccugagaaacgugcccagcauccagagcagaggccuguucggcgccaucgccggcuucaucgagggcggcuggaccggcaugguggacggcugguacggcuaccaccaccagaacgagcagggcagcggcuacgccgccgaccugaagagcacccagaacgccaucgacgagaucaccaacaaggugaacagcgugaucgagaagaugaacacccaguucaccgccgugggcaaggaguucaaccaccuggagaagagaaucgagaaccugaacaagaagguggacgacggcuuccuggacaucuggaccuacaacgccgagcugcuggugcugcuggagaacgagagaacccuggacuaccacgacagcaacgugaagaaccuguacgagaaggugagaagccagcugaagaacaacgccaaggagaucggcaacggcugcuucgaguucuaccacaagugcgacaacaccugcauggagagcgugaagaacggcaccuacgacuaccccaaguacagcgaggaggccaagcugaacagagaggagaucgacggcgugaagcuggagagcaccagaaucuaccagauccuggccaucuacagcaccguggccagcagccuggugcugguggugagccugggcgccaucagcuucuggaugugcagcaacggcagccugcagugcagaaucugcaucuga

SEQ ID NO: 167907 - RNA, 1701 nt, Artificial Sequence; identical to SEQ ID NO: 162909
  derived and/or modified CDS sequence (opt4) from hemagglutinin__InfluenzaA__AEW10864

SEQ ID NO: 167908 - RNA, 1701 nt, Artificial Sequence; identical to SEQ ID NO: 162909
  derived and/or modified CDS sequence (opt4) from hemagglutinin__InfluenzaA__AEW10874

SEQ ID NO: 167909 - RNA, 1701 nt, Artificial Sequence; identical to SEQ ID NO: 162909
  derived and/or modified CDS sequence (opt4) from hemagglutinin__InfluenzaA__AEW10884

SEQ ID NO: 167910 - RNA, 1701 nt, Artificial Sequence; identical to SEQ ID NO: 162716
  derived and/or modified CDS sequence (opt4) from hemagglutinin__InfluenzaA__AEW10894

SEQ ID NO: 167911 - RNA, 1701 nt, Artificial Sequence; identical to SEQ ID NO: 162909
  derived and/or modified CDS sequence (opt4) from hemagglutinin__InfluenzaA__AEW10904

SEQ ID NO: 167912 - RNA, 1701 nt, Artificial Sequence; identical to SEQ ID NO: 162909
  derived and/or modified CDS sequence (opt4) from hemagglutinin__InfluenzaA__AEW10914

SEQ ID NO: 167913 - RNA, 1701 nt, Artificial Sequence; identical to SEQ ID NO: 162716
  derived and/or modified CDS sequence (opt4) from hemagglutinin__InfluenzaA__AEW10924

SEQ ID NO: 167914 - RNA, 1701 nt, Artificial Sequence; identical to SEQ ID NO: 162716
  derived and/or modified CDS sequence (opt4) from hemagglutinin__InfluenzaA__AEW10934

SEQ ID NO: 167915 - RNA, 1701 nt, Artificial Sequence; identical to SEQ ID NO: 162909
  derived and/or modified CDS sequence (opt4) from hemagglutinin__InfluenzaA__AEW10944

SEQ ID NO: 167916 - RNA, 1701 nt, Artificial Sequence; identical to SEQ ID NO: 162729
  derived and/or modified CDS sequence (opt4) from hemagglutinin__InfluenzaA__AEW10954

SEQ ID NO: 167917 - RNA, 1701 nt, Artificial Sequence; identical to SEQ ID NO: 162729
  derived and/or modified CDS sequence (opt4) from hemagglutinin__InfluenzaA__AEW10964

SEQ ID NO: 167918 - RNA, 1701 nt, Artificial Sequence; identical to SEQ ID NO: 162909
  derived and/or modified CDS sequence (opt4) from hemagglutinin__InfluenzaA__AEW10974

SEQ ID NO: 167919 - RNA, 1701 nt, Artificial Sequence; identical to SEQ ID NO: 162729
  derived and/or modified CDS sequence (opt4) from hemagglutinin__InfluenzaA__AEW10984

SEQ ID NO: 167920 - RNA, 1701 nt, Artificial Sequence; identical to SEQ ID NO: 162729
  derived and/or modified CDS sequence (opt4) from hemagglutinin__InfluenzaA__AEW10994

SEQ ID NO: 167921 - RNA, 1701 nt, Artificial Sequence; identical to SEQ ID NO: 162729
  derived and/or modified CDS sequence (opt4) from hemagglutinin__InfluenzaA__AEW11004

SEQ ID NO: 167922 - RNA, 1701 nt, Artificial Sequence; identical to SEQ ID NO: 162729
  derived and/or modified CDS sequence (opt4) from hemagglutinin__InfluenzaA__AEW11014

SEQ ID NO: 167923 - RNA, 1701 nt, Artificial Sequence; identical to SEQ ID NO: 162729
  derived and/or modified CDS sequence (opt4) from hemagglutinin__InfluenzaA__AEW11024

SEQ ID NO: 167924 - RNA, 1701 nt, Artificial Sequence; identical to SEQ ID NO: 162729
  derived and/or modified CDS sequence (opt4) from hemagglutinin__InfluenzaA__AEW11034

SEQ ID NO: 167925 - RNA, 1701 nt, Artificial Sequence; identical to SEQ ID NO: 162909
  derived and/or modified CDS sequence (opt4) from hemagglutinin__InfluenzaA__AEW11044

SEQ ID NO: 167926 - RNA, 1701 nt, Artificial Sequence; identical to SEQ ID NO: 162729
  derived and/or modified CDS sequence (opt4) from hemagglutinin__InfluenzaA__AEW11054

SEQ ID NO: 167927 - RNA, 1701 nt, Artificial Sequence; identical to SEQ ID NO: 162716
  derived and/or modified CDS sequence (opt4) from hemagglutinin__InfluenzaA__AEW11064

SEQ ID NO: 167928 - RNA, 1701 nt, Artificial Sequence; identical to SEQ ID NO: 162716
  derived and/or modified CDS sequence (opt4) from hemagglutinin__InfluenzaA__AEW11074

SEQ ID NO: 167929 - RNA, 1701 nt, Artificial Sequence
  derived and/or modified CDS sequence (opt4) from hemagglutinin__InfluenzaA__AEW11084
augaaggccauccugguggugcugcuguacaccuucgccaccgccaacgccgacacccugugcaucggcuaccacgccaacaacagcaccgacaccguggacaccgugcuggagaagaacgugaccgugacccacagcgugaaccugcuggaggacaagcacaacggcaagcugugcaagcugagaggcguggccccccugcaccugggcaagugcaacaucgccggcuggauccugggcaaccccgagugcgagagccugagcaccgccagcagcuggagcuacaucguggagaccagcagcagcgacaacggcaccugcuaccccggcgacuucaucgacuacgaggagcugagagagcagcugagcagcgugagcagcuucgagagauucgagaucuuccccaagaccagcagcuggcccaaccacgacagcaacaagggcgugaccgccgccugccugcacgccggcgccaagagcuucuacaagaaccugaucuggcuggugaagaagggcaacagcuaccccaagcugagcaagagcuacaucaacgacaagggcaaggaggugcuggugcuguggggcauccaccaccccagcaccagcgccgaccagcagagccuguaccagaacgccgacgccuacguguucgugggcagcagcagauacagcaagaaguucaagcccgagaucgccaucagacccaaggugagagaccaggagggcagaaugaacuacuacuggacccugguggagcccggcgacaagaucaccuucgaggccaccggcaaccugguggugcccagauacgccuucgccauggagagaaacgccggcagcggcaucaucaucagcgacacccccgugcacgacugcaacaccaccugccagacccccaagggcgccaucaacaccagccugcccuuccagaacauccaccccaucaccaucggcaagugccccaaguacgugaagagcaccaagcugagacuggccaccggccugagaaacgugcccagcauccagagcagaggccuguucggcgccaucgccggcuucaucgagggcggcuggaccggcaugguggacggcugguacggcuaccaccaccagaacgagcagggcagcggcuacgccgccgaccugaagagcacccagaacgccaucgacgagaucaccaacaaggugaacagcgugaucgagaagaugaacacccaguucaccgccgugggcaaggaguucaaccaccuggagaagagaaucgagaaccugaacaagaagguggacgacggcuuccuggacaucuggaccuacaacgccgagcugcuggugcugcuggagaacgagagaacccuggacuaccacgacagcaacgugaagaaccuguacgagaaggugagaagccagcugaagaacaacgccaaggagaucggcaacggcugcuucgaguucuaccacaagugcgacaacaccugcauggagagcgugaagaacggcaccuacgacuaccccaaguacagcgaggaggccaagcugaacagagaggagaucgacggcgugaagcuggagagcaccagaaucuaccagauccuggccaucuacagcaccguggccagcagccuggugcugguggugagccugggcgccaucagcuucuggaugugcagcaacggcagccugcagugcagaaucugcaucuga

SEQ ID NO: 167930 - RNA, 1701 nt, Artificial Sequence; identical to SEQ ID NO: 162716
  derived and/or modified CDS sequence (opt4) from hemagglutinin__InfluenzaA__AEW11094

SEQ ID NO: 167931 - RNA, 1701 nt, Artificial Sequence; identical to SEQ ID NO: 162716
  derived and/or modified CDS sequence (opt4) from hemagglutinin__InfluenzaA__AEW11104

SEQ ID NO: 167932 - RNA, 1701 nt, Artificial Sequence; identical to SEQ ID NO: 162729
  derived and/or modified CDS sequence (opt4) from hemagglutinin__InfluenzaA__AEW11114

SEQ ID NO: 167933 - RNA, 1701 nt, Artificial Sequence
  derived and/or modified CDS sequence (opt4) from hemagglutinin__InfluenzaA__AEW11124
augaaggccauccugguggugcugcuguacaccuucgccaccgccaacgccgacacccugugcaucggcuaccacgccaacaacagcaccgacaccguggacaccgugcuggagaagaacgugaccgugacccacagcgugaaccugcuggaggacaagcacaacggcaagcugugcaagcugagaggcguggccccccugcaccugggcaagugcaacaucgccggcuggauccugggcaaccccgagugcgagagccugagcaccgccagcagcuggagcuacaucguggagaccagcagcagcgacaacggcaccugcuaccccggcgacuucaucgacuacgaggagcugagagagcagcugagcagcgugagcagcuucgagagauucgagaucuuccccaagaccagcagcuggcccaaccacgacagcaacaagggcgugaccgccgccugcccccacgccggcgccaagagcuucuacaagaaccugaucuggcuggugaagaagggcaacagcuaccccaagcugagcaagagcuacaucaacgacaagggcaaggaggugcuggugcuguggggcauccaccaccccagcaccagcgccgaccagcagagccuguaccagaacgccgacgccuacguguucgugggcagcagcagauacagcaagaaguucaagcccgagaucgccaucagacccaaggugagagaccaggagggcagaaugaacuacuacuggacccugguggagcccggcgacaagaucaccuucgaggccaccggcaaccugguggugcccagauacgccuucgccauggagagaaacgccggcagcggcaucaucaucagcgacacccccgugcacgacugcaacaccaccugccagacccccaagggcgccaucaacaccagccugcccuuccagaacauccaccccaucaccaucggcaagugccccaaguucgugaagagcaccaagcugagacuggccaccggccugagaaacgugcccagcauccagagcagaggccuguucggcgccaucgccggcuucaucgagggcggcuggaccggcaugguggacggcugguacggcuaccaccaccagaacgagcagggcagcggcuacgccgccgaccugaagagcacccagaacgccaucgacgagaucaccaacaaggugaacagcgugaucgagaagaugaacacccaguucaccgccgugggcaaggaguucaaccaccuggagaagagaaucgagaaccugaacaagaagguggacgacggcuuccuggacaucuggaccuacaacgccgagcugcuggugcugcuggagaacgagagaacccuggacuaccacgacagcaacgugaagaaccuguacgagaaggugagaagccagcugaagaacaacgccaaggagaucggcaacggcugcuucgaguucuaccacaagugcgacaacaccugcauggagagcgugaagaacggcaccuacgacuaccccaaguacagcgaggaggccaagcugaacagagaggagaucgacggcgugaagcuggagagcaccagaaucuaccagauccuggccaucuacagcaccguggccagcagccuggugcugguggugagccugggcgccaucagcuucuggaugugcagcaacggcagccugcagugcagaaucugcaucuga

SEQ ID NO: 167934 - RNA, 1701 nt, Artificial Sequence
  derived and/or modified CDS sequence (opt4) from hemagglutinin__InfluenzaA__AEW11134
augaaggccauccugguggugcugcuguacaccuucgccaccgccaacgccgacacccugugcaucggcuaccacgccaacaacagcaccgacaccguggacaccgugcuggagaagaacgugaccgugacccacagcgugaacauccuggaggacaagcacaacggcaagcugugcaagcugagaggcguggccccccugcaccugggcaagugcaacaucgccggcuggauccugggcaaccccgagugcgagagccugagcaccgccagcagcuggagcuacaucguggagaccagcagcagcgacaacggcaccugcuaccccggcgacuucaucgacuacgaggagcugagagagcagcugagcagcgugagcagcuucgagagauucgagaucuuccccaagaccagcagcuggcccaaccacgacagcaacaagggcgugaccgccgccugcccccacgccggcgccaagagcuucuacaagaaccugaucuggcuggugaagaagggcaacagcuaccccaagcugagcaagagcuacaucaacgacaagggcaaggaggugcuggugcuguggggcauccaccaccccagcaccagcgccgaccagcagagccuguaccagaacgccgacgccuacguguucgugggcagcagcagauacagcaagaaguucaagcccgagaucgccaucagacccaaggugagagaccaggagggcagaaugaacuacuacuggacccugguggagcccggcgacaagaucaccuucgaggccaccggcaaccugguggugcccagauacgccuucgccauggagagaaacgccggcagcggcaucaucaucagcgacacccccgugcacgacugcaacaccaccugccagacccccaagggcgccaucaacaccagccugcccuuccagaacauccaccccaucaccaucggcaagugccccaaguacgugaagagcaccaagcugagacuggccaccggccugagaaacgugcccagcauccagagcagaggccuguucggcgccaucgccggcuucaucgagggcggcuggaccggcaugguggacggcugguacggcuaccaccaccagaacgagcagggcagcggcuacgccgccgaccugaagagcacccagaacgccaucgacgagaucaccaacaaggugaacagcgugaucgagaagaugaacacccaguucaccgccgugggcaaggaguucaaccaccuggagaagagaaucgagaaccugaacaagaagguggacgacggcuuccuggacaucuggaccuacaacgccgagcugcuggugcugcuggagaacgagagaacccuggacuaccacgacagcaacgugaagaaccuguacgagaaggugagaagccagcugaagaacaacgccaaggagaucggcaacggcugcuucgaguucuaccacaagugcgacaacaccugcauggagagcgugaagaacggcaccuacgacuaccccaaguacagcgaggaggccaagcugaacaaggaggagaucgacggcgugaagcuggagagcaccagaaucuaccagauccuggccaucuacagcaccguggccagcagccuggugcugguggugagccugggcgccaucagcuucuggaugugcagcaacggcagccugcagugcagaaucugcaucuga

SEQ ID NO: 167935 - RNA, 1701 nt, Artificial Sequence; identical to SEQ ID NO: 162729
  derived and/or modified CDS sequence (opt4) from hemagglutinin__InfluenzaA__AEW11144

SEQ ID NO: 167936 - RNA, 1701 nt, Artificial Sequence; identical to SEQ ID NO: 162729
  derived and/or modified CDS sequence (opt4) from hemagglutinin__InfluenzaA__AEW11154

SEQ ID NO: 167937 - RNA, 1701 nt, Artificial Sequence; identical to SEQ ID NO: 167929
  derived and/or modified CDS sequence (opt4) from hemagglutinin__InfluenzaA__AEW11164

SEQ ID NO: 167938 - RNA, 1701 nt, Artificial Sequence; identical to SEQ ID NO: 167929
  derived and/or modified CDS sequence (opt4) from hemagglutinin__InfluenzaA__AEW11174

SEQ ID NO: 167939 - RNA, 1701 nt, Artificial Sequence; identical to SEQ ID NO: 162729
  derived and/or modified CDS sequence (opt4) from hemagglutinin__InfluenzaA__AEW11184

SEQ ID NO: 167940 - RNA, 1701 nt, Artificial Sequence; identical to SEQ ID NO: 162716
  derived and/or modified CDS sequence (opt4) from hemagglutinin__InfluenzaA__AEW11194

SEQ ID NO: 167941 - RNA, 1701 nt, Artificial Sequence; identical to SEQ ID NO: 162729
  derived and/or modified CDS sequence (opt4) from hemagglutinin__InfluenzaA__AEW11204

SEQ ID NO: 167942 - RNA, 1701 nt, Artificial Sequence; identical to SEQ ID NO: 162729
  derived and/or modified CDS sequence (opt4) from hemagglutinin__InfluenzaA__AEW11214

SEQ ID NO: 167943 - RNA, 1701 nt, Artificial Sequence; identical to SEQ ID NO: 162909
  derived and/or modified CDS sequence (opt4) from hemagglutinin__InfluenzaA__AEW11224

SEQ ID NO: 167944 - RNA, 1701 nt, Artificial Sequence; identical to SEQ ID NO: 162729
  derived and/or modified CDS sequence (opt4) from hemagglutinin__InfluenzaA__AEW11234

SEQ ID NO: 167945 - RNA, 1701 nt, Artificial Sequence; identical to SEQ ID NO: 162729
  derived and/or modified CDS sequence (opt4) from hemagglutinin__InfluenzaA__AEW11244

SEQ ID NO: 167946 - RNA, 1701 nt, Artificial Sequence
  derived and/or modified CDS sequence (opt4) from hemagglutinin__InfluenzaA__AEW11254
augaaggccauccugguggugcugcuguacaccuucgccaccgccaacgccgacacccugugcaucggcuaccacgccaacaacagcaccgacaccguggacaccgugcuggagaagaacgugaccgugacccacagcgugaaccugcuggaggacaagcacaacggcaagcugugcaagcugagaggcguggccccccugcaccugggcaagugcaacaucgccggcuggauccugggcaaccccgagugcgagagccugagcaccgccagcagcuggagcuacaucguggagaccagcagcagcgacaacggcaccugcuaccccggcgacuucaucgacuacgaggagcugagagagcagcugagcagcgugagcagcuucgagagauucgagaucuuccccaagaccagcagcuggcccaaccacgacagcaacaagggcgugaccgccgccugccugcacgccggcgccaagagcuucuacaagaaccugaucuggcuggugaagaagggcaacagcuaccccaagcugagcaagagcuacaucaacgacaagggcaaggaggugcuggugcuguggggcauccaccaccccagcgccagcgccgaccagcagagccuguaccagaacgccgacgccuacguguucgugggcagcagcagauacagcaagaaggugaagcccgagaucgccaucagacccaaggugagagaccaggagggcagaaugaacuacuacuggacccugguggagcccggcgacaagaucaccuucgaggccaccggcaaccugguggugcccagauacgccuucgccauggagagaaacgccggcagcggcaucaucaucagcgacacccccgugcacgacugcaacaccaccugccagacccccaagggcgccaucaacaccagccugcccuuccagaacauccaccccaucaccaucggcaagugccccaaguacgugaagagcaccaagcugagacuggccaccggccugagaaacgugcccagcauccagagcagaggccuguucggcgccaucgccggcuucaucgagggcggcuggaccggcaugguggacggcugguacggcuaccaccaccagaacgagcagggcagcggcuacgccgccgaccugaagagcacccagaacgccaucgacgagaucaccaacaaggugaacagcgugaucgagaagaugaacacccaguucaccgccgugggcaaggaguucaaccaccuggagaagagaaucgagaaccugaacaagaagguggacgacggcuuccuggacaucuggaccuacaacgccgagcugcuggugcugcuggagaacgagagaacccuggacuaccacgacagcaacgugaagaaccuguacgagaaggugagaagccagcugaagaacaacgccaaggagaucggcaacggcugcuucgaguucuaccacaagugcgacaacaccugcauggagagcgugaagaacggcaccuacgacuaccccaaguacagcgaggaggccaagcugaacagagaggagaucgacggcgugaagcuggagagcaccagaaucuaccagauccuggccaucuacagcaccguggccagcagccuggugcugguggugagccugggcgccaucagcuucuggaugugcagcaacggcagccugcagugcagaaucugcaucuga

SEQ ID NO: 167947 - RNA, 1701 nt, Artificial Sequence; identical to SEQ ID NO: 162716
  derived and/or modified CDS sequence (opt4) from hemagglutinin__InfluenzaA__AEW11263

SEQ ID NO: 167948 - RNA, 1701 nt, Artificial Sequence; identical to SEQ ID NO: 162716
  derived and/or modified CDS sequence (opt4) from hemagglutinin__InfluenzaA__AEW11273

SEQ ID NO: 167949 - RNA, 1701 nt, Artificial Sequence; identical to SEQ ID NO: 162716
  derived and/or modified CDS sequence (opt4) from hemagglutinin__InfluenzaA__AEW11283

SEQ ID NO: 167950 - RNA, 1701 nt, Artificial Sequence; identical to SEQ ID NO: 162716
  derived and/or modified CDS sequence (opt4) from hemagglutinin__InfluenzaA__AEW11293

SEQ ID NO: 167951 - RNA, 1701 nt, Artificial Sequence
  derived and/or modified CDS sequence (opt4) from hemagglutinin__InfluenzaA__AEW11303
augaaggccauccugguggugcugcuguacaccuucgccaccgccaacgccgacacccugugcaucggcuaccacgccaacaacagcaccgacaccguggacaccgugcuggagaagaacgugaccgugacccacagcgugaaccugcuggaggacaagcacaacggcaagcugugcaagcugagaggcguggccccccugcaccugggcaagugcaacaucgccggcuggauccugggcaaccccgagugcgagagccugagcaccgccagcagcuggagcuacaucguggagaccagcagcagcgacaacggcaccugcuaccccggcgacuucaucgacuacgaggagcugagagagcagcugagcagcgugagcagcuucgagagauucgagaucuuccccaagaccagcagcuggcccaaccacgacagcaacaagggcgugaccaccgccugcccccacgccggcgccaagagcuucuacaagaaccugaucuggcuggugaagaagggcaacagcuaccccaagcugagcaagagcuacaucaacgacaagggcaaggaggugcuggugcuguggggcauccaccaccccagcaccagcgccgaccagcagagccuguaccagaacgccgacgccuacguguucgugggcaccagcagauacagcaagaaguucaagcccgagaucgccaucagacccaaggugagagaccaggagggcagaaugaacuacuacuggacccugguggagcccggcgacaagaucaccuucgaggccaccggcaaccugguggugcccagauacgccuucgccauggagagaaacgccggcagcggcaucaucaucagcgacacccccgugcacgacugcaacaccaccugccagacccccaagggcgccaucaacaccagccugcccuuccagaacauccaccccaucaccaucggcaagugccccaaguacgugaagagcaccaagcugagacuggccaccggccugagaaacgugcccagcauccagagcagaggccuguucggcgccaucgccggcuucaucgagggcggcuggaccggcaugguggacggcugguacggcuaccaccaccagaacgagcagggcagcggcuacgccgccgaccugaagagcacccagaacgccaucgacgagaucaccaacaaggugaacagcgugaucgagaagaugaacacccaguucaccgccgugggcaaggaguucaaccaccuggagaagagaaucgagaaccugaacaagaagguggacgacggcuuccuggacaucuggaccuacaacgccgagcugcuggugcugcuggagaacgagagaacccuggacuaccacgacagcaacgugaagaaccuguacgagaaggugagaagccagcugaagaacaacgccaaggagaucggcaacggcugcuucgaguucuaccacaagugcgacaacaccugcauggagagcgugaagaacggcaccuacgacuaccccaaguacagcgaggaggccaagcugaacagagaggagaucgacggcgugaagcuggagagcaccagaaucuaccagauccuggccaucuacagcaccguggccagcagccuggugcugguggugagccugggcgccaucagcuucuggaugugcagcaacggcagccugcagugcagagugugcaucuga

SEQ ID NO: 167952 - RNA, 1701 nt, Artificial Sequence; identical to SEQ ID NO: 162716
  derived and/or modified CDS sequence (opt4) from hemagglutinin__InfluenzaA__AEW11313

SEQ ID NO: 167953 - RNA, 1701 nt, Artificial Sequence
  derived and/or modified CDS sequence (opt4) from hemagglutinin__InfluenzaA__AEW11323
augaaggccauccugguggugcugcuguacaccuucgccaccgccaacgccgacacccugugcaucggcuaccacgccaacaacagcaccgacaccguggacaccgugcuggagaagaacgugaccgugacccacagcgugaaccugcuggaggacaagcacaacggcaagcugugcaagcugagaggcguggccccccugcaccugggcaagugcaacaucgccggcuggauccugggcaaccccgagugcgagagccugagcaccgccagcagcuggagcuacaucguggagaccagcagcagcgacaacggcaccugcuaccccggcgacuucaucgacuacgaggagcugagagagcagcugagcagcgugagcagcuucgagagauucgagaucuuccccaagaccagcagcuggcccaaccacgacagcaacaagggcgugaccgccgccugcccccacgccggcgccaagagcuucuacaagaaccugaucuggcuggugaagaagggcaacagcuaccccaagcugagcaagagcuacaucaacgacaagggcaaggaggugcuggugcuguggggcauccaccaccccagcaccagcgccgaccagcagagccuguaccagaacgccgacgccuacguguucgugggcaccagcagauacagcaagaaguucaagcccgagaucgccaucagacccaaggugagaggccaggagggcagaaugaacuacuacuggacccugguggagcccggcgacaagaucaccuucgaggccaccggcaaccugguggugcccagauacgccuucgccauggagagaaacgccggcagcggcaucaucaucagcgacacccccgugcacgacugcaacaccaccugccagacccccaagggcgccgugaacaccagccugcccuuccagaacauccaccccaucaccaucggcaagugccccaaguacgugaagagcaccaagcugagacuggccaccggccugagaaacgugcccagcauccagagcagaggccuguucggcgccaucgccggcuucaucgagggcggcuggaccggcaugguggacggcugguacggcuaccaccaccagaacgagcagggcagcggcuacgccgccgaccugaagagcacccagaacgccaucgacgagaucaccaacaaggugaacagcgugaucgagaagaugaacacccaguucaccgccgugggcaaggaguucaaccaccuggagaagagaaucgagaaccugaacaagaagguggacgacggcuuccuggacaucuggaccuacaacgccgagcugcuggugcugcuggagaacgagagaacccuggacuaccacgacagcaacgugaagaaccuguacgagaaggugagaagccagcugaagaacaacgccaaggagaucggcaacggcugcuucgaguucuaccacaagugcgacaacaccugcauggagagcgugaagaacggcaccuacgacuaccccaaguacagcgaggaggccaagcugaacagagaggagaucgacggcgugaagcuggagagcaccagaaucuaccagauccuggccaucuacagcaccguggccagcagccuggugcugguggugagccugggcgccaucagcuucuggaugugcagcaacggcagccugcagugcagaaucugcaucuga

SEQ ID NO: 167954 - RNA, 1701 nt, Artificial Sequence
  derived and/or modified CDS sequence (opt4) from hemagglutinin__InfluenzaA__AEW22712
augaaggccauccugguggugcugcuguacaccuucgccaccgccaacgccgacacccugugcaucggcuaccacgccaacaacagcaccgacaccaucgacaccgugcuggagaagaacgugaccgugacccacagcgugaaccugcuggaggacaagcacaacggcaagcugugcaagcugagaggcguggccccccugcaccugggcaagugcaacaucgccggcuggauccugggcaaccccgagugcgagagccugagcaccgccagcagcuggagcuacaucguggagaccagcagcagcgacaacggcaccugcuaccccggcgacuucaucgacuacgaggagcugagagagcagcugagcagcgugagcagcuucgagagauucgagaucuuccccaagaccagcagcuggcccaaccacgacagcaacaagggcgugaccgccgccugcccccacgccggcgccaagggcuucuacaagaaccugaucuggcuggugaagaagggcaacagcuaccccaagcugagcaagagcuacaucaacgacaagggcaaggaggugcuggugcuguggggcauccaccaccccagcaccaccgccgaccagcagagccuguaccagaacgccgacaccuacguguucgugggcaccagcagauacagcaagaaguucaagcccgagaucgccaucagacccaaggugagagaccaggagggcagaaugaacuacuacuggacccuggugaagcccggcgacaagaucaccuucgaggccaccggcaaccugguggugcccagauacgccuucgccauggagagaaacgccggcagcggcaucaucaucagcgacacccccgugcacgacugcaacaccaccugccagacccccaagggcgccaucaacaccagccugcccuuccagaacauccaccccaucaccaucggcaagugccccaaguacgugaagagcaccaagcugagacuggccaccggccugagaaacgugcccagcauccagagcagaggccuguucggcgccaucgccggcuucaucgagggcggcuggaccggcaugguggacggcugguacggcuaccaccaccagaacgagcagggcagcggcuacgccgccgaccugaagagcacccagaacgccaucgacaagaucaccaacaaggugaacagcgugaucgagaagaugaacacccaguucaccgccgugggcaaggaguucaaccaccuggagaagagaaucgagaaccugaacaagaagguggacgacggcuuccuggacaucuggaccuacaacgccgagcugcuggugcugcuggagaacgagagaacccuggacuaccacgacagcaacgugaagaaccuguacgagaaggugagaaaccagcugaagaacaacgccaaggagaucggcaacggcugcuucgaguucuaccacaagugcgacaacaccugcauggagagcgugaagaacggcaccuacgacuaccccaaguacagcgaggaggccaagcugaacagagaggagaucgacggcgugaagcuggagagcaccagaaucuaccagauccuggccaucuacagcaccguggccagcagccuggugcugguggugagccugggcgccaucagcuucuggaugugcagcaacggcagccugcagugcagaaucugcaucuga

SEQ ID NO: 167955 - RNA, 1701 nt, Artificial Sequence
  derived and/or modified CDS sequence (opt4) from hemagglutinin__InfluenzaA__AEW22718
augaaggccauccugguggugcugcuguacaccuucgccaccgccaacgccgacacccugugcaucggcuaccacgccaacaacagcaccgacaccguggacaccgugcuggagaagaacgugaccgugacccacagcgugaaccugcuggaggacaagcacaacggcaagcugugcaagcugagaggcguggccccccugcaccugggcaagugcaacaucgccggcuggauccugggcaaccccgagugcgagagccugagcaccgccagcagcuggagcuacaucguggagaccagcagcagcgacaacggcaccugcuaccccggcgacuucaucgacuacgaggagcugagagagcagcugagcagcgugagcagcuucgagagauucgagaucuuccccaagaccagcagcuggcccaaccacgacagcaacaagggcgugaccgccgccugcccccacgccggcgccaagggcuucuacaagaaccugaucuggcuggugaagaagggcaacagcuaccccaagcugagcaagagcuacaucaacgacaagggcaaggaggugcuggugcuguggggcauccaccaccccagcaccaccgccgaccagcagagccuguaccagaacgccgacaccuacguguucgugggcaccagcagauacagcaagaaguucaagcccgagaucgccaucagacccaaggugagagaccaggagggcagaaugaacuacuacuggacccuggugaagcccggcgacaagaucaccuucgaggccaccggcaaccugguggugcccagauacgccuucgccauggagagaaacgccggcagcggcaucaucaucagcgacacccccgugcacgacugcaacaccaccugccagacccccaagggcgccaucaacaccagccugcccuuccagaacauccaccccaucaccaucggcaagugccccaaguacgugaagagcaccaagcugagacuggccaccggccugagaaacgugcccagcauccagagcagaggccuguucggcgccaucgccggcuucaucgagggcggcuggaccggcaugguggacggcugguacggcuaccaccaccagaacgagcagggcagcggcuacgccgccgaccugaagagcacccagaacgccaucgacaagaucaccaacaaggugaacagcgugaucgagaagaugaacacccaguucaccgccgugggcaaggaguucaaccaccuggagaagagaaucgagaaccugaacaagaagguggacgacggcuuccuggacaucuggaccuacaacgccgagcugcuggugcugcuggagaacgagagaacccuggacuaccacgacagcaacgugaagaaccuguacgagaaggugagaaaccagcugaagaacaacgccaaggagaucggcaacggcugcuucgaguucuaccacaagugcgacaacaccugcauggagagcgugaagaacggcaccuacgacuaccccaaguacagcgaggaggccaagcugaacagagaggagaucgacggcgugaagcuggagagcaccagaaucuaccagauccuggccaucuacagcaccguggccagcagccuggugcugguggugagccugggcgccaucagcuucuggaugugcagcaacggcagccugcagugcagaaucugcaucuga

SEQ ID NO: 167956 - RNA, 1701 nt, Artificial Sequence; identical to SEQ ID NO: 166514
  derived and/or modified CDS sequence (opt4) from hemagglutinin__InfluenzaA__AEW22720

SEQ ID NO: 167957 - RNA, 1701 nt, Artificial Sequence; identical to SEQ ID NO: 166514
  derived and/or modified CDS sequence (opt4) from hemagglutinin__InfluenzaA__AEW22722

SEQ ID NO: 167958 - RNA, 1701 nt, Artificial Sequence
  derived and/or modified CDS sequence (opt4) from hemagglutinin__InfluenzaA__AEW22724
augaaggccauccugguggugcugcuguacaccuucgccaccgccaacgccgacacccugugcaucggcuaccacgccaacaacagcaccgacaccguggacaccgugcuggagaagaacgugaccgugacccacagcgugaaccugcuggaggacaagcacaacggcaagcugugcaagcugagaggcguggccccccugcaccugggcaagugcaacaucgccggcuggauccugggcaaccccgagugcgagagccugagcaccgccagcagcuggagcuacaucguggagaccagcagcagcgacaacggcaccugcuaccccggcgacuucaucgacuacgaggagcugagagagcagcugagcagcgugagcagcuucgagagauucgagaucuuccccaagaccagcagcuggcccaaccacgacagcaacaagggcgugaccgccgccugcccccacgccggcgccaagggcuucuacaagaaccugaucuggcuggugaagaagggcaacagcuaccccaagcugagcaagagcuacaucaacgacaagggcaaggaggugcuggugcuguggggcauccaccaccccagcaccaccgccgaccagcagagccuguaccagaacgccgacaccuacguguucgugggcaccagcagauacagcaagaaguucaagcccgagaucgccaucagacccaaggugagagaccaggagggcagaaugaacuacuacuggacccugguggagcccggcgacaagaucaccuucgaggccaccggcaaccugguggugcccagauacgccuucgccauggagagaaacgccggcagcggcaucaucaucagcgacacccccgugcacgacugcaacaccaccugccagacccccaagggcgccaucaacaccagccugcccuuccagaacauccaccccaucaccaucggcaagugccccaaguacgugaagagcaccaagcugagacuggccaccggccugagaaacgugcccagcauccagagcagaggccuguucggcgccaucgccggcuucaucgagggcggcuggaccggcaugguggacggcugguacggcuaccaccaccagaacgagcagggcagcggcuacgccgccgaccugaagagcacccagaacgccaucgacaagaucaccaacaaggugaacagcgugaucgagaagaugaacacccaguucaccgccgugggcaaggaguucaaccaccuggagaagagaaucgagaaccugaacaagaagguggacgacggcuuccuggacaucuggaccuacaacgccgagcugcuggugcugcuggagaacgagagaacccuggacuaccacgacagcaacgugaagaaccuguacgagaaggugagaaaccagcugaagaacaacgccagagagaucggcaacggcugcuucgaguucuaccacaagugcgacaacaccugcauggagagcgugaagaacggcaccuacgacuaccccaaguacagcgaggaggccaagcugaacagagaggagaucgacggcgugaagcuggagagcaccagaaucuaccagauccuggccaucuacagcaccguggccagcagccuggugcugguggugagccugggcgccaucagcuucuggaugugcagcaacggcagccugcagugcagaaucugcaucuga

SEQ ID NO: 167959 - RNA, 1701 nt, Artificial Sequence
  derived and/or modified CDS sequence (opt4) from hemagglutinin__InfluenzaA__AEW25297
augaaggccauccugguggugcugcuguacaccuucgccaccgccaacgccgacacccugugcaucggcuaccacgccaacaacagcaccgacaccguggacaccgugcuggagaagaacgugaccgugacccacagcgugaaccugcuggaggacaagcacaacggcaagcugugcaagcugagaggcguggccccccugcaccugggcaagugcaacaucgccggcuggauccccggcaaccccgagugcgagagccugagcaccgccagcagcuggagcuacaucguggagaccagcagcagcgacaacggcaccugcuaccccggcgacuucaucgacuacgaggagcugagagagcagcugagcagcgugagcagcuucgagagauucgagaucuuccccaagaccagcagcuggcccaaccacgaccccaacaagggcgugaccgccgccugcccccacgccggcgccaagagcuucuacaagaaccugaucuggcuggugaagaagggcaacagcuaccccaagcugagcaagagcuacaucaacgacaagggcaaggaggugcuggugcuguggggcauccaccaccccagcaccagcgccgaccagcagagccuguaccagaacgccgacgccuacguguucgugggcaccagcagauacagcaagaaguucaagcccgagaucgccaucagacccaaggugagagaccaggagggcagaaugaacuacuacuggacccugguggagcccggcgacaagaucaccuucgaggccaccggcaaccugguggugcccagauacgccuucgccauggagagaaacgccggcagcggcaucaucaucagcgacacccccgugcacgacugcaacaccaccugccagacccccagaggcgccaucaacaccagccugcccuuccagaacauccaccccaucaccaucggcaagugccccaaguacgugaagagcaccaagcugagacuggccaccggccugagaaacgugcccagcauccagagcagaggccuguucggcgccaucgccggcuucaucgagggcggcuggaccggcaugguggacggcugguacggcuaccaccaccagaacgagcagggcagcggcuacgccgccgaccugaagagcacccagaacgccaucgacgagaucaccaacaaggugaacagcgugaucgagaagaugaacacccaguucaccgccgugggcaaggaguucaaccaccuggagaagagaaucgagaaccugaacaagaagguggacgacggcuuccuggacaucuggaccuacaacgccgagcugcuggugcugcuggagaacgagagaacccuggacuaccacgacagcaacgugaagaaccuguacgagaaggugagaagccagcugaagaacaacgccaaggagaucggcaacggcugcuucgaguucuaccacaagugcgacaacaccugcauggagagcgugaagaacggcaccuacgacuaccccaaguacagcgaggaggccaagcugaacagagaggagaucgacggcgugaagcuggagagcaccagaaucuaccagauccuggccaucuacagcaccguggccagcagccuggugcugguggugagccugggcgccaucagcuucuggaugugcagcaacggcagccugcagugcagaaucugcaucuga

SEQ ID NO: 167960 - RNA, 1701 nt, Artificial Sequence; identical to SEQ ID NO: 163527
  derived and/or modified CDS sequence (opt4) from hemagglutinin__InfluenzaA__AEW25306

SEQ ID NO: 167961 - RNA, 1701 nt, Artificial Sequence
  derived and/or modified CDS sequence (opt4) from hemagglutinin__InfluenzaA__AEW25315
augaaggccauccugguggugcugcuguacaccuucgccaccgccaacgccgacacccugugcaucggcuaccacgccaacaacagcaccgacaccguggacaccgugcuggagaagaacgugaccgugacccacagcgugaaccugcuggaggacaagcacaacggcaagcugugcaagcugagaggcguggccccccugcaccugggcaagugcaacaucgccggcuggauccugggcaaccccgagugcgagagccugagcaccgccagcagcuggagcuacaucguggagaccagcagcagcgacaacggcaccugcuaccccggcgacuucaucgacuacgaggagcugagagagcagcugagcagcgugagcagcuucgagagauucgagaucuuccccaagaccagcagcuggcccaaccacgaccccaacaagggcgugaccgccgccugcccccacgccggcgccaagagcuucuacaagaaccugaucuggcuggugaagaagggcaacagcuaccccaagcugagcaagagcuacaucaacgacaagggcaaggaggugcuggugcuguggggcauccaccaccccagcaccagcgccgaccagcagagccuguaccagaacgccgacgccuacguguucgugggcaccagcagauacagcaagaaguucaagcccgagaucgccaucagacccaaggugagagaccaggagggcagaaugaacuacuacuggacccugguggagcccggcgacaagaucaccuucgaggccaccggcaaccugguggugcccagauacgccuucgccauggagagaaacgccggcagcggcaucaucaucagcgacacccccgugcacgacugcaacaccaccugccagacccccaagggcgccaucaacaccagccugcccuuccagaacauccaccccaucaccaucggcaagugccccaaguacgugaagagcaccaagcugagacuggccaccggccugagaaacgugcccagcauccagagcagaggccuguucggcgccaucgccggcuucaucgagggcggcuggaccggcaugguggacggcugguacggcuaccaccaccagaacgagcagggcagcggcuacgccgccgaccugaagagcacccagaacgccaucgacgagaucaccaacaaggugaacagcgugaucgagaagaugaacacccaguucaccgccgugggcaaggaguucaaccaccuggagaagagaaucgagaaccugaacaagaagguggacgacggcuuccuggacaucuggaccuacaacgccgagcugcuggugcugcuggagaacgagagaacccuggacuaccacgacagcaacgugaagaaccuguacgagaaggugagaagccagcugaagaacaacgccaaggagaucggcaacggcugcuucgaguucuaccacaagugcgacaacaccugcauggagagcgugaagaacggcaccuacgacuaccccaaguacagcgaggaggccaagcugaacagagaggagaucgacggcgugaagcuggagagcaccagaaucuaccagauccuggccaucuacagcaccguggccagcagccuggugcugguggugagccugggcgccaucagcuucugggugugcagcaacggcagccugcagugcagaaucugcaucuga

SEQ ID NO: 167962 - RNA, 1701 nt, Artificial Sequence
  derived and/or modified CDS sequence (opt4) from hemagglutinin__InfluenzaA__AEW25331
augaaggccauccugguggugcugcuguacaccuucgccaccgccaacgccgacacccugugcaucggcuaccacgccaacaacagcaccgacaccguggacaccgugcuggagaagaacgugaccgugacccacagcgugaaccugcuggaggacaagcacaacggcaagcugugcaagcugagaggcguggccccccugcaccugggcaagugcaacaucgccggcuggauccugggcaaccccgagugcgagagcuucagcaccagcagcagcuggagcuacaucguggagaccagcagcagcgacaacggcaccugcuaccccggcgacuucaucgacuacgaggagcugagagagcagcugagcagcgugagcagcuucgagagauucgagaucuuccccaagaccagcagcuggcccaaccacgacagcaacaagggcgugaccgccgccugcccccacgccggcgccaagagcuucuacaagaaccugaucuggcuggugaagaagggcaacagcuaccccaagcugagcaagagcuacaucaacgacaagggcaaggaggugcuggugcuguggggcauccaccaccccagcaccagcgccgaccagcagagccuguaccagaacgccgacgccuacguguucgugggcaccagcagauacagcaagaaguucaagcccgagaucgccaucagacccaaggugagagaccaggagggcagaaugaacuacuacuggacccugguggagcccggcgacaagaucaccuucgaggccaccggcaaccugguggugcccagauacgccuucgccauggagagaaacgccggcagcggcaucaucaucagcgacacccccgugcacgacugcaacaccaccugccagacccccaagggcgccaucaacaccagccugcccuuccagaacaucccccccaucaccaucggcaagugccccaaguacgugaagagcaccaagcugagacuggccaccggccugagaaacgugcccagcauccagagcagaggccuguucggcgccaucgccggcuucaucgagggcggcuggaccggcaugguggacggcugguacggcuaccaccaccagaacgagcagggcagcggcuacgccgccgaccugaagagcacccagaacgccaucgacgagaucaccaacaaggugaacagcgugaucgagaagaugaacacccaguucaccgccgugggcaaggaguucaaccaccuggagaagagaaucgagaaccugaacaagaagguggacgacggcuuccuggacaucuggaccuacaacgccgagcugcuggugcugcuggagaacgagagaacccuggacuaccacgacagcaacgugaagaaccuguacgagaaggugagaagccagcugaagaacaacgccaaggagaucggcaacggcugcuucgaguucuaccacaagugcgacaacaccugcauggagagcgugaagaacggcaccuacgacuaccccaaguacagcgaggaggccaagcugaacagagaggagaucgacggcgugaagcuggagagcaccagaaucuaccagauccuggccaucuacagcaccguggccagcagccuggugcugguggugagccugggcgccaucagcuucuggaugugcagcaacggcagccugcagugcagaaucugcaucuga

SEQ ID NO: 167963 - RNA, 1701 nt, Artificial Sequence
  derived and/or modified CDS sequence (opt4) from hemagglutinin__InfluenzaA__AEW25349
augaaggccauccugguggugcugcuguacaccuucgccaccgccaacgccgacacccugugcaucggcuaccacgccaacaacagcaccgacaccguggacaccgugcuggagaagaacgugaccgugacccacagcgugaaccugcuggaggacaagcacaacggcaagcugugcaagcugagaggcguggccccccugcaccugggcaagugcaacaucgccggcuggauccugggcaaccccgagugcgagagcuucagcaccagcagcagcuggagcuacaucguggagaccagcagcagcgacaacggcaccugcuaccccggcgacuucaucgacuacgaggagcugagagagcagcugagcagcgugagcagcuucgagagauucgagaucuuccccaagaccagcagcuggcccaaccacgacagcaacaagggcgugaccgccgccugcccccacgccggcgccaagagcuucuacaagaaccugaucuggcuggugaagaagggcaacagcuaccccaagcugagcaagagcuacaucaacgacaagggcaaggaggugcuggugcuguggggcauccaccaccccagcaccagcgccgaccagcagagccuguaccagaacgccgacgccuacguguucgugggcaccagcagauacagcaagaaguucaagcccgagaucgccaucagacccaaggugagagaccaggagggcagaaugaacuacuacuggacccugguggagcccggcgacaagaucaccuucgaggccaccggcaaccugguggugcccagauacgccuucgccauggagagaaacgccggcagcggcaucaucaucagcgacacccccgugcacgacugcaacaccaccugccagacccccaagggcgccaucaacaccagccugcccuuccagaacauccaccccaucaccaucggcaagugccccaaguacgugaagagcaccaagcugagacuggccaccggccugagaaacgugcccagcauccagagcagaggccuguucggcgccaucgccggcuucaucgagggcggcuggaccggcaugguggacggcugguacggcuaccaccaccagaacgagcagggcagcggcuacgccgccgaccugaagagcacccagaacgccaucgacgagaucaccaacaaggugaacagcgugaucgagaagaugaacacccaguucaccgccgugggcaaggaguucaaccaccuggagaagagaaucgagaaccugaacaagaagguggacgacggcuuccuggacaucuggaccuacaacgccgagcugcuggugcugcuggagaacgagagaacccuggacuaccacgacagcaacgugaagaaccuguacgagaaggugagaagccagcugaagaacaacgccaaggagaucggcaacggcugcuucgaguucuaccacaagugcgacaacaccugcauggagagcgugaagaacggcaccuacgacuaccccaaguacagcgaggaggccaagcugaacagagaggagaucgacggcgugaagcuggagagcaccagaaucuaccagauccuggccaucuacagcaccguggccagcagccuggugcugguggugagccugggcgccaucagcuucuggaugugcagcaacggcagccugcagugcagaaucugcaucuga

SEQ ID NO: 167964 - RNA, 1701 nt, Artificial Sequence
  derived and/or modified CDS sequence (opt4) from hemagglutinin__InfluenzaA__AEW25367
augaaggccauccugguggugcugcuguacaccuucgccaccgccaacgccgacacccugugcaucggcuaccacgccaacaacagcaccgacaccguggacaccgugcuggagaagaacgugaccgugacccacagcgugaaccugcuggaggacaagcacaacggcaagcugugcaagcugagaggcguggccccccugcaccugggcaagugcaacaucgccggcuggauccugggcaaccccgagugcgagagcuucagcaccagcagcagcuggagcuacaucguggagaccagcagcagcgacaacggcaccugcuaccccggcgacuucaucgacuacgaggagcugagagagcagcugagcagcgugagcagcuucgagagauucgagaucuuccccaagaccagcagcuggcccaaccacgacagcaacaagggcgugaccgccgccugcccccacgccggcgccaagagcuucuacaagaaccugaucuggcuggugaagaagggcaacagcuaccccaagcugagcaagagcuacaucaacgacaagggcaaggaggugcuggugcuguggggcauccaccaccccagcaccagcgccgaccagcagagacuguaccagaacgccgacgccuacguguucgugggcaccagcagauacagcaagaaguucaagcccgagaucgccaucagacccaaggugagagaccaggagggcagaaugaacuacuacuggacccugguggagcccggcgacaagaucaccuucgaggccaccggcaaccugguggugcccagauacgccuucgccauggagagaaacgccggcagcggcaucaucaucagcgacacccccgugcacgacugcaacaccaccugccagacccccaagggcgccaucaacaccagccugcccuuccagaacauccaccccaucaccaucggcaagugccccaaguacgugaagagcaccaagcugagacuggccaccggccugagaaacgugcccagcauccagagcagaggccuguucggcgccaucgccggcuucaucgagggcggcuggaccggcaugguggacggcugguacggcuaccaccaccagaacgagcagggcagcggcuacaccgccgaccugaagagcacccagaacgccaucgacgagaucaccaacaaggugaacagcgugaucgagaagaugaacacccaguucaccgccgugggcaaggaguucaaccaccuggagaagagaaucgagaaccugaacaagaagguggacgacggcuuccuggacaucuggaccuacaacgccgagcugcuggugcugcuggagaacgagagaacccuggacuaccacgacagcaacgugaagaaccuguacgagaaggugagaagccagcugaagaacaacgccaaggagaucggcaacggcugcuucgaguucuaccacaagugcgacaacaccugcauggagagcgugaagaacggcaccuacgacuaccccaaguacagcgaggaggccaagcugaacagagaggagaucgacggcgugaagcuggagagcaccagaaucuaccagauccuggccaucuacagcaccguggccagcagccuggugcugguggugagccugggcgccaucagcuucuggaugugcagcaacggcagccugcagugcagaaucugcaucuga

SEQ ID NO: 167965 - RNA, 1701 nt, Artificial Sequence
  derived and/or modified CDS sequence (opt4) from hemagglutinin__InfluenzaA__AEW25377
augaaggccauccugguggugcugcuguacaccuucgccaccgccaacgccgacacccugugcaucggcuaccacgccaacaacagcaccgacaccguggacaccgugcuggagaagaacgugaccgugacccacagcgugaaccugcuggaggacaagcacaacggcaagcugugcaagcugagaggcguggccccccugcaccugggcaagugcaacaucgccggcuggauccugggcaaccccgagugcgagagccugagcaccgccagcagcuggagcuacaucguggagaccagcagcagcgacaacggcaccugcuaccccggcgacuucaucgacuacgaggagcugagagagcagcugagcagcgugagcagcuucgagagauucgagaucuuccccaagaccagcagcuggcccaaccacgacagcaacaagggcgugaccaccgccugcccccacgccggcgccaagagcuucuacaagaaccugaucuggcuggugaagaagggcaacagcuaccccaagcugagcaagagcuacaucaacgacaagggcaaggaggugcuggugcuguggggcauccaccaccccagcaccagcgccgaccagcagagccuguaccagaacgccgacgccuacguguucgugggcaccagcagauacagcaagaaguucaagcccgagaucgccaucagacccaaggugagagaccaggagggcagaaugaacuacuacuggacccugguggagcccggcgacaagaucaccuucgaggccaccggcaaccugguggugcccagauacgccuucgccauggagagaaacgccggcagcggcaucaucaucagcgacacccccgugcacgacugcaacaccaccugccagacccccaagggcgccaucaacaccagccugcccuuccagaacauccaccccaucaccaucggcaagugccccaaguacgugaagagcaccaagcugagacuggccaccggccugagaaacgugcccagcauccagagcagaggccuguucggcgccaucgccggcuucaucgagggcggcuggaccggcaugguggacggcugguacggcuaccaccaccagaacgagcagggcagcggcuacgccgccgaccugaagagcacccagaacgccaucgacgagaucaccaacaaggugaacagcgugaucgagaagaugaacacccaguucaccgccgugggcaaggaguucaaccaccuggagaagagaaucgagaaccugaacaagaagguggacgacggcuuccuggacaucuggaccuacaacgccgagcugcuggugcugcuggagaacgagagaacccuggacuaccacgacagcaacgugaagaaccuguacgagaaggugaagagccagcugaagaacaacgccaaggagaucggcaacggcugcuucgaguucuaccacaagugcgacaacgccugcauggagagcgugaagaacggcaccuacgacuaccccaaguacagcgaggaggccaagcugaacagagaggagaucgacggcgugaagcuggagagcaccagaaucuaccagauccuggccaucuacagcaccguggccagcagccuggugcugguggugagccugggcgccaucagcuucuggaugugcagcaacggcagccugcagugcagaaucugcaucuga

SEQ ID NO: 167966 - RNA, 1701 nt, Artificial Sequence
  derived and/or modified CDS sequence (opt4) from hemagglutinin__InfluenzaA__AEW25385
augaaggccauccugguggugcugcuguacaccuucgccaccgccaacgccgacacccugugcaucggcuaccacgccaacaacagcaccgacaccguggacaccgugcuggagaagaacgugaccgugacccacagcgugaaccugcuggaggacaagcacaacggcaagcugugcaagcugagaggcguggccccccugcaccugggcaagugcaacaucgccggcuggauccugggcaaccccgagugcgagagccugagcaccgccagcagcuggagcuacaucguggagaccagcagcagcgacaacggcaccugcuaccccggcgacuucaucgacuacgaggagcugagagagcagcugagcagcgugcccagcuucgagagauucgagaucuuccccaagaccagcagcuggcccaaccacgacagcaacaagggcgugaccgccgccugcccccacgccggcgccaagagcuucuacaagaaccugaucuggcuggugaagaagggcaacagcuaccccaagcugagcaagagcuacaucaacgacaagggcaaggaggugcuggugcuguggggcauccaccaccccagcaccagcgccgaccagcagagccuguaccagaacgccgacgccuacguguucgugggcaccagcagauacagcaagaaguucaagcccgagaucgccaucagacccaaggugagagaccaggagggcagaaugaacuacuacuggacccugguggagcccggcgacaagaucaccuucgaggccaccggcaaccugguggugcccagauacgccuucgccauggagagaaacgccggcagcggcaucaucaucagcgacacccccgugcacgacugcaacaccaccugccagacccccaagggcgccaucaacaccagccugcccuuccagaacauccaccccaucaccaucggcaagugccccaaguacgugaagagcaccaagcugagacuggccaccggccugagaaacgugcccagcauccagagcagaggccuguucggcgccaucgccggcuucaucgagggcggcuggaccggcaugguggacggcugguacggcuaccaccaccagaacgagcagggcagcggcuacgccgccgaccugaagagcacccagaacgccaucgacaagaucaccaacaaggugaacagcgugaucgagaagaugaacacccaguucaccgccgugggcaaggaguucaaccaccuggagaagagaaucgagaaccugaacaagaagguggacgacggcuuccuggacaucuggaccuacaacgccgagcugcuggugcugcuggagaacgagagaacccuggacuaccacgacagcaacgugaagaaccuguacgagaaggugagaagccagcugaagaacaacgccaaggagaucggcaacggcugcuucgaguucuaccacaagugcgacaacaccugcauggagagcgugaagaacggcaccuacgacuaccccaaguacagcgaggaggccaagcugaacagagaggagaucgacggcgugaagcuggagagcaccagaaucuaccagauccuggccaucuacagcaccguggccagcagccuggugcugguggugagccugggcgccaucagcuucuggaugugcagcaacggcagccugcagugcagaaucugcaucuga

SEQ ID NO: 167967 - RNA, 1701 nt, Artificial Sequence; identical to SEQ ID NO: 167963
  derived and/or modified CDS sequence (opt4) from hemagglutinin__InfluenzaA__AEW25416

SEQ ID NO: 167968 - RNA, 1701 nt, Artificial Sequence
  derived and/or modified CDS sequence (opt4) from hemagglutinin__InfluenzaA__AEW25446
augaaggccauccugguggugcugcuguacaccuucgccaccgccaacgccgacacccugugcaucggcuaccacgccaacaacagcaccgacaccguggacaccgugcuggagaagaacgugaccgugacccacagcgugaaccugcuggaggacaagcacaacggcaagcugugcaagcugagaggcguggccccccugcaccugggcaagugcaacaucgccggcuggauccugggcaaccccgagugcgagagccugagcaccgccagcagcuggagcuacaucguggagaccagcagcagcgacaacggcaccugcuaccccggcgacuucaucgacuacgaggagcugagagagcagcugagcagcgugagcagcuucgagagauucgagaucuuccccaagaccagcagcuggcccaaccacgaccccaacaagggcgugaccgccgccugcccccacgccggcgccaagagcuucuacaagaaccugaucuggcuggugaagaagggcaacagcuaccccaagcugagcaagagcuacaucaacgacaagggcaaggaggugcuggugcuguggggcauccaccaccccagcaccagcgccgaccagcagagccuguaccagaacgccgacgccuacguguucgugggcaccagcagauacagcaagaaguucaagcccgagaucgccaucagacccaaggugagagaccaggagggcagaaugaacuacuacuggacccugguggagcccggcgacaagaucaccuucgaggccaccggcaaccugguggugcccagauacgccuucgccauggagagaaacgccggcagcggcaucaucaucagcgacacccccgugcacgacugcaacaccaccugccagacccccaagggcgccaucaacaccagccugcccuuccagaacauccaccccaucaccaucggcaagugccccaaguacgugaagagcaccaagcugagacuggccaccggccugagaaacgugcccagcauccagagcagaggccuguucggcgccaucgccggcuucaucgagggcggcuggaccggcaugguggacggcugguacggcuaccaccaccagaacgagcagggcagcggcuacgccgccgaccugaagagcacccagaacgccaucgacgagaucaccaacaaggugaacagcgugaucgagaagaugaacaagcaguucaccgccgugggcaaggaguucaaccaccuggagaagagaaucgagaaccugaacaagaagguggacgacggcuuccuggacaucuggaccuacaacgccgagcugcuggugcugcuggagaacgagagaacccuggacuaccacgacagcaacgugaagaaccuguacgagaaggugagaagccagcugaagaacaacgccaaggagaucggcaacggcugcuucgaguucuaccacaagugcgacaacaccugcauggagagcgugaagaacggcaccuacgacuaccccaaguacagcgaggaggccaagcugaacagagaggagaucgacggcgugaagcuggagagcaccagaaucuaccagauccuggccaucuacagcaccguggccagcagccuggugcugguggugagccugggcgccaucagcuucuggaugugcagcaacggcagccugcagugcagaaucugcaucuga

SEQ ID NO: 167969 - RNA, 1701 nt, Artificial Sequence; identical to SEQ ID NO: 167963
  derived and/or modified CDS sequence (opt4) from hemagglutinin__InfluenzaA__AEW25454

SEQ ID NO: 167970 - RNA, 1701 nt, Artificial Sequence
  derived and/or modified CDS sequence (opt4) from hemagglutinin__InfluenzaA__AEW25462
augaaggccauccugguggugcugcuguacaccuucgccaccgccaacgccgacacccugugcaucggcuaccacgccaacaacagcaccgacaccguggacaccgugcuggagaagaacgugaccgugacccacagcgugaaccugcuggaggacaagcacaacggcaagcugugcaagcugagaggcguggccccccugcaccugggcaagugcaacaucgccggcuggauccugggcaaccccgagugcgagagccugagcaccgccagcagcuggagcuacaucguggagaccagcagcagcgacaacggcaccugcuaccccggcgacuucaucgacuacgaggagcugagagagcagcugagcagcgugagcagcuucgagagauucgagaucuuccccaagaccagcagcuggcccaaccacgaccccaacaagggcgugaccgccgccugcccccacgccggcgccaagagcuucuacaagaaccugaucuggcuggugaagaagggcaacagcuaccccaagcugagcaagcccuacaccaacgacaagggcaaggaggugcuggugcuguggggcauccaccaccccagcaccagcgccgaccagcagagccuguaccagaacgccgacgccuacguguucgugggcaccagcagauacagcaagaaguucaagcccgagaucgccaucagacccaaggugagagaccaggagggcagaaugaacuacuacuggacccugguggagcccggcgacaagaucaccuucgaggccaccggcaaccugguggugcccagauacgccuucgccauggagagaaacgccggcagcggcaucaucaucagcgacacccccgugcacgacugcaacaccaccugccagacccccaagggcgccaucaacaccagccugcccuuccagaacauccaccccaucaccaucggcaagugccccaaguacgugaagagcaccaagcugagacuggccaccggccugagaaacgugcccagcauccagagcagaggccuguucggcgccaucgccggcuucaucgagggcggcuggaccggcaugguggacggcugguacggcuaccaccaccagaacgagcagggcagcggcuacgccgccgaccugaagagcacccagaacgccaucgacgagaucaccaacaaggugaacagcgugaucgagaagaugaacacccaguucaccgccgugggcaaggaguucaaccaccuggagaagagaaucgagaaccugaacaagaagguggacgacggcuuccuggacaucuggaccuacaacgccgagcugcuggugcugcuggagaacgagagaacccuggacuaccacgacagcaacgugaagaaccuguacgagaaggugagaagccagcugaagaacaacgccaaggagaucggcaacggcugcuucgaguucuaccacaagugcgacaacaccugcauggagagcgugaagaacggcaccuacgacuaccccaaguacagcgaggaggccaagcugaacagagaggagaucgacggcgugaagcuggagagcaccagaaucuaccagauccuggccaucuacagcaccguggccagcagccuggugcugguggugagccugggcgccaucagcuucuggaugugcagcaacggcagccugcagugcagaaucugcaucuga

SEQ ID NO: 167971 - RNA, 1701 nt, Artificial Sequence; identical to SEQ ID NO: 163527
  derived and/or modified CDS sequence (opt4) from hemagglutinin__InfluenzaA__AEW25472

SEQ ID NO: 167972 - RNA, 1701 nt, Artificial Sequence
  derived and/or modified CDS sequence (opt4) from hemagglutinin__InfluenzaA__AEW25482
augaaggccauccugguggugcugcuguacaccuucgccaccgccaacgccgacacccugugcaucggcuaccacgccaacaacagcaccgacaccguggacaccgugcuggagaagaaggugaccgugacccacagcgugaaccugcuggaggacaagcacaacggcaagcugugcaagcugagaggcguggccccccugcaccugggcaagugcaacaucgccggcuggauccugggcaaccccgagugcgagagccugagcaccgccagcagcuggagcuacaucguggagaccagcaacagcgacaacggcaccugcuaccccggcgacuucaucgacuacgaggagcugagagagcagcugagcagcgugagcagcuucgagagauucgagaucuuccccaagaccagcagcuggcccaaccacgaccccaacaagggcgugaccgccgccugcccccacgccggcgccaagagcuucuacaagaaccugaucuggcuggugaagaagggcaacagcuaccccaagcugagcaagagcuacaucaacgacaagggcaaggaggugcuggugcuguggggcauccaccaccccagcaccagcgccgaccagcagagccuguaccagaacgccgacgccuacguguucgugggcaccagcagauacagcaagaaguucaagcccgagaucgccaucagacccaaggugagagaccagggcggcagaaugaacuacuacuggacccugguggagcccggcgacaagaucaccuucgaggccaccggcaaccugguggugcccagauacgccuucgccauggagagaaacgccggcagcggcaucaucaucagcgacacccccgugcacgacugcaacaccaccugccagacccccaagggcgccaucaacaccagccugcccuuccagaacauccaccccaucaccaucggcaagugccccaaguacgugaagagcaccaagcugagacuggccaccggccugagaaacgugcccagcauccagagcagaggccuguucggcgccaucgccggcuucaucgagggcggcuggaccggcaugguggacggcugguacggcuaccaccaccagaacgagcagggcagcggcuacgccgccgaccugaagagcacccagaacgccaucgacgagaucaccaacaaggugaacagcgugaucgagaagaugaacacccaguucaccgccgugggcaaggaguucaaccaccuggagaagagaaucgagaaccugaacaagaagguggacgacggcuuccuggacaucuggaccuacaacgccgagcugcuggugcugcuggagaacgagagaacccuggacuaccacgacagcaacgugaagaaccuguacgagaaggugagaagccagcugaagaacaacgccaaggagaucggcaacggcugcuucgagcuguaccacaagugcgacaacaccugcauggagagcgugaagaacggcaccuacgacuaccccaaguacagcgaggaggccaagcugaacagagaggagaucgacggcgugaagcuggagagcaccagaaucuaccagauccuggccaucuacagcaccguggccagcagccuggugcugguggugagccugggcgccaucagcuucuggaugugcagcaacggcagccugcagugcagaaucugcaucuga

SEQ ID NO: 167973 - RNA, 1701 nt, Artificial Sequence
  derived and/or modified CDS sequence (opt4) from hemagglutinin__InfluenzaA__AEW25492
augaaggccauccugguggugcugcuguacaccuucgccaccgccaacgccgacacccugugcaucggcuaccacgccaacaacagcaccgacaccguggacaccgugcuggagaagaacgugaccgugacccacagcgugaaccugcuggaggacaagcacaacggcaagcugugcaagcugagaggcguggccccccugcaccugggcaagugcaacaucgccggcuggauccugggcaaccccgagugcgagagccugagcaccgccagcagcuggagcuacaucguggagaccagcagcagcgacaacggcaccugcuaccccggcgacuucaucgacuacgaggagcugagagagcagcugagcagcgugagcagcuucgagagauucgagaucuuccccaagaccagcagcuggcccaaccacgaccccaacaagggcgugaccgccgccugcccccacgccggcgccaagagcuucuacaagaaccugaucuggcuggugaagaagggcaacagcuaccccaagcugagcaagagcuacaucaacgacaagggcaaggaggugcuggugcuguggggcauccaccaccccagcaccagcgccgaccagcagagccuguaccagaacgccgacgccuacaucuucgugggcaccagcagauacagcaagaaguucaagcccgagaucgccaucagacccaaggugagagaccaggagggcagaaugaacuacuacuggacccugguggagcccggcgacaagaucaccuucgaggccaccggcaaccugguggugcccagauacgccuucgccauggagagaaacgccggcagcggcaucaucaucagcgacacccccgugcacgacugcaacaccaccugccagacccccaagggcgccaucaacaccagccugcccuuccagaacauccaccccaucaccaucggcaagugccccaaguacgugaagagcaccaagcugagacuggccaccggccugagaaacgugcccagcauccagagcagaggccuguucggcgccaucgccggcuucaucgagggcggcuggaccggcaugguggacggcugguacggcuaccaccaccagaacgagcagggcagcggcuacgccgccgaccugaagagcacccagaacgccaucgacgagaucaccaacaaggugaacagcgugaucgagaagaugaacacccaguucaccgccgugggcaaggaguucaaccaccuggagaagagaaucgagaaccugaacaagaagguggacgacggcuuccuggacaucuggaccuacaacgccgagcugcuggugcugcuggagaacgagagaacccuggacuaccacgacagcaacgugaagaaccuguacgagaaggugagaagccagcugaagaacaacgccaaggagaucggcaacggcugcuucgaguucuaccacaagugcgacaacaccugcauggagagcgugaagaacggcaccuacgacuaccccaaguacagcgaggaggccaagcugaacagagaggagaucgacggcgugaagcuggagagcaccagaaucuaccagauccuggccaucuacagcaccguggccagcagccuggugcugguggugagccugggcgccaucagcuucuggaugugcagcaacggcagccugcagugcagaaucugcaucuga

SEQ ID NO: 167974 - RNA, 1701 nt, Artificial Sequence
  derived and/or modified CDS sequence (opt4) from hemagglutinin__InfluenzaA__AEW25501
augaaggccauccugguggugcugcuguacaccuucgccaccgccaacgccgacacccugugcaucggcuaccacgccaacaacagcaccgacaccguggacaccgugcuggagaagaacgugaccgugacccacagcgugaaccugcuggaggacaagcacaacggcaagcugugcaagcugagaggcguggccccccugcaccugggcaagugcaacaucgccggcuggauccugggcaaccccgagugcgagagccugagcaccgccagcagcuggagcuacaucguggagaccagcagcagcgacaacggcaccugcuaccccggcgacuucaucgacuacgaggagcugagagagcagcugagcagcgugagcagcuucgagaaguucgagaucuuccccaagaccagcagcuggcccaaccacgacagcaacaagggcgugaccgccgccugcccccacgccggcgccaagagcuucuacaagaaccugaucugccuggugaagaagggcaacagcuaccccaagcugagcaagagcuacaucaacgacaagggcaaggaggugcuggugcuguggggcauccaccaccccagcaccagcgccgaccagcagagccuguaccagaacgccgacgccuacguguucgugggcaccagcagauacagcaagaaguucaagcccgagaucgccaucagacccaaggugagagaccaggagggcagaaugaacuacuacuggacccugguggagcccggcgacaagaucaccuucgaggccaccggcaaccugguggugcccagauacgccuucgccauggagagaaacgccggcagcggcaucaucaucagcgacacccccgugcacgacugcaacaccaccugccagacccccaagggcgccaucaacaccagccugcccuuccagaacauccaccccaucaccaucggcaagugccccaaguacgugaagagcaccaagcugagacuggccaccggccugagaaacgugcccagcauccagagcagaggccuguucggcgccaucgccggcuucaucgagggcggcuggaccggcaugguggacggcugguacggcuaccaccaccagaacgagcagggcagcggcuacgccgccgaccugaagagcacccagaacgccaucgacaagaucaccaacaaggugaacagcgugaucgagaagaugaacacccaguucaccgccgugggcaaggaguucaaccaccuggagaagagaaucgagaaccugaacaagaagguggacgacggcuuccuggacaucuggaccuacaacgccgagcugcuggugcugcuggagaacgagagaacccuggacuaccacgacagcaacgugaagaaccuguacgagaaggugagaagccagcugaagaacaacgccaaggagaucggcaacggcugcuucgaguucuaccacaagugcgacaacaccugcauggagagcgugaagaacggcaccuacgacuaccccaaguacagcgaggaggccaagcugaacagagaggagaucgacggcgugaagcuggagagcaccagaaucuaccagauccuggccaucuacagcaccguggccagcagccuggugcugguggugagccugggcgccaucagcuucuggaugugcagcaacggcagccugcagugcagaaucugcaucuga

SEQ ID NO: 167975 - RNA, 1701 nt, Artificial Sequence; identical to SEQ ID NO: 167963
  derived and/or modified CDS sequence (opt4) from hemagglutinin__InfluenzaA__AEW25509

SEQ ID NO: 167976 - RNA, 1701 nt, Artificial Sequence
  derived and/or modified CDS sequence (opt4) from hemagglutinin__InfluenzaA__AEW25519
augaaggccauccugguggugcugcuguacaccuucgccaccgccaacgccgacacccugugcaucggcuaccacgccaacaacagcaccgacaccguggacaccgugcuggagaagaacgugaccgugacccacagcgugaaccugcuggaggacaagcacaacggcaagcugugcaagcugagaggcguggccccccugcaccugggcaagugcaacaucgccggcuggauccugggcaaccccgagugcgagagccugagcaccgccagcagcuggagcuacaucguggagaccagcagcagcgacaacggcaccugcuaccccggcgacuucaucgacuacgaggagcugagagagcagcugagcagcgugagcagcuucgagagauucgagaucuuccccaagaccagcagcuggcccaaccacgaccccaacaagggcgugaccgccgccugcccccacaccggcgccaagagcuucuacaagaaccugaucuggcuggugaagaagggcaacagcuaccccaagcugagcaagagcuacaucaacgacaagggcaaggaggugcuggugcuguggggcauccaccaccccagcaccagcgccgaccagcagagccuguaccagaacgccgacgccuacguguucgugggcaccagcagauacagcaagaaguucaagcccgagaucgccaucagacccaaggugagagaccaggagggcagaaugaacuacuacuggacccugguggagcccggcgacaagaucaccuucgaggccaccggcaaccugguggugcccagauacgccuucgccauggagagaaacgccggcagcggcaucaucaucagcgacacccccgugcacgacugcaacaccaccugccagacccccaagggcgccaucaacaccagccugcccuuccagaacauccaccccaucaccaucggcaagugccccaaguacgugaagagcaccaagcugagacuggccaccggccugagaaacgugcccagcauccagagcagaggccuguucggcgccaucgccggcuucaucgagggcggcuggaccggcaugguggacggcugguacggcuaccaccaccagaacgagcagggcagcggcuacgccgccgaccugaagagcacccagaacgccaucgacgagaucaccaacaaggugaacagcgugaucgagaagaugaacacccaguucaccgccgugggcaaggaguucaaccaccuggagaagagaaucgagaaccugaacaagaagguggacgacggcuuccuggacaucuggaccuacaacgccgagcugcuggugcugcuggagaacgagagaacccuggacuaccacgacagcaacgugaagaaccuguacgagaaggugagaagccagcugaagaacaacgccaaggagaucggcaacggcugcuucgaguucuaccacaagugcgacaacaccugcauggagagcgugaagaacggcaccuacgacuaccccaaguacagcgaggaggccaagcugaacagagagaagaucgacggcgugaagcuggagagcaccagaaucuaccagauccuggccaucuacagcaccguggccagcagccuggugcugguggugagccugggcgccaucagcuucuggaugugcagcaacggcagccugcagugcagaaucugcaucuga

SEQ ID NO: 167977 - RNA, 1701 nt, Artificial Sequence
  derived and/or modified CDS sequence (opt4) from hemagglutinin__InfluenzaA__AEW25528
augaaggccauccugguggugcugcuguacaccuucgccaccgccaacgccgacacccugugcaucggcuaccacgccaacaacagcaccgacaccguggacaccgugcuggagaagaacgugaccgugacccacagcgugaaccugcuggaggacaagcacaacggcaagcugugcaagcugagaggcguggccccccugcaccugggcaagugcaacaucgccggcuggauccugggcaaccccgagugcgagagcuucagcaccagcagcagcuggagcuacaucguggagaccagcagcagcgacaacggcaccugcuaccccggcgacuucaucgacuacgaggagcugagagagcagcugagcagcgugagcagcuucgagagauucgagaucuuccccaagaccagcagcuggcccaaccacgacagcaacaagggcgugaccgccgccugcccccacgccggcgccaagagcuucuacaagaaccugaucuggcuggugaagaagggcaacagcuaccccaagcugagcaagagcuacaucaacgacaagggcaaggaggugcuggugcuguggggcauccaccaccccagcaccagcgccgaccagcagagccuguaccagaacgccgacgccuacguguucgugggcaccagcagauacagcaagaaguucaagcccgagaucgccaucagacccaaggugagagaccaggagagaagaaugaacuacuacuggacccugguggagcccggcgacaagaucaccuucgaggccaccggcaaccugguggugcccagauacgccuucgccauggagagaaacgccggcagcggcaucaucaucagcgacacccccgugcacgacugcaacaccaccugccagacccccaagggcgccaucaacaccagccugcccuuccagaacauccaccccaucaccaucggcaagugccccaaguacgugaagagcaccaagcugagacuggccaccggccugagaaacgugcccagcauccagagcagaggccuguucggcgccaucgccggcuucaucgagggcggcuggaccggcaugguggacggcugguacggcuaccaccaccagaacgagcagggcagcggcuacgccgccgaccugaagagcacccagaacgccaucgacgagaucaccaacaaggugaacagcgugaucgagaagaugaacacccaguucaccgccgugggcaaggaguucaaccaccuggagaagagaaucgagaaccugaacaagaagguggacgacggcuuccuggacaucuggaccuacaacgccgagcugcuggugcugcuggagaacgagagaacccuggacuaccacgacagcaacgugaagaaccuguacgagaaggugagaagccagcugaagaacaacgccaaggagaucggcaacggcugcuucgaguucuaccacaagugcgacaacaccugcauggagagcgugaagaacggcaccuacgacuaccccaaguacagcgaggaggccaagcugaacagagaggagaucgacggcgugaagcuggagagcaccagaaucuaccagauccuggccaucuacagcaccguggccagcagccuggugcugguggugagccugggcgccaucagcuucuggaugugcagcaacggcagccugcagugcagaaucugcaucuga

SEQ ID NO: 167978 - RNA, 1701 nt, Artificial Sequence
  derived and/or modified CDS sequence (opt4) from hemagglutinin__InfluenzaA__AEW25545
augaaggccauccugguggugcugcuguacaccuucgccaccgccaacgccgacacccugugcaucggcuaccacgccaacaacagcaccgacaccguggacaccgugcuggagaagaacgugaccgugacccacagcgugaaccugcuggaggacaagcacaacggcaagcugugcaagcugagaggcguggccccccugcaccugggcaagugcaacaucgccggcuggauccugggcaaccccgagugcgagagccugagcaccgccagcagcuggagcuacaucguggagaccagcagcagcgacaacggcaccugcuaccccggcgacuucaucgacuacgaggagcugagagagcagcugagcagcgugagcagcuucgagagauucgagaucuuccccaagaccagcagcuggcccaaccacgaccccaacaagggcgugaccgccgccugcccccacgccggcgccaagagcuucuacaagaaccugaucuggcuggugaagaagggcaacagcuaccccaagcugagcaagagcuacaucaacgacaagggcaaggaggugcuggugcuguggggcauccaccaccccagcaccagcgccgaccagcagagccuguaccagaacgccgacgccuacguguucgugggcaccagcagauacagcaagaaguucaagcccgagaucgccaucagacccaaggugagagaccaggagggcagaaugaacuacuacuggacccugguggagcccggcgacaagaucaccuucgaggccaccggcaaccugguggugcccagauacgccuucgccauggagagaaacgccggcagcggcaucaucaucagcgacacccccgugcacgacugcaacaccaccugccagacccccaagggcgccaucaacaccagccugcccuuccagaacauccaccccaucaccaucggcaagugccccaaguacgugaagagcaccaagcugagacuggccaccggccugagaaacgugcccagcauccagagcagaggccuguucggcgccaucgccggcuucaucgagggcggcuggaccggcaugguggacggcugguacggcuaccaccaccagaacgagcagggcagcggcuacgccgccgaccugaagagcacccagaacgccaucgacaagaucaccaacaaggugaacagcgugaucgagaagaugaacacccaguucaccgccgugggcaaggaguucaaccaccuggagaagagaaucgagaaccugaacaagaagguggacgacggcuuccuggacaucuggaccuacaacgccgagcugcuggugcugcuggagaacgagagaacccuggacuaccacgacagcaacgugaagaaccuguacgagaaggugagaagccagcugaagaacaacgccaaggagaucggcaacggcugcuucgaguucuaccacaagugcgacaacaccugcauggagagcgugaagaacggcagcuacgacuaccccaaguacagcgaggaggccaagcugaacagagaggagaucgacggcgugaagcuggagagcaccagaaucuaccagauccuggccaucuacagcaccguggccagcagccuggugaugguggugagccugggcgccaucagcuucuggaugugcagcaacggcagccugcagugcagaaucugcaucuga

SEQ ID NO: 167979 - RNA, 1701 nt, Artificial Sequence
  derived and/or modified CDS sequence (opt4) from hemagglutinin__InfluenzaA__AEW25555
augaaggccauccugguggugcugcuguacaccuucgccaccgccaacgccgacacccugugcaucggcuaccacgccaacaacagcaccgacaccguggacaccgugcuggagaagaacgugaccgugacccacagcgugaaccugcuggaggacaagcacaacggcaagcugugcaagcugagaggcguggccccccugcaccugggcaagugcaacaucgccggcuggauccugggcaaccccgagugcgagagccugagcaccgccagcagcuggagcuacaucguggagaccagcagcagcgacaacggcaccugcuaccccggcgacuucaucgacuacgaggagcugagagagcagcugagcagcgugagcagcuucgagagauucgagaucuuccccaagaccagcagcuggcccaaccacgaccccaacaagggcgugaccgccgccugcccccacgccggcgccaagagcuucuacaagaaccugaucuggcuggugaagaagggcaacagcuaccccaagcugagcaagagcuacaucaacgacaagggcaaggaggugcuggugcuguggggcauccaccaccccagcaccagcgccgaccagcagagccuguaccagaacgccgacgccuacguguucgugggcaccagcagauacagcaagaaguucaagcccgagaucgccaucagacccaaggugagagaccaggagggcagaaugaacuacuacuggacccugguggagcccggcgacaagaucaccuucgaggccaccggcaaccugguggugcccagauacgccuucgccauggagagaaacgccggcagcggcaucaucaucagcgacacccccgugcacuacugcaacaccaccugccagacccccaagggcgccaucaacaccagccugcccuuccagaacauccaccccaucaccaucggcaagugccccaaguacgugaagagcaccaagcugagacuggccaccggccugagaaacgugcccagcauccagagcagaggccuguucggcgccaucgccggcuucaucgagggcggcuggaccggcaugguggacggcugguacggcuaccaccaccagaacgagcagggcagcggcuacgccgccgaccugaagagcacccagaacgccaucgacgagaucaccaacaaggugaacagcgugaucgagaagaugaacacccaguucaccgccgugggcaaggaguucaaccaccuggagaagagaaucgagaaccugaacaagaagguggacgacggcuuccuggacaucuggaccuacaacgccgagcugcuggugcugcuggagaacgagagaacccuggacuaccacgacagcaacgugaagaaccuguacgagaaggugagaagccagcugaagaacaacgccaaggagaucggcaacggcugcuucgaguucuaccacaagugcgacaacaccugcauggagagcgugaagaacggcaccuacgacuaccccaaguacagcgaggaggccaagcugaacagagaggagaucgacggcgugaagcuggagagcaccagaaucuaccagauccuggccaucuacagcaccguggccagcagccuggugcugguggugagccugggcgccaucagcuucuggaugugcagcaacggcagccugcagugcagaaucugcaucuga

SEQ ID NO: 167980 - RNA, 1701 nt, Artificial Sequence
  derived and/or modified CDS sequence (opt4) from hemagglutinin__InfluenzaA__AEW25564
augaaggccauccugguggugcugcuguacaccuucgccaccgccaacgccgacacccugugcaucggcuaccacgccaacaacagcaccgacaccguggacaccgugcuggagaagaacgugaccgugacccacagcgugaaccugcuggaggacaagcacaacggcaagcugugcaagcugagaggcguggccccccugcaccugggcaagugcaacaucgccggcuggauccugggcaaccccgagugcgagagccugagcaccgccagcagcuggagcuacaucguggagaccagcagcagcgacaacggcaccugcuaccccggcgacuucaucgacuacgaggagcugagagagcagcugagcagcgugagcagcuucgagagauucgagaucuuccccaagaccagcagcuggcccaaccacgacagcaacaagggcgugaccgccgccugcccccacgccggcgccaagagcuucuacaagaaccugaucuggcuggugaagaagggcaacagcuaccccaagcugagcaagagcuacaucaacgacaagggcaaggaggugcuggugcuguggggcauccaccaccccagcaccagcgccgaccagcagagccuguaccagaacgccgacgccuacguguucgugggcaccagcagauacagcaagaaguucaagcccgagaucgccaucagacccaaggugagagaccaggagggcagaaugaacuacuacuggacccugguggagcccggcgacaagaucaccuucgaggccaccggcaaccugguggugcccagauacgccuucgccauggagagaaacgccggcagcggcaucaucaucagcgacacccccgugcacgacugcaacaccaccugccagacccccaagggcgcccugaacaccagccugcccuuccagaacauccaccccaucaccaucggcaagugccccaaguacgugaagagcaccaagcugagacuggccaccggccugagaaacgugcccagcauccagagcagaggccuguucggcgccaucgccggcuucaucgagggcggcuggaccggcaugguggacggcugguacggcuaccaccaccagaacgagcagggcagcggcuacgccgccgaccugaagagcacccagaacgccaucgacgagaucaccaacaaggugaacagcgugaucgagaagaugaacacccaguucaccgccgugggcaaggaguucaaccaccuggagaagagaaucgagaaccugaacagaaagguggacgacggcuuccuggacaucuggaccuacaacgccgagcugcuggugcugcuggagaacgagagaacccuggacuaccacgacagcaacgugaagaaccuguacgagaaggugagaagccagcugaagaacaacgccaaggagaucggcaacggcugcuucgaguucuaccacaagugcgacaacaccugcauggagagcgugaagaacggcaccuacgacuaccccaaguacagcgaggaggccaagcugaacagagaggagaucgacggcgugaagcuggagagcaccggcaucuaccagauccuggccaucuacagcaccguggccagcagccuggugcugguggugagccugggcgccaucagcuucuggaugugcagcaacggcagccugcagugcagaaucugcaucuga

SEQ ID NO: 167981 - RNA, 1701 nt, Artificial Sequence; identical to SEQ ID NO: 163527
  derived and/or modified CDS sequence (opt4) from hemagglutinin__InfluenzaA__AEW25573

SEQ ID NO: 167982 - RNA, 1701 nt, Artificial Sequence
  derived and/or modified CDS sequence (opt4) from hemagglutinin__InfluenzaA__AEW25582
augaaggccauccugguggugcugcuguacaccuucgccaccgccaacgccgacacccugugcaucggcuaccacgccaacaacagcaccgacaccguggacaccgugcuggagaagaacgugaccgugacccacagcgugaaccugcuggaggacaagcacaacggcaagcugugcaagcugagaggcguggccccccugcaccugggcaagugcaacaucgccggcuggauccugggcaaccccgagugcgagagccugagcaccgccagcagcuggagcuacaucguggagaccagcagcagcgacaacggcaccugcuaccccggcgacuucaucgacuacgaggagcugagagagcagcugagcagcgugagcagcuucgagagauucgagaucuuccccaagaccagcagcuggcccaaccacgacagcaacaagggcgugaccgccgccugcccccacgccggcgccaagagcuucuacaagaaccugaucuggcuggugaagaagggcaacagcuaccccaagcugagcaagagcuacaucaacgacaagggcaaggaggugcuggugcuguggggcauccaccaccccagcaccagcgccgaccagcagagccuguaccagaacgccgacgccuacguguucgugggcaccagcagauacagcaagaaguucaagcccgagaucgccaucagacccaaggugagagaccaggagggcagaaugaacuacuacuggacccugguggagcccggcgacaagaucaccuucgaggccaccggcaaccugguggugcccagauacgccuucgccauggagagaaacgccggcagcggcaucauccugagcgacacccccgugcacgacugcaacaccaccugccagacccccaagggcgccaucaacaccagccugcccuuccagaacauccaccccaucaccaucggcaagugccccaaguacgugaagagcaccaagcugagacuggccaccggccugagaaacgugcccagcauccagagcagaggccuguucggcgccaucgccggcuucaucgagggcggcuggaccggcaugguggacggcugguacggcuaccaccaccagaacggccagggcagcggcuacgccgccgaccugaagagcacccagaacgccaucgacaagaucaccaacaaggugaacagcgugaucgagaagaugaacacccaguucaccgccgugggcaaggaguucaaccaccuggagaagagaaucgagaaccugaacaagaagguggacgacggcuuccuggacaucuggaccuacaacgccgagcugcuggugcugcuggagaacgagagaacccuggacuaccacgacagcaacgugaagaaccuguacgagaaggugagaagccagcugaagaacaacgccaaggagaucggcaacggcugcuucgaguucuaccacaagugcgacaacaccugcauggagagcgugaagaacggcaccuacgacuaccccaaguacagcgaggaggccaagcugaacagagaggagaucgacggcgugaagcuggagagcaccagaaucuaccagauccuggccaucuacagcaccguggccagcagccuggugcugguggugagccugggcgccaucagcuucuggaugugcagcaacggcagccugcagugcagaaucugcaucuga

SEQ ID NO: 167983 - RNA, 1701 nt, Artificial Sequence
  derived and/or modified CDS sequence (opt4) from hemagglutinin__InfluenzaA__AEW25590
augaaggccauccugguggugcugcuguacaccuucgccaccgccaacgccgacacccugugcaucggcuaccacgccaacaacagcaccgacaccguggacaccgugcuggagaagaacgugaccgugacccagagcgugaaccugcuggaggacaagcacaacggcaagcugugcaagcugagaggcguggccccccugcaccugggcaagugcaacaucgccggcuggauccugggcaaccccgagugcgagagccugagcaccgccagcagcuggagcuacaucguggagaccagcagcagcgacaacggcaccugcuaccccggcgacuucaucgacuacgaggagcugagagagcagcugagcagcgugagcagcuucgagagauucgagaucuuccccaagaccagcagcuggcccaaccacgacagcaacaagggcgugaccgccgccugcccccacgccggcgccaagagcuucuacaagaaccugaucuggcuggugaagaagggcaacagcuaccccaagcugagcaagagcuacaucaacgacaagggcaaggaggugcuggugcuguggggcauccaccaccccagcaccagcgccgaccagcagagccuguaccagaacgccgacgccuacguguucgugggcaccagcagauacagcaagaaguucaagcccgagaucgccaucagacccaaggugagagaccaggaggccagaaugaacuacuacuggacccugguggagcccggcgacaagaucaccuucgaggccaccggcaaccugguggugcccagauacgccuucgccauggagagagacgccggcagcggcaucaucaucagcgacacccccgugcacgacugcaacaccaccugccagacccccaagggcgccaucaacaccagccugcccuuccagaacauccaccccaucaccaucggcaagugccccaaguacgugaagagcaccaagcugagacuggccaccggccugagaaacgugcccagcauccagagcagaggccuguucggcgccaucgccggcuucaucgagggcggcuggaccggcaugguggacggcugguacggcuaccaccaccagaacgagcagggcagcggcuacgccgccgaccugaagagcacccagaacgccaucgacgagaucaccaacaaggugaacagcgugaucgagaagaugaacacccaguucaccgccgugggcaaggaguucaaccaccuggagaagagaaucgagaaccugaacaagaagguggacgacggcuuccuggacaucuggaccuacaacgccgagcugcuggugcugcuggagaacgagagaacccuggacuaccacgacagcaacgugaagaaccugcacgagaaggugagaagccagcugaagaacaacgccaaggagaucggcaacggcugcuucgaguucuaccacaagugcgacaacaccugcauggagagcgugaagaacggcaccuacgacuaccccaaguacagcgaggaggccaagcugaacagagaggagaucgacggcgugaagcuggagagcaccagaaucuaccagauccuggccaucuacagcaccguggccagcagccuggugcugguggugagccugggcgccaucagcuucuggaugugcagcaacggcagccugcagugcagaaucugcaucuga

SEQ ID NO: 167984 - RNA, 1701 nt, Artificial Sequence; identical to SEQ ID NO: 163527
  derived and/or modified CDS sequence (opt4) from hemagglutinin__InfluenzaA__AEW25600

SEQ ID NO: 167985 - RNA, 1701 nt, Artificial Sequence; identical to SEQ ID NO: 163527
  derived and/or modified CDS sequence (opt4) from hemagglutinin__InfluenzaA__AEW25620

SEQ ID NO: 167986 - RNA, 1701 nt, Artificial Sequence
  derived and/or modified CDS sequence (opt4) from hemagglutinin__InfluenzaA__AEW25629
augaaggccauccugguggugcugcuguacaccuucgccaccgccaacgccgacacccugugcaucggcuaccacgccaacaacagcaccgacaccguggacaccgugcuggagaagaacgugaccgugacccacagcgugaaccugcuggaggacaagcacaacggcaagcugugcaagcugagaggcguggccccccugcaccugggcaagugcaacaucgccggcuggauccugggcaaccccgagugcgagagccugagcaccgccagcagcuggagcuacaucguggagaccagcagcagcgacaacggcaccugcuaccccggcgacuucaucgacuacgaggagcugagagagcagcugagcagcgugagcagcuucgagagauucgagaucuuccccaagaccagcagcuggcccaaccacgaccccaacaagggcgugaccgccgccugcccccacgccgaggccaagagcuucuacaagaaccugaucuggcuggugaagaagggcaacagcuaccccaagcugagcaagagcuacaucaacgacaagggcaaggaggugcuggugcuguggggcauccaccaccccagcaccagcgccgaccagcagagccuguaccagaacgccgacgccuacguguucgugggcaccagcagauacagcaagaaguucaagcccgagaucgccaucagacccaaggugagagaccaggagggcagaaugaacuacuacuggacccugguggagcccggcgacaagaucaccuucgaggccaccggcaaccugguggugcccagauacgccuucgccauggagagaaacgccggcagcggcaucaucaucagcgacacccccgugcacgacugcaacaccaccugccagacccccaagggcgccaucaacaccagccugcccuuccagaacauccaccccaucaccaucggcaagugccccaaguacgugaagagcaccaagcugagacuggccaccggccugagaaacgugcccagcauccagagcagaggccuguucggcgccaucgccggcuucaucgagggcggcuggaccggcaugguggacggcugguacggcuaccaccaccagaacgagcagggcagcggcuacgccgccgaccugaagagcacccagaacgccaucgacgagaucaccaacaaggugaacagcgugaucgagaagaugaacacccaguucaccgccgugggcaaggaguucaaccaccuggagaagagaaucgagaaccugaacaagaagguggacgacggcuuccuggacaucuggaccuacaacgccgagcugcuggugcugcuggagaacgagagaacccuggacuaccacgacagcaacgugaagaaccuguacgagaaggugagaagccagcugaagaacaacgccaaggagaucggcaacggcugcuucgaguucuaccacaagugcgacaacaugugcauggagagcgugaagaacggcaccuacgacuaccccaaguacagcgaggaggccaagcugaacagagaggagaucgacggcgugaagcuggagagcaccagaaucuaccagauccuggccaucuacagcaccguggccagcagccuggugcugguggugagccugggcgccaucagcuucuggaugugcagcaacggcagccugcagugcagaaucugcaucuga

SEQ ID NO: 167987 - RNA, 1701 nt, Artificial Sequence; identical to SEQ ID NO: 162729
  derived and/or modified CDS sequence (opt4) from hemagglutinin__InfluenzaA__AEW25637

SEQ ID NO: 167988 - RNA, 1701 nt, Artificial Sequence
  derived and/or modified CDS sequence (opt4) from hemagglutinin__InfluenzaA__AEW25646
augaaggccauccugguggugcugcuguacaccuucgccaccgccaacgccgacacccugugcaucggcuaccacgccaacaacagcaccgacaccguggacaccgugcuggagaagaacgugaccgugacccacagcgugaaccugcuggaggacaagcacaacggcaagcugugcaagcugagaggcguggccccccugcaccugggcaagugcaacaucgccggcuggauccugggcaaccccgagugcgagagccugagcaccgccagcagcuggagcuacaucguggagaccagcagcagcgacaacggcaccugcuaccccggcgacuucaucgacuacgaggagcugagagagcagcugagcagcgugagcagcuucgagagauucgagaucuuccccaagaccagcagcuggcccaaccacgaccccaacaagggcgugaccgccgccugcccccacgccggcgccaagagcuucuacaagaaccugaucuggcuggugaagaagggcaacagcuaccccaagcugagcaagagcuacaucaacgacaagggcaaggaggugcuggugcuguggggcauccaccaccccagcaccagcgccgaccagcagagccuguaccagaacgccgacgccuacguguucgugggcaccagcagauacagcaagaaguucaagcccgagaucgccaucagacccaaggugagagaccaggagggcagaaugaacuacuacuggacccugguggagcccggcgacaagaucaccuucgaggccaccggcaaccugguggugcccagauacgccuucgccauggagagaaacgccggcagcggcaucaucaucagcgacacccccgugcacgacugcaacaccaccugccagacccccaagggcgccaucaacaccagccugcccuuccagaacauccaccccaucaccaucggcaagugccccaaguacgugaagagcaccaagcugagacuggccaccggccugagaaacgugcccagcauccagagcagaggccuguucggcgccaucgccggcuucaucgagggcggcuggaccggcaugguggacggcugguacggcuaccaccaccagaacgagcagggcagcggcuacgccgccgaccugaagagcacccagaacgccaucgacaagaucaccaacaaggugaacagcgugaucgagaagaugaacacccaguucaccgccgugggcaaggaguucaaccaccuggagaagagaaucgagaaccugaacaagaagguggacgacggcuuccuggacaucuggaccuacaacgccgagcugcuggugcugcuggagaacgagagaacccuggacuaccacgacagcaacgugaagaaccuguacgagaaggugagaagccagcugaagaacaacgccaaggagaucggcaacggcugcuucgaguucuaccacaagugcgacaacaccugcauggagagcgugaagaacggcaccuacgacuaccccaaguacagcgaggaggccaagcugaacagagaggagaucgacggcgugaagcuggagagcaccagaaucuaccagauccuggccaucuacagcaccguggccagcagccuggugcugguggugagccugggcgccaucagcuucuggaugugcagcaacggcagccugcagugcagaaucugcaucuga

SEQ ID NO: 167989 - RNA, 1701 nt, Artificial Sequence
  derived and/or modified CDS sequence (opt4) from hemagglutinin__InfluenzaA__AEW25654
augaaggccauccugguggugcugcuguacaccuucgccaccgccaacgccgacacccugugcaucggcuaccacgccaacaacagcaccgacaccguggacaccgugcuggagaagaacgugaccgugacccacagcgugaaccugcuggaggacaagcacaacggcaagcugugcaagcugagaggcguggccccccugcaccugggcaagugcaacaucgccggcuggauccugggcaaccccgagugcgagagccugagcaccgccagcagcuggagcuacaucguggagaccagcagcagcgacaacggcaccugcuaccccggcgacuucaucgacuacgaggagcugagagagcagcugagcagcgugagcagcuucgagagauucgagaucuuccccaagaccagcagcuggcccaaccacgacagcaacaagggcgugaccgccgccugcccccacgccggcgccaagagcuucuacaagaaccugaucuggcuggugaagaagggcaacagcuaccccaagcugagcaagagcuacaucaacgacaagggcaaggaggugcuggugcuguggggcauccaccaccccagcaccagcgccgaccagcagagccuguaccagaacgccgacgccuacguguucgugggcaccagcagauacagcaagaaguucaagcccgagaucgccaucagacccaaggugagagaccaggagggcagaaugaacuacuacuggacccugguggagcccggcgacaagaucaccuucgaggccaccggcaaccugguggugcccagauacgccuucgccauggagagaaacgccggcagcggcaucaucaucagcgacacccccgugcacgacugcaacaccaccugccagacccccaagggcgccaucaacaccagcccccccuuccagaacauccaccccaucaccaucggcaagugccccaaguacgugaagagcaccaagcugagacuggccaccggccugagaaacauccccagcauccagagcagaggccuguucggcgccaucgccggcuucaucgagggcggcuggaccggcaugguggacggcugguacggcuaccaccaccagaacgagcagggcagcggcuacgccgccgaccugaagagcacccagaacgccaucgacgagaucaccaacaaggugaacagcgugaucgagaagaugaacacccaguucaccgccgugggcaaggaguucaaccaccuggagaagagaaucgagaaccugaacaagaagguggacgacggcuuccuggacaucuggaccuacaacgccgagcugcuggugcugcuggagaacgagagaacccuggacuaccacgacagcaacgugaagaaccuguacgagaaggugagaagccagcugaagaacaacgccaaggagaucggcaacggcugcuucgaguucuaccacaagugcgacaacaccugcauggagagcgugaagaacggcaccuacgacuaccccaaguacagcgaggaggccaagcugaacagagaggagaucgacggcgugaagcuggagagcaccagaaucuaccagauccuggccaucuacagcaccguggccagcagccuggugcugguggugagccugggcgccaucagcuucuggaugugcagcaacggcagccugcagugcagaaucugcaucuga

SEQ ID NO: 167990 - RNA, 1701 nt, Artificial Sequence
  derived and/or modified CDS sequence (opt4) from hemagglutinin__InfluenzaA__AEW25662
augaaggccauccugguggugcugcuguacaccuucgccaccgccaacgccgacacccugugcaucggcuaccacgccaacaacagcaccgacaccguggacaccgugcuggagaagaacgugaccgugacccacagcgugaaccugcuggaggacaagcacaacggcaagcugugcaagcugagaggcguggccccccugcaccugggcaagugcaacaucgccggcuggauccugggcaaccccgagugcgagagccugagcaccgccagcagcuggagcuacaucguggagaccagcagcagcgacaacggcaccugcuaccccggcgacuucaucgacuacgaggagcugagagagcagcugagcagcgugagcagcuucgagagauucgagaucuuccccaagaccagcagcuggcccaaccacgaccccaacaagggcaucaccgccgccugcccccacgccggcgccaagagcuucuacaagaaccugaucuggcuggugaagaagggcaacagcuaccccaagcugagcaagagcuacaucaacgacaagggcaaggaggugcuggugcuguggggcauccaccaccccagcaccagcgccgaccagcagagccuguaccagaacgccgacgccuacguguucgugggcaccagcagauacagcaagaaguucaagcccgagaucgccaucagacccaaggugagagaccaggagggcagaaugaacuacuacuggacccugguggagcccggcgacaagaucaccuucgaggccaccggcaaccugguggugcccagauacgccuucgccauggagagaaacgccggcagcggcaucaucaucagcgacacccccgugcacgacugcaacaccaccugccagacccccaagggcgccaucaacaccagccugcccuuccagaacauccaccccaucaccaucggcaagugccccaaguacgugaagagcaccaagcugagacuggccaccggccugagaaacgugcccagcauccagagcagaggccuguucggcgccaucgccggcuucaucgagggcggcuggaccggcaugguggacggcugguacggcuaccaccaccagaacgagcagggcagcggcuacgccgccgaccugaagagcacccagaacgccaucgacgagaucaccaacaaggugaacagcgugaucgagaagaugaacacccaguucaccgccgugggcaaggaguucaaccaccuggagaagagaaucgagaaccugaacaagaagguggacgacggcuuccuggacaucuggaccuacaacgccgagcugcuggugcugcuggagaacgagagaacccuggacuaccacgacagcaacgugaagaaccuguacgagaaggugagaagccagcugaagaacaacgccaaggagaucggcaacggcugcuucgaguucuaccacaagugcgacaacaccugcauggagagcgugaagaacggcaccuacgacuaccccaaguacagcgaggaggccaagcugaacagagaggagaucgacggcgugaagcuggagagcaccagaaucuaccagauccuggccaucuacagcaccguggccagcagccuggugcugguggugagccugggcgccaucagcuucuggaugugcagcaacggcagccugcagugcagaaucugcaucuga

SEQ ID NO: 167991 - RNA, 1701 nt, Artificial Sequence
  derived and/or modified CDS sequence (opt4) from hemagglutinin__InfluenzaA__AEW25669
augaaggccauccugguggugcugcuguacaccuucgccaccgccaacgccgacacccugugcaucggcuaccacgccaacaacagcaccgacaccguggacaccgugcuggagaagaacgugaccgugacccacagcgugaaccugcuggaggacaagcacaacggcaagcugugcaagcugagaggcguggccccccugcaccugggcaagugcaacaucgccggcuggauccugggcaaccccgagugcgagagccugagcaccgccagcagcuggagcuacaucguggagaccagcagcagcgacaacggcaccugcuaccccggcgacuucaucgacuacgaggagcugagagagcagcugagcagcgugagcagcuucgagagauucgagaucuuccccaagaccagcagcuggcccaaccacgaccccaacaagggcgugaccgccgccugcccccacgccggcgccaagagcuucuacaagaaccugaucuggcuggugaagaagggcaacagcuaccccaagcugagcaagagcuacaucaacgacaagggcaaggaggugcuggugcuguggggcauccaccaccccagcaccagcgccgaccagcagagccuguaccagaacgccgacgccuacguguucgugggcaccagcagauacagcaagaaguucaagcccgagaucgccaucagacccaaggugagagaccaggagggcagaaugaacuacuacuggacccugguggagcccggcgacaagaucaccuucgaggccaccggcaaccugguggugcccagauacgccuucgccauggagagaaacgccggcagcggcaucaucaucagcgacacccccgugcacgacugcaacaccaccugccagacccccaagggcgccaucaacaccagccugcccuuccagaacauccaccccaucaccaucggcaagugccccaaguacgugaagagcaccaagcugagacuggccaccggccugagaaacgugcccagcauccagagcagaggccuguucggcgccaucgccggcuucaucgagggcggcuggaccggcaugguggagggcugguacggcuaccaccaccagaacgagcagggcagcggcuacgccgccgaccugaagagcacccagaacgccaucgacgagaucaccaacaaggugaacagcgugaucgagaagaugaacacccaguucaccgccgugggcaaggaguucaaccaccuggagaagagaaucgagaaccugaacaagaagguggacgacggcuuccuggacaucuggaccuacaacgccgagcugcuggugcugcuggagaacgagagaacccuggacuaccacgacagcaacgugaagaaccuguacgagaaggugagaagccagcugaagaacaacgccaaggagaucggcaacggcugcuucgaguucuaccacaagugcgacaacaccugcauggagagcgugaagaacggcaccuacgacuaccccaaguacagcgaggaggccaagcugaacagagaggagaucgacggcgugaagcuggagagcaccagaaucuaccagauccuggccaucuacagcaccguggccagcagccuggugcugguggugagccugggcgccaucagcuucuggaugugcagcaacggcagccugcagugcagaaucugcaucuga

SEQ ID NO: 167992 - RNA, 1701 nt, Artificial Sequence
  derived and/or modified CDS sequence (opt4) from hemagglutinin__InfluenzaA__AEW25678
augaaggccauccugguggugcugcuguacaccuucgccaccgccaacgccgacacccugugcaucggcuaccacgccaacaacagcaccgacaccguggacaccgugcuggagaagaacgugaccgugacccacagcgugaaccugcuggaggacaagcacaacggcaagcugugcaagcugagaggcguggccccccugcaccugggcaagugcaacaucgccggcuggauccugggcaaccccgagugcgagagccugagcaccgccagcagcuggagcuacaucguggagaccagcagcagcgacaacggcaccugcuaccccggcgacuucaucgacuacgaggagcugagagagcagcugagcagcgugagcagcuucgagaaguucgagaucuuccccaagaccagcagcuggcccaaccacgacagcaacaagggcgugaccgccgccugcccccacgccggcgccaagagcuucuacaagaaccugaucuggcuggugaagaagggcaacagcuaccccaagcugagcaagagcuacaucaacgacaagggcaaggaggugcuggugcuguggggcauccaccaccccagcaccagcgccgaccagcagagccuguaccagaacgccgacgccuacguguucgugggcaccagcagauacagcaagaaguucaagcccgagaucgccaucagacccaaggugagagaccaggagggcagaaugaacuacuacuggacccugguggagcccggcgacaagaucaccuucgaggccaccggcaaccugguggugcccagauacgccuucgccauggagagaaacgccggcagcggcaucaucaucagcgacacccccgugcacgacugcaacaccaccugccagacccccaagggcgccaucaacaccagccugcccuuccagaacauccaccccaucaccaucggcaagugccccaaguacgugaagagcaccaagcugagacuggccaccggccugagaaacgugcccagcauccagagcagaggccuguucggcgccaucgccggcuucaucgagggcggcuggaccggcaugguggacggcugguacggcuaccaccaccagaacgagcagggcagcggcuacgccgccgaccugaagagcacccagaacgccaucgacgagaucaccaacaaggugaacagcgugaucgagaagaugaacacccaguucaccgccgugggcaaggaguucaaccaccuggagaagagaaucgagaaccugaacaagaagguggacgacggcuuccuggacaucuggaccuacaacgccgagcugcuggugcugcuggagaacgagagaacccuggacuaccacgacagcaacgugaagaaccuguacgagaaggugagaagccagcugaagaacaacgccaaggagaucggcaacggcugcuucgaguucuaccacaagugcgacaacaccugcauggagagcgugaagaacggcaccuacgacuaccccaaguacagcgaggaggccaagcugaacagagaggagaucgacggcgugaagcuggagagcaccagaaucuaccagauccuggccaucuacagcaccguggccagcagccuggugcugguggugagccugagagccaucagcuucuggaugugcagcaacggcagccugcagugcagaaucugcaucuga

SEQ ID NO: 167993 - RNA, 1701 nt, Artificial Sequence
  derived and/or modified CDS sequence (opt4) from hemagglutinin__InfluenzaA__AEW25687
augaaggccauccugguggugcugcuguacaccuucgccaccgccaacgccgacacccugugcaucggcuaccacgccaacaacagcaccgacaccguggacaccgugcuggagaagaacgugaccgugacccacagcgugaaccugcuggaggacaagcacaacggcaagcugugcaagcugagaggcguggccccccugcaccugggcaagugcaacaucgccggcuggauccugggcaaccccgagugcgagagccugagcaccgccagcagcuggagcuacaucguggagaccagcagcagcgacaacggcaccugcuaccccggcgacuucaucgacuacgaggagcugagagagcagcugagcagcgugagcagcuucgagagauucgagaucuuccccaagaccagcagcuggcccaaccacgaccccaacaagggcgugaccgccgccugccccuacgccggcgccaagagcuucuacaagaaccugaucuggcuggugaagaagggcaacagcuaccccaagcugagcaagagcuacaucaacgacaagggcaaggaggugcuggugcuguggggcauccaccaccccagcaccagcgccgaccagcagagccuguaccagaacgccgacgccuacguguucgugggcaccagcagauacagcaagaaguucaagcccgagaucgccaucagacccaaggugagagaccaggagggcagaaugaacuacuacuggacccugguggagcccggcgacaagaucaccuucgaggccaccggcaaccugguggugcccagauacgccuucgccauggagagaaacgccggcagcggcaucaucaucagcgacacccccgugcacgacugcaacaccaccugccagacccccaagggcgccaucaacaccagccugcccuuccagaacauccaccccaucaccaucggcaagugccccaaguacgugaagagcaccaagcugagacuggccaccggccugagaaacgugcccagcauccagagcagaggccuguucggcgccaucgccggcuucaucgagggcggcuggaccggcaugguggacggcugguacggcuaccaccaccagaacgagcagggcagcggcuacgccgccgaccugaagagcacccagaacgccaucgacaagaucaccaacaaggugaacagcgugaucgagaagaugaacacccaguucaccgccgugggcaaggaguucaaccaccuggagaagagaaucgagaaccugaacaagaagguggacgacggcuuccuggacaucuggaccuacaacgccgagcugcuggugcugcuggagaacgagagaacccuggacuaccacgacagcaacgugaagaaccuguacgagaaggugagaagccagcugaagaacaacgccaaggagaucggcaacggcugcuucgaguucuaccacaagugcgacaacaccugcauggagagcgugaagaacggcaccuacgacuaccccaaguacagcgaggaggccaagcugaacagagaggagaucgacggcgugaagcuggagagcaccagaaucuaccagauccuggccaucuacagcaccguggccagcagccuggugcugguggugagccugggcgccaucagcuucuggaugugcagcaacggcagccugcagugcagaaucugcaucuga

SEQ ID NO: 167994 - RNA, 1701 nt, Artificial Sequence; identical to SEQ ID NO: 167963
  derived and/or modified CDS sequence (opt4) from hemagglutinin__InfluenzaA__AEW25696

SEQ ID NO: 167995 - RNA, 1701 nt, Artificial Sequence; identical to SEQ ID NO: 163527
  derived and/or modified CDS sequence (opt4) from hemagglutinin__InfluenzaA__AEW25706

SEQ ID NO: 167996 - RNA, 1695 nt, Artificial Sequence
  derived and/or modified CDS sequence (opt4) from hemagglutinin__InfluenzaA__AEW91908
auggagaagaucgugcugcuguucgccaccaucagccuggugaagagcgaccacaucugcaucggcuaccacgccaacaacagcaccgagcagguggacaccaucauggagaagaacgugaccgugacccacgcccaggacauccuggagaagacccacaacggcaagcugugcgaccugaacggcgugaagccccugauccugaaggacugcagcguggccggcuggcugcugggcaaccccaugugcgacgaguucaucaacgugcccgaguggagcuacaucguggagaaggccaaccccgccaacgaccugugcuaccccggcaacuucaacgacuacgaggagcugaagcaccugcugagcagaaucaaccacuucgagaagauccagaucauccccaagaacagcuggagcgaccacgaggccagccugggcgugagcgccgccugccccuaccagggcaagagcagcuucuucagaaacgugguguggcugaucaagaaggacaacgccuaccccaccaucaagaagggcuacaacaacaccaaccaggaggaccugcuggugcuguggggcauccaccaccccaacgacgaggccgagcagaccagacuguaccagaaccccaccaccuacaucagcaucggcaccagcacccugaaccagagacuggugcccaagaucgccaccagaagcaagaucaacggccagagcggcagaaucgacuucuucuggaccauccugaagcccaacgacgccauccacuucgagagcaacggcaacuucaucgcccccgaguacgccuacaagaucgugaagaagggcgacagcaccaucaugaagagcgagguggaguacggcaacugcaacaccagaugccagacccccaucggcgccaucaacagcagcaugcccuuccacaacauccacccccugaccaucggcgagugccccaaguacgugaagagcaacaagcuggugcuggccaccggccugagaaacagcccccagggcgagaccagaggccuguucggcgccaucgccggcuucaucgagggcggcuggcagggcaugguggacggcugguacggcuaccaccacagcaacgagcagggcagcggcuacgccgccgacaaggagagcacccagaaggccaucgacggcgugaccaacaaggugaacagcaucaucgacaagaugaacacccaguucgaggccgugggcagagaguucaacaaccuggagagaagaaucgagaaccugaacaagaagauggaggacggcuuccuggacguguggaccuacaacgccgagcugcuggugcugauggagaacgagagaacccuggacuuccacgacagcaacgugagaaaccuguacgacaaggugagacugcagcugaaggacaacgccaaggagcugggcaacggcugcuucgaguucuaccacaagugcgacaacgagugcauggagagcgugagaaacggcaccuacgacuacccccaguacagcgaggaggccagacugaagagagaggagaucagcggcgugaagcuggagagcaucggcaucuaccagauccugagcaucuacagcaccguggccagcagccuggugcuggccaucaugauggccggccugagccuguggaugugcagcaacggcagccugcagugcagaaucugcaucuga

SEQ ID NO: 167997 - RNA, 1701 nt, Artificial Sequence
  derived and/or modified CDS sequence (opt4) from hemagglutinin__InfluenzaA__AEX09175
augaaggccauccugguggugcugcuguacaccuucgccaccgccaacgccgacacccugugcaucggcuaccacgccaacaacagcaccgacaccguggacaccgugcuggagaagaacguggccgugacccacagcgugaaccugcuggaggacaagcacaacggcaagcugugcaagcugagaggcguggccccccugcaccugggcaagugcaacaucgccggcuggauccugggcaaccccgagugcgagagccugagcaccgccagcagcuggagcuacaucguggagaccagcagcagcgacaacggcaccugcuaccccggcgacuucaucgacuacgaggagcugagagagcagcugagcagcgugagcagcuucgagagauucgagaucuuccccaagaccagcagcuggcccaaccacgacagcaacaagggcgugaccgccgccugcccccacgccggcgccaagagcuucuacaagaaccugaucuggcuggugaagaagggcaacagcuaccccaagcugagcaagagcuacaucaacgacaagggcaaggaggugcuggugcuguggggcauccaccaccccagcaccagcgccgaccagcagagccuguaccagaacgccgacgccuacguguucgugggcaccagcagauacagcaagaaguucaagcccgagaucgccaucagacccaaggugagagacagagagggcagaaugaacuacuacuggacccugguggagcccggcgacaagaucaccuucgaggccaccggcaaccugguggugcccagauacgccuucgccauggagagaaacgccggcagcggcaucaucaucagcgacacccccgugcacgacugcaacaccaccugccagacccccaagggcgccaucaacaccagccugcccuuccagaacauccaccccaucaccaucggcaagugccccaaguacgugaagagcaccaagcugagacuggccaccggccugagaaacgugcccagcauccagagcagaggccuguucggcgccaucgccggcuucaucgagggcggcuggaccggcaugguggacggcugguacggcuaccaccaccagaacgagcagggcagcggcuacgccgccgaccugaagagcacccagaacgccaucgacgagaucaccaacaaggugaacagcgugaucgagaagaugaacacccaguucaccgccgugggcaaggaguucaaccaccuggagaagagaaucgagaaccugaacaagaagguggacgacggcuuccuggacaucuggaccuacaacgccgagcugcuggugcugcuggagaacgagagaacccuggacuaccacgacagcaacgugaagaaccuguacgagaaggugagaagccagcugaagaacaacgccaaggagaucggcaacggcugcuucgaguucuaccacaagugcgacaacaccugcauggagagcgugaagaacggcaccuacgacuaccccaaguacagcgaggaggccaagcugaacagagaggagaucgacggcgugaagcuggagagcaccagaaucuaccagauccuggccaucuacagcaccguggccagcagccuggugcugguggugagccugggcgccaucagcuucuggaugugcagcaacggcagccugcagugcagaaucugcaucuga

SEQ ID NO: 167998 - RNA, 1701 nt, Artificial Sequence; identical to SEQ ID NO: 162729
  derived and/or modified CDS sequence (opt4) from hemagglutinin__InfluenzaA__AEX25795

SEQ ID NO: 167999 - RNA, 1701 nt, Artificial Sequence
  derived and/or modified CDS sequence (opt4) from hemagglutinin__InfluenzaA__AEX25797
auggaggccauccugguggugcugcuguacaccuucgccaccgccaacgccgacacccugugcaucggcuaccacgccaacaacagcaccgacaccguggacaccgugcuggagaagaacgugaccgugacccacagcgugaaccugcuggaggacaagcacaacggcaagcugugcaagcugagaggcguggccccccugcaccugggcaagugcaacaucgccggcuggauccugggcaaccccgagugcgagagccugagcaccgccagcagcuggagcuacaucguggagaccagcaacagcgacaacggcaccugcuaccccggcgacuucaucgacuacgaggagcugagagagcagcugagcagcgugagcagcuucgagagauucgagaucuuccccaagaccagcagcuggcccaaccacgacagcaacaagggcgugaccgccgccugcccccacgccggcgccaagagcuucuacaagaaccugaucuggcuggugaagaagggcaacagcuaccccaagcugagcaagagcuacaucaacgacaagggcaaggaggugcuggugcuguggggcauccaccaccccagcaccagcgccgaccagcagagccuguaccagaacgccgacgccuacguguucgugggcagcagcagauacagcaagaaguucaagcccgagaucgccaucagacccaaggugagagaccaggagggcagaaugaacuacuacuggacccugguggagcccggcgacaagaucaccuucgaggccaccggcaaccugguggugcccagauacgccuucgccauggagagaaacgccggcagcggcaucaucaucagcgacacccccgugcacgacugcaacaccaccugccagacccccaagggcgccaucaacaccagccugcccuuccacaacauccaccccaucaccaucggcaagugccccaaguacgugaagagcaccaagcugagacuggccaccggccugagaaacgugcccagcauccagagcagaggccuguucggcgccaucgccggcuucaucgagggcggcuggaccggcaugguggacggcugguacggcuaccaccaccagaacgagcagggcagcggcuacgccgccgaccugaagagcacccagaacgccaucgacgagaucaccaacaaggugaacagcgugaucgagaagaugaacacccaguucaccgccgugggcaaggaguucaaccaccuggagaagagaaucgagaaccugaacaagaagguggacgacggcuuccuggacaucuggaccuacaacgccgagcugcuggugcugcuggagaacgagagaacccuggacuaccacgacagcaacgugaagaaccuguacgagaaggugagaagccagcugaagaacaacgccaaggagaucggcaacggcugcuucgaguucuaccacaagugcgacaacaccugcauggagagcgugaagaacggcaccuacgacuaccccaaguacagcgaggaggccaagcugaacagagaggagaucgacggcgugaagcuggagagcaccagaaucuaccagauccuggccaucuacagcaccguggccagcagccuggugcugguggugagccugggcgccaucagcuucuggaugugcagcaacggcagccugcagugcagaaucugcaucuga

SEQ ID NO: 168000 - RNA, 1701 nt, Artificial Sequence
  derived and/or modified CDS sequence (opt4) from hemagglutinin__InfluenzaA__AEX25798
augaaggccauccugguggugcugcuguacaccuucgccaccgccaacgccgacacccugugcaucggcuaccacgccaacaacagcaccgacaccguggacaccgugcuggagaagaacgugaccgugacccacagcgugaaccugcuggaggacaagcacaacggcaagcugugcaagcugagaggcguggccccccugcaccugggcaagugcaacaucgccggcuggauccugggcaaccccgagugcgagagccugagcaccgccagcagcuggagcuacaucguggagaccagcagcagcgacaacggcaccugcuaccccggcgacuucaucaacuacgaggagcugagagagcagcugagcagcgugagcagcuucgagagauucgagaucuuccccaagaccagcagcuggcccaaccacgacagcaacaagggcgugaccgccgccugcccccacgccggcgccaagagcuucuacaagaaccugaucuggcuggugaagaagggcaacagcuaccccaagcugagcaagagcuacaucaacgacaagggcaaggaggugcuggugcuguggggcauccaccaccccagcaccagcgccgaccagcagagccuguaccagaacgccgacgccuacguguucgugggcaccagcagauacagcaagaaguucaagcccgagaucgccaucagacccaaggugagagaccaggagggcagaaugaacuacuacuggacccugguggagcccggcgacaagaucaccuucgaggccaccggcaaccugguggugcccagauacgccuucgccauggagagaaacgccggcagcggcaucaucaucagcgacacccccgugcacgacugcaacaccaccugccagacccccaagggcgccaucaacaccagccugcccuuccacaacauccaccccaucaccaucggcaagugccccaaguacgugaagagcaccaagcugagacuggccaccggccugagaaacgugcccagcauccagagcagaggccuguucggcgccaucgccggcuucaucgagggcggcuggaccggcaugguggacggcugguacggcuaccaccaccagaacgagcagggcagcggcuacgccgccgaccugaagagcacccagaacgccaucgacgagaucaccaacaaggugaacagcgugaucgagaagaugaacacccaguucaccgccgugggcaaggaguucaaccaccuggagaagagaaucgagaaccugaacaagaagguggacgacggcuuccuggacaucuggaccuacaacgccgagcugcuggugcugcuggagaacgagagaacccuggacuaccacgacagcaacgugaagaaccuguacgagaaggugagaagccagcugaagaacaacgccaaggagaucggcaacggcugcuucgaguucuaccacaagugcgacaacaccugcauggagagcgugaagaacggcaccuacgacuaccccaaguacagcgaggaggccaagcugaacagagaggagaucgacggcgugaagcuggagagcaccagaaucuaccagauccuggccaucuacagcaccguggccagcagccuggugcugguggugagccugggcgccaucagcuucuggaugugcagcaacggcagccugcagugcagaaucugcaucuga

SEQ ID NO: 168001 - RNA, 1701 nt, Artificial Sequence; identical to SEQ ID NO: 162729
  derived and/or modified CDS sequence (opt4) from hemagglutinin__InfluenzaA__AEX25800

SEQ ID NO: 168002 - RNA, 1701 nt, Artificial Sequence; identical to SEQ ID NO: 162729
  derived and/or modified CDS sequence (opt4) from hemagglutinin__InfluenzaA__AEX25803

SEQ ID NO: 168003 - RNA, 1701 nt, Artificial Sequence; identical to SEQ ID NO: 162971
  derived and/or modified CDS sequence (opt4) from hemagglutinin__InfluenzaA__AEX25808

SEQ ID NO: 168004 - RNA, 1701 nt, Artificial Sequence; identical to SEQ ID NO: 165699
  derived and/or modified CDS sequence (opt4) from hemagglutinin__InfluenzaA__AEX25810

SEQ ID NO: 168005 - RNA, 1701 nt, Artificial Sequence
  derived and/or modified CDS sequence (opt4) from hemagglutinin__InfluenzaA__AEX25811
auggaggccauccugguggugcugcuguacaccuucgccaccgccaacgccgacacccugugcaucggcuaccacgccaacaacagcaccgacaccguggacaccgugcuggagaagaacgugaccgugacccacagcgugaaccugcuggaggacaagcacaacggcaagcugugcaagcugagaggcguggccccccugcaccugggcaagugcaacaucgccggcuggauccugggcaaccccgagugcgagagccuguucaccgccagcagcuggagcuacaucguggagaccagcagcagcgacaacggcaccugcuaccccggcgacuucaucgacuacgaggagcugagagagcagcugagcagcgugagcagcuucgagagauucgagaucuuccccaagaccagcagcuggcccaaccacgacagcaacaagggcgugaccgccgccugcccccacgccggcgccaagagcuucuacaagaaccugaucuggcuggugaagaagggcaacagcuaccccaagcugagcaagagcuacaucaacgacaagggcaaggaggugcuggugcuguggggcauccaccaccccagcaccagcgccgaccagcagagccuguaccagaacgccgacgccuacguguucgugggcagcagcagauacagcaagaaguucaagcccgagaucgccaucagacccaaggugagagaccaggagggcagaaugaacuacuacuggacccugguggagcccggcgacaagaucaccuucgaggccaccggcaaccugguggugcccagauacgccuucgccauggagagaaaggccggcagcggcaucaucaucagcgacacccccgugcacgacugcaacaccaccugccagacccccaagggcgccaucaacaccagccugcccuuccacaacauccaccccaucaccaucggcaagugccccaaguacgugaagagcaccaagcugagacuggccaccggccugagaaacgugcccagcauccagagcagaggccuguucggcgccaucgccggcuucaucgagggcggcuggaccggcaugguggacggcugguacggcuaccaccaccagaacgagcagggcagcggcuacgccgccgaccugaagagcacccagaacgccaucgacgagaucaccaacaaggugaacagcgugaucgagaagaugaacacccaguucaccgccgugggcaaggaguucaaccaccuggagaagagaaucgagaaccugaacaagaagguggacgacggcuuccuggacaucuggaccuacaacgccgagcugcuggugcugcuggagaacgagagaacccuggacuaccacgacagcaacgugaagaaccuguacgagaaggugagaagccagcugaagaacaacgccaaggagaucggcaacggcugcuucgaguucuaccacaagugcgacaacaccugcauggagagcgugaagaacggcaccuacgacuaccccaaguacagcgaggaggccaagcugaacagagaggagaucgacggcgugaagcuggagagcaccagaaucuaccagauccuggccaucuacagcaccguggccagcagccuggugcugguggugagccugggcgccaucagcuucuggaugugcagcaacggcagccugcagugcagaaucugcaucuga

SEQ ID NO: 168006 - RNA, 1701 nt, Artificial Sequence; identical to SEQ ID NO: 165699
  derived and/or modified CDS sequence (opt4) from hemagglutinin__InfluenzaA__AEX25814

SEQ ID NO: 168007 - RNA, 1701 nt, Artificial Sequence
  derived and/or modified CDS sequence (opt4) from hemagglutinin__InfluenzaA__AEX25816
augaaggccauccugguggugcugcuguacaccuucgccaccgccaacgccgacacccugugcaucggcuaccacgccaacaacagcaccgacaccguggacaccgugcuggagaagaacgugaccgugacccacagcgugaaccugcuggaggacaagcacaacggcaagcugugcaagcugagaggcguggccccccugcaccugggcaagugcaacaucgccggcuggauccugggcaaccccgagugcgagagccugagcaccgccaacagcuggagcuacaucguggagaccagcagcagcgacaacggcaccugcuaccccggcgacuucaucaacuacgaggagcugagagagcagcugagcagcgugagcagcuucgagagauucgagaucuuccccaagaccagcagcuggcccaaccacgacagcaacaagggcgugaccgccgccugcccccacgccggcgccaagagcuucuacaagaaccugaucuggcuggugaagaagggcaacagcuaccccaagcugagcaagagcuacaucaacgacaagggcaaggaggugcuggugcuguggggcauccaccaccccagcaccagcgccgaccagcagagccuguaccagaacgccgacgccuacguguucgugggcaccagcagauacagcaagaaguucaagcccgagaucgccaucagacccaaggugagagaccaggagggcagaaugaacuacuacuggacccugguggagcccggcgacaagaucaccuucgaggccaccggcaaccugguggugcccagauacgccuucgccauggagagaaacgccggcagcggcaucaucaucagcgacacccccgugcacgacugcaacaccaccugccagacccccaagggcgccaucaacaccagccugcccuuccagaacauccaccccaucaccaucggcaagugccccaaguacgugaagagcaccaagcugagacuggccaccggccugagaaacgugcccagcauccagagcagaggccuguucggcgccaucgccggcuucaucgagggcggcuggaccggcaugguggacggcugguacggcuaccaccaccagaacgagcagggcagcggcuacgccgccgaccugaagagcacccagaacgccaucgacgagaucaccaacaaggugaacagcgugaucgagaagaugaacacccaguucaccgccgugggcaaggaguucaaccaccuggagaagagaaucgagaaccugaacaagaagguggacgacggcuuccuggacaucuggaccuacaacgccgagcugcuggugcugcuggagaacgagagaacccuggacuaccacgacagcaacgugaagaaccuguacgagaaggugagaagccagcugaagaacaacgccaaggagaucggcaacggcugcuucgaguucuaccacaagugcgacaacaccugcauggagagcgugaagaacggcaccuacgacuaccccaaguacagcgaggaggccaagcugaacagagaggagaucgacggcgugaagcuggagagcaccagaaucuaccagauccuggccaucuacagcaccguggccagcagccuggugcugguggugagccugggcgccaucagcuucuggaugugcagcaacggcagccugcagugcagaaucugcaucuga

SEQ ID NO: 168008 - RNA, 1701 nt, Artificial Sequence
  derived and/or modified CDS sequence (opt4) from hemagglutinin__InfluenzaA__AEX25818
auggaggccauccugguggugcugcuguacaccuucgccaccgccaacgccgacacccugugcaucggcuaccacgccaacaacagcaccgacaccguggacaccgugcuggagaagaacgugaccgugacccacagcgugaaccugcuggaggacaagcacaacggcaagcugugcaagcugagaggcguggccccccugcaccugggcaagugcaacaucgccggcuggauccugggcaaccccgagugcgagagccugagcaccgccagcagcuggagcuacaucguggagaccagcaacagcgacaacggcaccugcuaccccggcgacuucaucgacuacgaggagcugagagagcagcugagcagcgugagcagcuucgagagauucgagaucuuccccaagaccagcagcuggcccaaccacgacagcaacaagggcgugaccgccgccugcccccacgccggcgccaagagcuucuacaagaaccugaucuggcuggugaagaagggcaacagcuaccccaagcugagcaagagcuacaucaacgacaagggcaaggaggugcuggugcuguggggcauccaccaccagagcaccagcgccgaccagcagagccuguaccagaacgccgacgccuacguguucgugggcagcagcagauacagcaagaaguucaagcccgagaucgccaucagacccaaggugagagaccaggagggcagaaugaacuacuacuggacccugguggagcccggcgacaagaucaccuucgaggccaccggcaaccugguggugcccagauacgccuucgccauggagagaaacgccggcagcggcaucaucaucagcgacacccccgugcacgacugcaacaccaccugccagacccccaagggcgccaucaacaccagccugcccuuccacaacauccaccccaucaccaucggcaagugccccaaguacgugaagagcaccaagcugagacuggccaccggccugagaaacgugcccagcauccagagcagaggccuguucggcgccaucgccggcuucaucgagggcggcuggaccggcaugguggacggcugguacggcuaccaccaccagaacgagcagggcagcggcuacgccgccgaccugaagagcacccagaacgccaucgacgagaucaccaacaaggugaacagcgugaucgagaagaugaacacccaguucaccgccgugggcaaggaguucaaccaccuggagaagagaaucgagaaccugaacaagaagguggacgacggcuuccuggacaucuggaccuacaacgccgagcugcuggugcugcuggagaacgagagaacccuggacuaccacgacagcaacgugaagaaccuguacgagaaggugagaagccagcugaagaacaacgccaaggagaucggcaacggcugcuucgaguucuaccacaagugcgacaacaccugcauggagagcgugaagaacggcaccuacgacuaccccaaguacagcgaggaggccaagcugaacagagaggagaucgacggcgugaagcuggagagcaccagaaucuaccagauccuggccaucuacagcaccguggccagcagccuggugcugguggugagccugggcgccaucagcuucuggaugugcagcaacggcagccugcagugcagaaucugcaucuga

SEQ ID NO: 168009 - RNA, 1701 nt, Artificial Sequence
  derived and/or modified CDS sequence (opt4) from hemagglutinin__InfluenzaA__AEX25824
augaaggccauccugguggugcugcuguacaccuucgccaccgccaacgccgacacccugugcaucggcuaccacgccaacaacagcaccgacaccguggacaccgugcuggagaagaacgugaccgugacccacagcgugaaccugcuggaggacaagcacaacggcaagcugugcaagcugagaggcguggccccccugcaccugggcaagugcaacaucgccggcuggauccugggcaaccccgagugcgagagccugagcaccgccagcagcuggagcuacaucguggagaccagcagcagcgacaacggcaccugcuaccccggcgacuucaucgacuacgaggagcugagagagcagcugagcagcgugagcagcuucgagagauucgagaucuuccccaagaccagcagcuggcccaaccacgacagcaacaagggcgugaccgccgccugcccccacgccggcgccaagagcuucuacaagaaccugaucuggcuggugaagaagggcaacagcuaccccaagcugagcaagagcuacaucaacgacaagggcaaggaggugcuggugcuguggggcauccaccaccccagcaccagcgccgaccagcagagccuguaccagaacgccgacgccuacguguucgugggcaccagcagauacagcaagaaguucaagcccgagaucgccaucagacccaaggugagagaccaggagggcagaaugaacuacuacuggacccugguggagcccggcgacaagaucaccuucgaggccaccggcaaccugguggugcccagauacgccuucgccauggagagaaacgccggcagcggcaucaucaucagcgacacccccgugcacgacugcaacaccaccugccagacccccaagggcgccaucaacaccagccugcccuuccagaacauccaccccaucaccaucggcaagugccccaaguacguggagagcaccaagcugagacuggccaccggccugagaaacgugcccagcauccagagcagaggccuguucggcgccaucgccggcuucaucgagggcggcuggaccggcaugguggacggcugguacggcuaccaccaccagaacgagcagggcagcggcuacgccgccgaccugaagagcacccagaacgccaucgacgagaucaccaacaaggugaacagcgugaucgagaagaugaacacccaguucaccgccgugggcaaggaguucaaccaccuggagaagagaaucgagaaccugaacaagaagguggacgacggcuuccuggacaucuggaccuacaacgccgagcugcuggugcugcuggagaacgagagaacccuggacuaccacgacagcaacgugaagaaccuguacgagaaggugagaagccagcugaagaacaacgccaaggagaucggcaacggcugcuucgaguucuaccacaagugcgacaacaccugcauggagagcgugaagaacggcaccuacgacuaccccaaguacagcgaggaggccaagcugaacagagaggagaucgacggcgugaagcuggagagcaccagaaucuaccagauccuggccaucuacagcaccguggccagcagccuggugcugguggugagccugggcgccaucagcuucuggaugugcagcaacggcagccugcagugcagaaucugcaucuga

SEQ ID NO: 168010 - RNA, 1698 nt, Artificial Sequence
  derived and/or modified CDS sequence (opt4) from hemagglutinin__InfluenzaA__AEX33420
augaaggugaagcugcuggugcugcugugcaucuucaccgccaccuacgccgacaccaucugcaucggcuaccacgccaacaacagcaccgacaccguggacaccgugcuggagaagaacgugaccgugacccacagcgugaaccugcuggaggacagccacaacggcaagcugugccugcugaagggcaucgccccccugcagcugggcaacugcagcguggccggcuggauccugggcaaccccgagugcgagcugcugaucagcaaggagagcuggagcuacaucguggagacccccaaccccgagaacggcaccugcuaccccggcuacuucgccgacuacgaggagcugagagagcagcugagcagcgugagcagcuucgagagauucgagaucuuccccaaggagagcagcuggcccaaccacaccgugaccggcgugagcgccagcugcagccacaacggcaagagcagcuucuacagaaaccugcuguggcugaccggcaagagcggccuguaccccaaccugagcaagagcuacgccaacaacaaggagaaggaggugcuggugcuguggggcgugcaccacccccccaacaucggcgaccagagagcccuguaccacaccgagaacgccuacgugagcguggugagcagccacuacagcagaagauucacccccgagaucgccaagagacccaaggugagagaccaggagggcagaaucaacuacuacuggacccugcuggagcccggcgacaccaucaucuucgaggccaacggcaaccugaucgcccccagauacgccuucgcccugagcagaggcuucggcagcggcaucaucaccagcaacgcccccauggacgagugcgacgccaagugccagaccccccagggcgccaucaacagcagccugcccuuccagaacgugcaccccgugaccaucggcgagugccccaaguacgugaagagcgccaagcugagaauggugaccggccugagaaacauccccagcauccagagcagaggccuguucggcgccaucgccggcuucaucgagggcggcuggaccggcaugguggacggcugguacggcuaccaccaccagaacgagcagggcagcggcuacgccgccgaccagaagagcacccagaacgccaucaacggcaucaccaacaaggugaacagcgugaucgagaagaugaacacccaguucaccgccgugggcaaggaguucaacaagcuggagagaagaauggagaaccugaacaagaagguggacgacggcuuccuggacaucuggaccuacaacgccgagcugcuggugcugcuggagaacgagagaacccuggacuuccacgacagcaacgugaagaaccuguacgagaaggugaagagccagcugaagaacaacgccaaggagaucggcaacggcugcuucgaguucuaccacaagugcaacgacgagugcauggagagcgugaagaacggcaccuacgacuaccccaaguacagcgaggagagcaagcugaacagagagaagaucgacggcgugaagcuggagagcaugggcguguaccagauccuggccaucuacagcaccguggccagcagccuggugcugcuggugagccugggcgccaucagcuucuggaugugcagcaacggcagccugcagugcagaaucugcaucuga

SEQ ID NO: 168011 - RNA, 1701 nt, Artificial Sequence
  derived and/or modified CDS sequence (opt4) from hemagglutinin__InfluenzaA__AEX33453
augaagaccaucaucgcccugagcuacauccugugccugguguucgcccagaagcugcccggcaacgacaacagcaccgccacccugugccugggccaccacgccgugcccaacggcaccaucgugaagaccaucaccaacgaccagaucgaggugaccaacgccaccgagcuggugcagagcagcagcaccggcggcaucugcgacagcccccaccagauccuggacggcgagaacugcacccugaucgacgcccugcugggcgacccccagugcgacggcuuccagaacaagaagugggaccuguucguggagagaagcaaggccuacagcaacugcuaccccuacgacgugcccgacuacgccagccugagaagccugguggccagcagcggcacccuggaguucaacaacgagagcuucaacuggaccggcgugacccagaacggcaccagcagcgccugcaagagaagaagcgacaagagcuucuucagcagacugaacuggcugacccaccugaaguacaaguaccccgcccugaacgugaccaugcccaacaacgagaaguucgacaagcuguacaucuggggcgugcaccaccccggcaccgacagcgaccagaucagccuguacgcccaggccagcggcagaaucaccgugagcaccaagagaagccagcagaccgugauccccaacaucggcagcagacccagagugagagacgugagcagcagaaucagcaucuacuggaccaucgugaagcccggcgacauccugcugaucaacagcaccggcaaccugaucgcccccagaggcuacuucaagaucagaagcggcaagagcagcaucaugagaagcgacgcccccaucggcaagugcaacagcgagugcaucacccccaacggcagcauccccaacgacaagcccuuccagaacgugaacagaaucaccuacggcgccugccccagauacgugaagcagaacacccugaagcuggccaccggcaugagaaacgugcccgagaagcagaccagaggcaucuucggcgccaucgccggcuucaucgagaacggcugggagggcaugguggacggcugguacggcuucagacaccagaacagcgagggcaccggccaggccgccgaccugaagagcacccaggccgccaucaaccagaucaacggcaagcugaacagacugaucggcaagaccaacgagaaguuccaccagaucgagaaggaguucagcgagguggagggcagaauccaggaccuggagaaguacguggaggacaccaagaucgaccuguggagcuacaacgccgagcugcugguggcccuggagaaccagcacaccaucgaccugaccgacagcgagaugaacaagcuguucgagagaaccaagaagcagcugagagagaacgccgaggacaugggcaacggcugcuucaagaucuaccacaagugcgacaacgccugcaucggcagcaucagaaacggcaccuacgaccacgacguguacagagacgaggcccugaacaacagauuccagaucaagggcguggagcugaagagcggcuacaaggacuggauccuguggaucagcuucgccaucagcugcuuccugcugugcguggcccugcugggcuucaucaugugggccugccagaagggcaacaucagaugcaacaucugcaucuga

SEQ ID NO: 168012 - RNA, 1701 nt, Artificial Sequence; identical to SEQ ID NO: 161855
  derived and/or modified CDS sequence (opt4) from hemagglutinin__InfluenzaA__AEX33464

SEQ ID NO: 168013 - RNA, 1701 nt, Artificial Sequence; identical to SEQ ID NO: 161855
  derived and/or modified CDS sequence (opt4) from hemagglutinin__InfluenzaA__AEX33475

SEQ ID NO: 168014 - RNA, 1701 nt, Artificial Sequence; identical to SEQ ID NO: 161855
  derived and/or modified CDS sequence (opt4) from hemagglutinin__InfluenzaA__AEX33486

SEQ ID NO: 168015 - RNA, 1701 nt, Artificial Sequence; identical to SEQ ID NO: 161855
  derived and/or modified CDS sequence (opt4) from hemagglutinin__InfluenzaA__AEX33497

SEQ ID NO: 168016 - RNA, 1701 nt, Artificial Sequence; identical to SEQ ID NO: 161855
  derived and/or modified CDS sequence (opt4) from hemagglutinin__InfluenzaA__AEX33508

SEQ ID NO: 168017 - RNA, 1701 nt, Artificial Sequence; identical to SEQ ID NO: 161855
  derived and/or modified CDS sequence (opt4) from hemagglutinin__InfluenzaA__AEX33519

SEQ ID NO: 168018 - RNA, 1701 nt, Artificial Sequence
  derived and/or modified CDS sequence (opt4) from hemagglutinin__InfluenzaA__AEX33541
augaagaccaucaucgcccugagcuacauccugugccugguguucgcccagaagcugcccggcaacgacaacagcaccgccacccugugccugggccaccacgccgugcccaacggcaccaucgugaagaccaucaccaacgaccagaucgaggugaccaacgccaccgagcuggugcagaucagcagcaccggcggcaucugcgacagcccccaccagauccuggacggcgagaacugcacccugaucgacgcccugcugggcgacccccagugcgacggcuuccagaacaagaagugggaccuguucguggagagaagcaaggccuacagcaacugcuaccccuacgacgugcccgacuacgccagccugagaagccugguggccagcagcggcacccuggaguucaacaacgagagcuucgacuggaccggcgugacccagaacggcaccagcagcagcugcaagagaagaagcaacaagagcuucuucagcagacugaacuggcugacccaccugaaguacaaguaccccgcccugaacgugaccaugcccaacaacgagaaguucgacaagcuguacaucuggggcgugcaccaccccggcaccgacagcgaccagaucagccuguacgcccaggccagcggcagaaucaccgugagcaccaagagaagccagcagaccgugauccccaacaucggcagcagacccagagugagagacgugagcagcagaaucagcaucuacuggaccaucgugaagcccggcgacauccugcugaucaacagcaccggcaaccugaucgcccccagaggcuacuucaagaucagaagcggcaagagcagcaucaugagaagcgacgcccccaucggcaagugcaacagcgagugcaucacccccaacggcagcauccccaacgacaagcccuuccagaacgugaacagaaucaccuacggcgccugccccagauacgugaagcagaacacccugaagcuggccaccggcaugagaaacgugcccgagaagcagaccagaggcaucuucggcgccaucgccggcuucaucgagaacggcugggagggcaugguggacggcugguacggcuucagacaccagaacagcgagggcaccggccaggccgccgaccugaagagcacccaggccgccaucaaccagaucaacggcaagcugaacagacugaucggcaagaccaacgagaaguuccaccagaucgagaaggaguucagcgagguggagggcagaauccaggaccuggagaaguacguggaggacaccaagaucgaccuguggagcuacaacgccgagcugcugguggcccuggagaaccagcacaccaucgaccugaccgacagcgagaugaacaagcuguucgagagaaccaagaagcagcugagagagaacgccgaggacaugggcaacggcugcuucaagaucuaccacaagugcgacaacgccugcaucggcagcaucagaaacggcaccuacgaccacgacguguacagagacgaggcccugaacaacagauuccagaucaagggcguggagcugaagagcggcuacaaggacuggauccuguggaucagcuucgccaucagcugcuuccugcugugcguggcccugcugggcuucaucaugugggccugccagaagggcaacaucagaugcaacaucugcaucuga

SEQ ID NO: 168019 - RNA, 1701 nt, Artificial Sequence
  derived and/or modified CDS sequence (opt4) from hemagglutinin__InfluenzaA__AEX33574
augaagaccaucaucgcccugagcuacauccugugccugguguucgcccagaagcugcccggcaacgacaacagcaccgccacccugugccugggccaccacgccgugcccaacggcaccaucgugaagaccaucaccaacgaccagaucgaggugaccaacgccaccgagcuggugcagagcagcagcaccggcggcaucugcgacagcccccaccagauccuggacggcgagaacugcacccugaucgacgcccugcugggcgacccccagugcgacggcuuccagaacaagaagugggaccuguucguggagagaagcaaggccuacagcaacugcuaccccuacgacgugcccgacuacgccagccugagaagccugguggccagcagcggcacccuggaguucaacaacgagagcuucaacuggaccggcgugacccagaacggcaccagcagcgccugcaagagaagaagcaacaagagcuucuucagcagacugaacuggcugacccaccugaaguucaaguaccccgcccugaacgugaccaugcccaacaacgagaaguucgacaagcuguacaucuggggcgugcaccaccccggcaccgacaacgaccagaucagccuguacgcccaggccagcggcagaaucaccgugagcaccaagagaagccagcagaccgugauccccaacaucggcagcagacccagagugagagacgugcccagcagaaucagcaucuacuggaccaucgugaagcccggcgacauccugcugaucaacagcaccggcaaccugaucgcccccagaggcuacuucaagaucagaagcggcaagagcagcaucaugagaagcgacgcccccaucggcaagugcaacagcgagugcaucacccccaacggcagcauccccaacgacaagcccuuccagaacgugaacagaaucaccuacggcgccugccccagauacgugaagcagaacacccugaagcuggccaccggcaugagaaacgugcccgagaagcagaccagaggcaucuucggcgccaucgccggcuucaucgagaacggcugggagggcaugguggacggcugguacggcuucagacaccagaacagcgagggcaccggccaggccgccgaccugaagagcacccaggccgccaucaaccagaucaacggcaagcugaacagacugaucggcaagaccaacgagaaguuccaccagaucgagaaggaguucagcgagguggagggcagaauccaggaccuggagaaguacguggaggacaccaagaucgaccuguggagcuacaacgccgagcugcugguggcccuggagaaccagcacaccaucgaccugaccgacagcgagaugaacaagcuguucgagagaaccaagaagcagcugagagagaacgccgaggacaugggcaacggcugcuucaagaucuaccacaagugcgacaacgacugcaucggcagcaucagaaacggcaccuacgaccacgacguguacagagacgaggcccugaacaacagauuccagaucaagggcguggagcugaagagcggcuacaaggacuggauccuguggaucagcuucgccaucagcugcuuccugcugugcguggcccugcugggcuucaucaugugggccugccagaagggcaacaucagaugcaacaucugcaucuga

SEQ ID NO: 168020 - RNA, 1701 nt, Artificial Sequence; identical to SEQ ID NO: 161855
  derived and/or modified CDS sequence (opt4) from hemagglutinin__InfluenzaA__AEX33585

SEQ ID NO: 168021 - RNA, 1701 nt, Artificial Sequence
  derived and/or modified CDS sequence (opt4) from hemagglutinin__InfluenzaA__AEX33596
augaagaccaucaucgcccugagcuacauccugugccugguguucgcccagaagcugcccggcaacgacaacagcaccgccacccugugccugggccaccacgccgugcccaacggcaccaucgugaagaccaucaccaacgaccagaucgaggugaccaacgccaccgagcuggugcagagcagcagcaccggcggcaucugcgacagcccccaccagauccuggacggcgagaacugcacccugaucgacgcccugcugggcgacccccagugcgacggcuuccagaacaagaagugggaccuguucguggagagaagcaaggccuacagcaacugcuaccccuacgacgugcccgacuacgccagccugagaagccugguggccagcagcggcacccuggaguucaacaacgagagcuucaacuggaccggcgugacccagaacggcaccagcagcgccugcaagagaagaagcaacaagagcuucuucagcagacugaacuggcugacccaccugaaguucaaguaccccgcccugaacgugaccaugcccaacaacgagaaguucgacaagcuguacaucuggggcgugcaccaccccggcaccgacaacgaccagaucagccuguacgcccaggccagcggcagaaucaccgugagcaccaagagaagccagcagaccgugauccccaacaucggcagcagacccagagugagagacauccccagcagaaucagcaucuacuggaccaucgugaagcccggcgacauccugcugaucaacagcaccggcaaccugaucgcccccagaggcuacuucaagaucagaagcggcaagagcagcaucaugagaagcgacgcccccaucggcaagugcaacagcgagugcaucacccccaacggcagcauccccaacgacaagcccuuccagaacgugaacagaaucaccuacggcgccugccccagauacgugaagcagaacacccugaagcuggccaccggcaugagaaacgugcccgagaagcagaccagaggcaucuucggcgccaucgccggcuucaucgagaacggcugggagggcaugguggacggcugguacggcuucagacaccagaacagcgagggcaccggccaggccgccgaccugaagagcacccaggccgccaucaaccagaucaacggcaagcugaacagacugaucggcaagaccaacgagaaguuccaccagaucgagaaggaguucagcgagguggagggcagaauccaggaccuggagaaguacguggaggacaccaagaucgaccuguggagcuacaacgccgagcugcugguggcccuggagaaccagcacaccaucgaccugaccgacagcgagaugaacaagcuguucgagagaaccaagaagcagcugagagagaacgccgaggacaugggcaacggcugcuucaagaucuaccacaagugcgacaacgccugcaucggcagcaucagaaacggcaccuacgaccacgacguguacagagacgaggcccugaacaacagauuccagaucaagggcguggagcugaagagcggcuacaaggacuggauccuguggaucagcuucgccaucagcugcuuccugcugugcguggcccugcugggcuucaucaugugggccugccagaagggcaacaucagaugcaacaucugcaucuga

SEQ ID NO: 168022 - RNA, 1701 nt, Artificial Sequence; identical to SEQ ID NO: 161855
  derived and/or modified CDS sequence (opt4) from hemagglutinin__InfluenzaA__AEX33618

SEQ ID NO: 168023 - RNA, 1701 nt, Artificial Sequence; identical to SEQ ID NO: 161855
  derived and/or modified CDS sequence (opt4) from hemagglutinin__InfluenzaA__AEX33629

SEQ ID NO: 168024 - RNA, 1701 nt, Artificial Sequence; identical to SEQ ID NO: 168021
  derived and/or modified CDS sequence (opt4) from hemagglutinin__InfluenzaA__AEX33640

SEQ ID NO: 168025 - RNA, 1701 nt, Artificial Sequence
  derived and/or modified CDS sequence (opt4) from hemagglutinin__InfluenzaA__AEX33836
augaagaccaucaucgcccugagcuacauccugugccugguguucgcccagaagcugcccggcaacgacaacagcaccgccacccugugccugggccaccacgccgugcccaacggcaccaucgugaagaccaucaccaacgaccagaucgaggugaccaacgccaccgagcuggugcagagcagcagcaccggcggcaucugcgacagcccccaccagauccuggacggcgagaacugcacccugaucgacgcccugcugggcgacccccagugcgacggcuuccagaacaagaagugggaccuguucguggagagaagcaaggccuacagcaacugcuaccccuacgacgugcccgacuacgccagccugagaagccugguggccagcagcggcacccuggaguucaacaacgagagcuucaacuggaccggcgugacccagaacggcaccagcagcgccugcaagagaagaagcaacaacagcuucuucagcagacugaacuggcugacccaccugaaguucaaguaccccgcccugaacgugaccaugcccaacaacgagaaguucgacaagcuguacaucuggggcgugcaccaccccggcaccgacaacgaccagaucuuccuguacgcccaggccagcggcagaaucaccgugagcaccaagagaagccagcagaccgugauccccaacaucggcagcagacccagagugagaaacauccccagcagaaucagcaucuacuggaccaucgugaagcccggcgacaucuuccugaucaacagcaccggcaaccugaucgcccccagaggcuacuucaagaucagaagcggcaagagcagcaucaugagaagcgacgcccccaucggcaagugcaacagcgagugcaucacccccaacggcagcauccccaacgacaagcccuuccagaacgugaacagaaucaccuacggcgccugccccagauacgugaagcagaacacccugaagcuggccaccggcaugagaaacgugcccgagaagcagaccagaggcaucuucggcgccaucgccggcuucaucgagaacggcugggagggcaugguggacggcugguacggcuucagacaccagaacagcgagggcaucggccaggccgccgaccugaagagcacccaggccgccaucaaccagaucaacggcaagcugaacagacugaucggcaagaccaacgagaaguuccaccagaucgagaaggaguucagcgagguggagggcagaauccaggaccuggagaaguacguggaggacaccaagaucgaccuguggagcuacaacgccgagcugcugguggcccuggagaaccagcacaccaucgaccugaccgacagcgagaugaacaagcuguucgagagaaccaagaagcagcugagagagaacgccgaggacaugggcaacggcugcuucaagaucuaccacaagugcgacaacgccugcaucggcagcaucagaaacggcaccuacgaccacgacguguacagagacgaggcccugaacaacagauuccagaucaagggcguggagcugaagagcggcuacaaggacuggauccuguggaucagcuucgccaucagcugcuuccugcugugcguggcccugcugggcuucaucaugugggccugccagaagggcaacaucagaugcaacaucugcaucuga

SEQ ID NO: 168026 - RNA, 1701 nt, Artificial Sequence; identical to SEQ ID NO: 160690
  derived and/or modified CDS sequence (opt4) from hemagglutinin__InfluenzaA__AEX33880

SEQ ID NO: 168027 - RNA, 1698 nt, Artificial Sequence
  derived and/or modified CDS sequence (opt4) from hemagglutinin__InfluenzaA__AEX33913
augaaggugaagcugcuggugcugcugugcaccuucaccgccaccuacgccgacaccaucugcaucggcuaccacgccaacaacagcaccgacaccguggacaccgugcuggagaagaacgugaccgugacccacagcgugaaccugcuggaggacagccacaacggcaagcugugccugcugaagggcaucgccccccugcagcugggcaacugcagcguggccggcuggauccugggcaaccccgagugcgagcugcugaucagcagagagagcuggagcuacaucguggagaagcccaaccccgagaacggcaccugcuaccccggccacuucgccgacuacgaggagcugagagagcagcugagcagcgugagcagcuucgagagauucgagaucuuccccaaggagaacagcuggcccaaccacaccaccaccggcgugagcgccagcugcagccacaacggcgagagcagcuucuacaagaaccugcuguggcugaccggcaagaacggccuguaccccaaccugagcaagagcuacgccaacaacaagaagaaggaggugcuggugcuguggggcgugcaccacccccccaacaucggcaaccagagagcccuguaccacaccgagaacgccuacgugagcguggugagcagccacuacagcagaaaguucacccccgagaucgccaagagacccaaggugagagaccaggagggcagaaucaacuacuacuggacccugcuggagcccggcgacaccaucaucuucgaggccaacggcaaccugaucgcccccagauacgccuucgcccugagcagaggcuucggcagcggcaucaucaacagcaacgcccccauggacgagugcgacgccaagugccagaccccccagggcgccaucaacagcagccugcccuuccagaacgugcaccccgugaccaucggcgagugccccaaguacgugagaagcgccaagcugagaauggugaccggccugagaaacauccccagcauccagagcagaggccuguucggcgccaucgccggcuucaucgagggcggcuggaccggcaugguggacggcugguacggcuaccaccaccagaacgagcagggcagcggcuacgccgccgaccagaagagcacccagaacgccaucaacggcaucaccaacaaggugaacagcgugaucgagaagaugaacacccaguucaccgccgugggcaaggaguucaacaagcuggagagaagaauggagaaccugaacaagaagguggacgacggcuucaucgacaucuggaccuacaacgccgagcugcuggugcugcuggagaacgagagaacccuggacuuccacgacagcaacgugaagaaccuguacgagaaggugaagagccagcugaagaacaacgccaaggagaucggcaacggcugcuucgaguucuaccacaagugcaacgacgagugcauggagagcgugaagaacggcaccuacgacuaccccaaguacagcgaggagagcaagcugaacagagagaagaucgacggcgugaaguucgagagcaugggcguguaccagauccuggccaucuacagcaccguggccagcagccuggugcugcuggugagccugggcgccaucagcuucuggaugugcagcaacggcagccugcagugcagaaucugcaucuga

SEQ ID NO: 168028 - RNA, 1698 nt, Artificial Sequence
  derived and/or modified CDS sequence (opt4) from hemagglutinin__InfluenzaA__AEX33924
augaaggugaagcugcuggugcugcugugcaccuucaccgccaccuacgccgacaccaucugcaucggcuaccacgccaacaacagcaccgacaccguggacaccgugcuggagaagaacgugaccgugacccacagcgugaaccugcuggaggacagccacaacggcaagcugugccugcugaagggcaucgccccccugcagcugggcaacugcagcguggccggcuggauccugggcaaccccgagugcgagagccugaucagcagagagagcuggagcuacaucguggagaagcccagccccgagaacggcaccugcuaccccggccacuucgccgacuacgaggagcugagagagcagcugagcagcgugagcagcuucgagagauucgagaucuuccccaaggagagcagcuggcccaaccacaccgccaccggcgugagcgccagcugcagccacaacggcaagagcagcuucuacaagaaccugcuguggcugaccggcaagaacggccuguaccccaaccugagcaagagcuacgccaacaacaaggagaaggaggugcuggugcuguggggcgugcaccacccccccaacaucggcgaccagagagcccuguaccacaccgagaacgccuacgugagcguggugagcagccacuacagcagaaaguucacccccgagaucgccaagagacccaaggugagagaccagaagggcagaaucaacuacuacuggacccugcuggagcccggcgacaccaucaucuucgaggccaacggcaaccugaucgcccccagauacgccuucgcccugagcagaggcuucggcagcggcaucaucaacagcaacgcccccauggacgagugcgacgccaagugccagaccccccagggcgccaucaacagcagccugcccuuccagaacgugcaccccgugaccaucggcgagugccccaaguacgugagaagcgccaagcugagaauggugaccggccugagaaacauccccagcauccagagcagaggccuguucggcgccaucgccggcuucaucgagggcggcuggaccggcaugguggacggcugguacggcuaccaccaccagaacgagcagggcagcggcuacgccgccgaccagaagagcacccagaacgccaucaacggcaucaccaacaaggugaacagcgugaucgagaagaugaacacccaguucaccgccgugggcaaggaguucaacaagcuggagagaagaauggagaaccugaacaagaagguggacgacggcuucaucgacaucuggaccuacaacgccgagcugcuggugcugcuggagaacgagagaacccuggacuuccacgacagcaacgugaagaaccuguacgagaaggugaagagccagcugaagaacaacgccaaggagaucggcaacggcugcuucgaguucuaccacaagugcaacgacgagugcauggagagcgugaagaacggcaccuacgacuaccccaaguacagcgaggagagcaagcugaacagagagaagaucgacggcgugaagcuggagagcaugggcguguaccagauccuggccaucuacagcaccguggccagcagccuggugcugcuggugagccugggcgccaucagcuucuggaugugcagcaacggcagccugcagugcagaaucugcaucuga

SEQ ID NO: 168029 - RNA, 1701 nt, Artificial Sequence
  derived and/or modified CDS sequence (opt4) from hemagglutinin__InfluenzaA__AEX33957
augaagaccaucaucgcccugagcuacauccugugccugguguucgcccagaagcugcccggcaucgacaacagcaccgccacccugugccugggccaccacgccgugcccaacggcaccaucgugaagaccaucaccaacgaccagguggaggugaccaacgccaccgagcuggugcagaacagcagcaccggcggcaucugcgacagcccccaccagauccuggacggcgagaacugcacccugaucgacgcccugcugggcgacccccagugcgacggcuuccagaacaagaagugggaccuguucguggagagaagcaaggccuacagcaacugcuaccccuacgacgugcccgacuacgccagccugagaagccugguggccagcagcggcacccuggaguucaacaacgagagcuucaacuggaccggcgugacccagaacggcaccagcagcgccugcaagagaggcagcaacaacagcuucuucagcagacugaacuggcugacccacagcaaguucaaguaccccgcccugaacgugaccaugcccaacaacgaggaguucgacaagcuguacaucuggggcgugcaccaccccggcaccgacaacgaccagaucuuccuguacgcccaggccagcggcagaaucaccgugagcaccaagagaagccagcagaccgugauccccaacaucggcagcagacccagagugagaaacauccccagcagaaucagcaucuacuggaccaucgugaagcccggcgacauccugcugaucaacagcaccggcaaccugaucgcccccagaggcuacuucaagaucagaagcggcaagagcagcaucaugagaagcgacgcccccaucggcaagugcaacagcgagugcaucacccccaacggcagcauccccaacgacaagcccuuccagaacgugaacagaaucaccuacggcgccugccccagauacgugaagcagaacacccugaagcuggccaccggcaugagaaacgugcccgagaagcagaccagaggcaucuucggcgccaucgccggcuucaucgagaacggcugggagggcaugguggacggcugguacggcuucagacaccagaacagcgagggcaucggccaggccgccgaccugaagagcacccaggccgccaucgaccagaucaacggcaagcugaacagacugaucggcaagaccaacgagaaguuccaccagaucgagaaggaguucagcgagguggagggcagaauccaggaccuggagaaguacguggaggacaccaagaucgaccuguggagcuacaacgccgagcugcugguggcccuggagaaccagcacaccaucgaccugaccgacagcgagaugaacaagcuguucgagaagaccaagaagcagcugagagagaacgccgaggacaugggcaacggcugcuucaagaucuaccacaagugcgacaacgccugcaucggcagcaucagaaacggcaccuacgaccacgacguguacagagacgaggcccugaacaacagauuccagaucaagggcguggagcugaagagcggcuacaaggacuggauccuguggaucagcuucgccaucagcugcuuccugcugugcguggcccugcugggcuucaucaugugggccugccagaagggcaacaucagaugcaacaucugcaucuga

SEQ ID NO: 168030 - RNA, 1701 nt, Artificial Sequence
  derived and/or modified CDS sequence (opt4) from hemagglutinin__InfluenzaA__AEX33968
augaagaccaucaucgcccugagcuacauccugugccugguguucgcccagaagcugcccggcaucgacaacagcaccgccacccugugccugggccaccacgccgugcccaacggcaccaucgugaagaccaucaccaacgaccagaucgaggugaccaacgccaccgagcuggugcagaacagcagcaccggcggcaucugcgacagcccccaccagauccuggacggcgagaacugcacccugaucgacgcccugcugggcgacccccagugcgacggcuuccagaacaagaagugggaccuguucguggagagaagcaaggccuacagcaacugcuaccccuacgacgugcccgacuacgccagccugagaagccugguggccagcagcggcacccuggaguucaacaacgagagcuucaacuggaccggcgugacccagaacggcaccagcagcgccugcaagagaggcagcaacaacagcuucuucagcagacugaacuggcugacccacagcaaguucaaguaccccgcccugaacgugaccaugcccaacaacgaggaguucgacaagcuguacaucuggggcgugcaccaccccggcaccgacaacgaccagaucuuccugcacgcccaggccagcggcagaaucaccgugagcaccaagagaagccagcagaccgugauccccaacaucggcagcagacccagagugagaaacauccccagcagaaucagcaucuacuggaccaucgugaagcccggcgacauccugcugaucaacagcaccggcaaccugaucgcccccagaggcuacuucaagaucagaagcggcaagagcagcaucaugagaagcgacgcccccaucggcaagugcaacagcgagugcaucacccccaacggcagcauccccaacgacaagcccuuccagaacgugaacagaaucaccuacggcgccugccccagauacgugaagcagaacacccugaagcuggccaccggcaugagaaacgugcccgagaagcagaccagaggcaucuucggcgccaucgccggcuucaucgagaacggcugggagggcaugguggacggcugguacggcuucagacaccagaacagcgagggcaucggccaggccgccgaccugaagagcacccaggccgccaucgaccagaucaacggcaagcugaacagacugaucggcaagaccaacgagaaguuccaccagaucgagaaggaguucagcgagguggagggcagaauccaggaccuggagaaguacguggaggacaccaagaucgaccuguggagcuacaacgccgagcugcugguggcccuggagaaccagcacaccaucgaccugaccgacagcgagaugaacaagcuguucgagaagaccaagaagcagcugagagagaacgccgaggacaugggcaacggcugcuucaagaucuaccacaagugcgacaacgccugcaucggcagcaucagaaacggcaccuacgaccacgacguguacagagacgaggcccugaacaacagauuccagaucaagggcguggagcugaagagcggcuacaaggacuggauccuguggaucagcuucgccaucagcugcuuccugcugugcguggcccugcugggcuucaucaugugggccugccagaagggcaacaucagaugcaacaucugcaucuga

SEQ ID NO: 168031 - RNA, 1701 nt, Artificial Sequence
  derived and/or modified CDS sequence (opt4) from hemagglutinin__InfluenzaA__AEX33979
augaagaccaucaucgcccugagcuacauccugugccugguguucgcccagaagcugcccggcaacgacaacagcaccgccacccugugccugggccaccacgccgugcccaacggcaccaucgugaagaccaucaccaacgaccagaucgaggugaccaacgccaccgagcuggugcagagcagcagcaccggcgagaucugcgacagcccccaccagauccuggacggcgagaacugcacccugaucgacgcccugcugggcgacccccagugcgacggcuuccagaacaagaagugggaccuguucguggagagaagcaaggccuacagcaacugcuaccccuacgacgugcccgacuacgccagccugagaagccugguggccagcagcggcacccuggaguucaacaacgagagcuucaacuggaccggcgugacccagaacggcaccagcagcgccugcaucagaagaagcaacaacagcuucuucagcagacugaacuggcugacccaccugaaguucaaguaccccgcccugaacgugaccaugcccaacaacgagaaguucgacaagcuguacaucuggggcgugcaccaccccggcaccgacaacgaccagaucuuccuguacgcccaggccagcggcagaaucaccgugagcaccaagagaagccagcagaccgugauccccaacaucggcagcagacccagagugagaaacauccccagcagaaucagcaucuacuggaccaucgugaagcccggcgacauccugcugaucaacagcaccggcaaccugaucgcccccagaggcuacuucaagaucagaagcggcaagagcagcaucaugagaagcgacgcccccaucggcaagugcaacagcgagugcaucacccccaacggcagcauccccaacgacaagcccuuccagaacgugaacagaaucaccuacggcgccugccccagauacgugaagcagaacacccugaagcuggccaccggcaugagaaacgugcccgagaagcagaccagaggcaucuucggcgccaucgccggcuucaucgagaacggcugggagggcaugguggacggcugguacggcuucagacaccagaacagcgagggcaucggccaggccgccgaccugaagagcacccaggccgccaucgaccagaucaacggcaagcugaacagacugaucggcaagaccaacgagaaguuccaccagaucgagaaggaguucagcgagguggagggcagaauccaggaccuggagaaguacguggaggacaccaagaucgaccuguggagcuacaacgccgagcugcugguggcccuggagaaccagcacaccaucgaccugaccgacagcgagaugaacaagcuguucgagaagaccaagaagcagcugagagagaacgccgaggacaugggcaacggcugcuucaagaucuaccacaagugcgacaacgccugcaucggcagcaucagaaacggcaccuacgaccacgacguguacagagacgaggcccugaacaacagauuccagaucaacggcguggagcugaagagcggcuacaaggacuggauccuguggaucagcuucgccaucagcugcuuccugcugugcguggcccugcugggcuucaucaugugggccugccagaagggcaacaucagaugcaacaucugcaucuga

SEQ ID NO: 168032 - RNA, 1701 nt, Artificial Sequence
  derived and/or modified CDS sequence (opt4) from hemagglutinin__InfluenzaA__AEX33990
augaagaccaucaucgcccugagcuacauccuguaccugguguucgcccagaagcugcccggcaacgacaacagcaccgccacccugugccugggccaccacgccgugcccaacggcaccaucgugaagaccaucaccaacgaccagaucgaggugaccaacgccaccgagcuggugcagagcagcagcaccggcgagaucugcgacagcccccaccagauccuggacggcgagaacugcacccugaucgacgcccugcugggcgacccccagugcgacggcuuccagaacaagaagugggaccuguucguggagagaagcaaggccuacagcaacugcuaccccuacgacgugcccgacuacgccagccugagaagccugguggccagcagcggcacccuggaguucaacaacgagagcuucaacuggaccggcgugacccagaacggcaccagcagcgccugcaucagaagaagcaacaacagcuucuucagcagacugaacuggcugacccaccugaaguucaaguaccccgcccugaacgugaccaugcccaacaacgagaaguucgacaagcuguacaucuggggcgugcaccaccccggcaccgacaacgaccagaucuuccuguacgcccaggccagcggcagaaucaccgugagcaccaagagaagccagcagaccgugauccccaacaucggcagcagacccagagugagaaacauccccagcagaaucagcaucuacuggaccaucgugaagcccggcgacauccugcugaucaacagcaccggcaaccugaucgcccccagaggcuacuucaagauccagagcggcaagagcagcaucaugagaagcgacgcccccaucggcaagugcaacagcgagugcaucacccccaacggcagcauccccaacgacaagcccuuccagaacgugaacagaaucaccuacggcgccugccccagauacgugaagcaggacacccugaagcuggccaccggcaugagaaacgugcccgagaagcagaccagaggcaucuucggcgccaucgccggcuucaucgagaacggcugggagggcaugguggacggcugguacggcuucagacaccagaacagcgagggcaucggccaggccgccgaccugaagagcacccaggccgccaucgaccagaucaacggcaagcugaacagacugaucggcaagaccaacgagaaguuccaccagaucgagaaggaguucagcgagguggagggcagaauccaggaccuggagaaguacguggaggacaccaagaucgaccuguggagcuacaacgccgagcugcugguggcccuggagaaccagcacaccaucgaccugaccgacagcgagaugaacaagcuguucgagaagaccaagaagcagcugagagagaacgccgaggacaugggcaacggcugcuucaagaucuaccacaagugcgacaacgccugcaucggcagcaucagaaacggcaccuacgaccacgacguguacagagacgaggcccugaacaacagauuccagaucaagagcguggagcugaagagcggcuacaaggacuggauccuguggaucagcuucgccaucagcugcuuccugcugugcguggcccugcugggcuucaucaugugggccugccagaagggcaacaucagaugcaacaucugcaucuga

SEQ ID NO: 168033 - RNA, 1701 nt, Artificial Sequence
  derived and/or modified CDS sequence (opt4) from hemagglutinin__InfluenzaA__AEX34001
augaagaccaucaucgcccugagcuacauccugugccugguguucgcccagaagcugcccggcaacgacaacagcaccgccacccugugccugggccaccacgccgugcccaacggcaccaucgugaagaccaucaccaacgaccagaucgaggugaccaacgccaccgagcuggugcagagcagcagcaccggcggcaucugcgacagcccccaccagauccuggacggcgagaacugcacccugaucgacgcccugcugggcgacccccagugcgacggcuuccagaacaagaagugggaccuguucguggagagaagcaaggccuacagcaacugcuaccccuacgacgugcccgacuacgccagccugagaagccugguggccagcagcggcacccuggaguucaacagcgagagcuucaacuggaccggcgugacccagaacggcaccagcagcgccugcaagagaagaagcaacaacagcuucuucagcagacugaacuggcugacccaccugaaguucaaguaccccgcccugaacgugaccaugcccaacaacgagaaguucgacaagcuguacaucuggggcgugcaccaccccggcaccgacaacgaccagaucuuccuguacgcccaggccagcggcagaaucaccgugagcaccaagagaagccagcagaccgugauccccaacaucggcagcagacccagagugagaaacauccccagcagaaucagcaucuacuggaccaucgugaagcccggcgacauccugcugaucaacagcaccggcaaccugaucgcccccagaggcuacuucaagaucagaagcggcaagagcagcaucaugagaagcgacgcccccaucggcaagugcaacagcgagugcaucacccccaacggcagcauccccaacgacaagcccuuccagaacgugaacagaaucaccuacggcgccugccccagauacgugaagcagaacacccugaagcuggccaccggcaugagaaacgugcccgagaagcagaccagaggcaucuucggcgccaucgccggcuucaucgagaacggcugggagggcaugguggacggcugguacggcuucagacaccagaacgccgagggcaucggccaggccgccgaccugaagagcacccaggccgccaucaaccagaucaacggcaagcugaacagacugaucggcaagaccaacgagaaguuccaccagaucgagaaggaguucagcgagguggagggcagaauccaggaccuggagaaguacguggaggacaccaagaucgaccuguggagcuacaacgccgagcugcugguggcccuggagaaccagcacaccaucgaccugaccgacagcgagaugaacaagcuguucgagagaaccaagaagcagcugagagagaacgccgaggacaugggcaacggcugcuucaagaucuaccacaagugcgacaacgccugcaucggcagcaucagaaacggcaccuacgaccacgacguguacagagacgaggcccugaacaacagauuccagaucaagggcguggagcugaagagcggcuacaaggacuggauccuguggaucagcuucgccaucagcugcuuccugcugugcguggcccugcugggcuucaucaugugggccugccagaagggcaacaucagaugcaacaucugcaucuga

SEQ ID NO: 168034 - RNA, 1701 nt, Artificial Sequence
  derived and/or modified CDS sequence (opt4) from hemagglutinin__InfluenzaA__AEX34012
augaagaccaucaucgcccugagcuacauccuguaccugguguucgcccagaagcugcccggcaacgacaacagcaccgccacccugugccugggccaccacgccgugcccaacggcaccaucgugaagaccaucaccaacgaccagaucgaggugaccaacgccaccgagcuggugcagagcagcagcaccggcgagaucugcgacagcccccaccagauccuggacggcgagaacugcacccugaucgacgcccugcugggcgacccccagugcgacggcuuccagaacaagaagugggaccuguucguggagagaagcaaggccuacagcaacugcuaccccuacgacgugcccgacuacgccagccugagaagccugguggccagcagcggcacccuggaguucaacaacgagagcuucaacuggaccggcgugacccagaacggcaccagcagcgccugcaucagaagaagcaacaacagcuucuucagcagacugaacuggcugacccaccugaaguucaaguaccccgcccugaacgugaccaugcccaacaacgagaaguucgacaagcuguacaucuggggcgugcaccaccccggcaccgacaacgaccagaucuuccuguacgcccaggccagcggcagaaucaccgugagcaccaagagaagccagcagaccgugauccccaacaucggcagcagacccagagugagaaacauccccagcagaaucagcaucuacuggaccaucgugaagcccggcgacauccugcugaucaacagcaccggcaaccugaucgcccccagaggcuacuucaagauccagagcggcaagagcagcaucaugagaagcgacgcccccaucggcaagugcaacagcgagugcaucacccccaacggcagcauccccaacgacaagcccuuccagaacgugaacagaaucaccuacggcgccugccccagauacgugaagcagaacacccugaagcuggccaccggcaugagaaacgugcccgagaagcagaccagaggcaucuucggcgccaucgccggcuucaucgagaacggcugggagggcaugguggacggcugguacggcuucagacaccagaacagcgagggcaucggccaggccgccgaccugaagagcacccaggccgccaucgaccagaucaacggcaagcugaacagacugaucggcaagaccaacgagaaguuccaccagaucgagaaggaguucagcgagguggagggcagaauccaggaccuggagaaguacguggaggacaccaagaucgaccuguggagcuacaacgccgagcugcugguggcccuggagaaccagcacaccaucgaccugaccgacagcgagaugaacaagcuguucgagaagaccaagaagcagcugagagagaacgccgaggacaugggcaacggcugcuucaagaucuaccacaagugcgacaacgccugcaucggcagcaucagaaacggcaccuacgaccacgacguguacagagacgaggcccugaacaacagauuccagaucaagggcguggagcugaagagcggcuacaaggacuggauccuguggaucagcuucgccaucagcugcuuccugcugugcguggcccugcugggcuucaucaugugggccugccagaagggcaacaucagaugcaacaucugcaucuga

SEQ ID NO: 168035 - RNA, 1701 nt, Artificial Sequence; identical to SEQ ID NO: 162494
  derived and/or modified CDS sequence (opt4) from hemagglutinin__InfluenzaA__AEX34023

SEQ ID NO: 168036 - RNA, 1701 nt, Artificial Sequence
  derived and/or modified CDS sequence (opt4) from hemagglutinin__InfluenzaA__AEX34044
augaagaccaucaucgccuucagcuacauccugugccugguguucgcccagaagcugcccggcaucgacaacagcaccgccacccugugccugggccaccacgccgugcccaacggcaccaucgugaagaccaucaccaacgaccagaucgaggugaccaacgccaccgagcuggugcagagcagcagcaccggcggcaucugcgacagcccccaccagauccuggacggcgagaacugcacccugaucgacgcccugcugggcgacccccagugcgacggcuuccagaacaagaagugggaccuguucguggagagaagcaaggccuacagcaacugcuaccccuacgacgugcccgacuacgccagccugagaagccugguggccagcagcggcacccuggaguucaacaacgagagcuucaacuggaccggcgugacccagaacggcaccagcagcgccugcaagagaggcagcaacaacagcuucuucagcagacugaacuggcugacccacagcaaguucaaguaccccgcccugaacgugaccaugcccaacaacgaggaguucgacaagcuguacaucuggggcgugcaccaccccggcaccgacaacgaccagaucuuccuguacgcccaggccagcggcagaaucaccgugagcaccaagagaagccagcagaccgugauccccaacaucggcagcagacccagagugagaaacauccccagcagaaucagcaucuacuggaccaucgugaagcccggcgacauccugcugaucaacagcaccggcaaccugaucgcccccagaggcuacuucaagaucagaagcggcaagagcagcaucaugagaagcgacgcccccaucggcaagugcaacagcgagugcaucacccccaacggcagcauccccaacgacaagcccuuccagaacgugaacagaaucaccuacggcgccugccccagauacgugaagcagaacacccugaagcuggccaccggcaugagaaacgugcccgagaagcagaccagaggcaucuucggcgccaucgccggcuucaucgagaacggcugggagggcaugguggacggcugguacggcuucagacaccagaacagcgagggcaucggccaggccgccgaccugaagagcacccaggccgccaucgaccagaucaacggcaagcugaacagacugaucggcaagaccaacgagaaguuccaccagaucgagaaggaguucagcgagguggagggcagaauccaggaccuggagaaguacguggaggacaccaagaucgaccuguggagcuacaacgccgagcugcugguggcccuggagaaccagcacaccaucgaccugaccgacagcgagaugaacaagcuguucgagaagaccaagaagcagcugagagagaacgccgaggacaugggcaacggcugcuucaagaucuaccacaagugcgacaacgccugcaucggcagcaucagaaacggcaccuacgaccacgacguguacagagacgaggcccugaacaacagauuccagaucaagggcguggagcugaagagcggcuacaaggacuggauccuguggaucagcuucgccaucagcugcuuccugcugugcguggcccugcugggcuucaucaugugggccugccagaagggcaacaucagaugcaacaucugcaucuga

SEQ ID NO: 168037 - RNA, 1701 nt, Artificial Sequence
  derived and/or modified CDS sequence (opt4) from hemagglutinin__InfluenzaA__AEX34089
augaagaccaucaucgcccugagcuacauccugugccugguguucgcccagaagcugcccggcaucgacaacagcaccgccacccugugccugggccaccacgccgugcccaacggcaccaucgugaagaccaucaccaacgaccagaucgaggugaccaacgccaccgagcuggugcagaacagcagcaccggcggcaucugcgacagcccccaccagauccuggacggcgagaacugcacccugaucgacgcccugcugggcgacccccagugcgacggcuuccagaacaagaagugggaccuguucguggagagaagcaaggccuacagcaacugcuaccccuacgacgugcccgacuacgccagccugagaagccugguggccagcagcggcacccuggaguucaacaacgagagcuucaacuggaccggcgugacccagaacggcaccagcagcgccugcaagagaggcagcagcaacagcuucuucagcagacugaacuggcugacccacagcaaguucaaguaccccgcccugaacgugaccaugcccaacaacgaggaguucgacaagcuguacaucuggggcgugcaccaccccggcaccgacaacgaccagaucuuccuguacgcccaggccagcggcagaaucaccgugagcaccaagagaagccagcagaccgugauccccaacaucggcagcagacccagagugagaaacauccccagcagaaucagcaucuacuggaccaucgugaagcccggcgacauccugcugaucaacagcaccggcaaccugaucgcccccagaggcuacuucaagaucagaagcggcaagagcagcaucaugagaagcgacgcccccaucggcaagugcaacagcgagugcaucacccccaacggcagcauccccaacgacaagcccuuccagaacgugaacagaaucaccuacggcgccugccccagauacgugaagcagaacacccugaagcuggccaccggcaugagaaacgugcccgagaagcagaccagaggcaucuucggcgccaucgccggcuucaucgagaacggcugggagggcaugguggacggcugguacggcuucagacaccagaacagcgagggcaucggccaggccgccgaccugaagagcacccaggccgccaucgaccagaucaacggcaagcugaacagacugaucggcaagaccaacgagaaguuccaccagaucgagaaggaguucagcgagguggagggcagaauccaggaccuggagaaguacguggaggacaccaagaucgaccuguggagcuacaacgccgagcugcugguggcccuggagaaccagcacaccaucgaccugaccgacagcgagaugaacaagcuguucgagaagaccaagaagcagcugagagagaacgccgaggacaugggcaacggcugcuucaagaucuaccacaagugcgacaacgccugcaucggcagcaucagaaacggcaccuacgaccacgacguguacagagacgaggcccugaacaacagauuccagaucaagggcguggagcugaagagcggcuacaaggacuggauccuguggaucagcuucgccaucagcugcuuccugcugugcguggcccugcugggcuucaucaugugggccugccagaagggcaacaucagaugcaacaucugcaucuga

SEQ ID NO: 168038 - RNA, 1701 nt, Artificial Sequence
  derived and/or modified CDS sequence (opt4) from hemagglutinin__InfluenzaA__AEX34123
augaagaccaucaucgcccugagcuacauccugugccugguguucgcccagaagcugcccggcaucgacaacagcaccgccacccugugccugggccaccacgccgugcccaacggcaccaucgugaagaccaucaccaacgaccagaucgaggugaccaacgccaccgagcuggugcagaacagcagcaccggcggcaucugcgacagcccccaccagauccuggacggcgagaacugcacccugaucgacgcccugcugggcgacccccagugcgacggcuuccagaacaagaagugggaccuguucguggagagaagcaaggccuacagcaacugcuaccccuacgacgugcccgacuacgccagccugagaagccugguggccagcagcggcacccuggaguucaacaacgagagcuucaacuggaccggcgugacccagaacggcaccagcagcgccugcaagagaggcagcaacaacagcuucuucagcagacugaacuggcugacccacagcaaguucaaguaccccgcccugaacgugaccaugcccaacaacgaggaguucgacaagcuguacaucuggggcgugcaccaccccggcaccgacaacgaccagaucuuccuguacgcccaggccagcggcagaaucaccgugagcaccaagagaagccagcagaccgugauccccaacaucggcagcagacccagagugagaaacauccccagcagaaucagcaucuacuggaccaucgugaagcccggcgacauccugcugaucaacagcaccggcaaccugaucgcccccagaggcuacuucaagaucagaagcggcaagagcagcaucaugagaagcgacgcccccaucggcaagugcaacagcgagugcaucacccccaacggcagcauccccaacgacaagcccuuccagaacgugaacagaaucaccuacggcgccugccccagauacgugaagcagaacacccugaagcuggccaccggcaugagaaacgugcccgagaagcagaccagaggcaucuucggcgccaucgccggcuucaucgagaacggcugggagggcaugguggacggcugguacggcuucagacaccagaacagcgagggcaucggccaggccgccgaccugaagagcacccaggccgccaucgaccagaucaacggcaagcugaacagacugaucggcaagaccaacgagaaguuccaccagaucgagaaggaguucagcgagguggagggcagaauccaggaccuggagaaguacguggaggacaccaagaucgaccuguggagcuacaacgccgagcugcugguggcccuggagaaccagcacaccaucgaccugaccgacagcgagaugaacaagcuguucgagaagaccaagaagcagcugagagagaacgccgaggacaugggcaacggcugcuucaagaucuaccacaagugcgacaacgccugcaucggcagcaucagaaacggcaccuacgaccacgacguguacagagacgaggcccugaacaacagauuccagaucaagggcguggagcugaagagcggcuacaaggacuggauccuguggaucagcuucgccaucagcugcuuccugcugugcguggcccugcugggcuucaucaugugggccugccagaagggcaacaucagaugcaacaucugcaucuga

SEQ ID NO: 168039 - RNA, 1701 nt, Artificial Sequence
  derived and/or modified CDS sequence (opt4) from hemagglutinin__InfluenzaA__AEX34134
augaagaccaucaucgcccugagcuacauccugugccugguguucgcccagaagcugcccggcaacgacaacagcauggccacccugugccugggccaccacgccgugcccaacggcaccaucgugaagaccaucaccaacgaccagaucgaggugaccaacgccaccgagcuggugcagagcagcagcaccggcgagaucugcgacagcccccaccagauccuggacggcgagaacugcacccugaucgacgcccugcugggcgacccccagugcgacggcuuccagaacaagaagugggaccuguucguggagagaagcaaggccuacagcaacugcuaccccuacgacgugcccgacuacgccagccugagaagccugguggccagcagcggcacccuggaguucaacaacgagagcuucaacuggaccggcgugacccagaacggcaccagcagcgccugcaucagaagaagcaacaacagcuucuucagcagacugaacuggcugacccaccugaaguucaaguaccccgcccugaacgugaccaugcccaacaacgagaaguucgacaagcuguacaucuggggcgugcaccaccccggcaccgacaacgaccagaucuuccuguacgcccaggccagcggcagaaucaccgugagcaccaagagaagccagcagaccgugauccccaacaucggcagcagacccagagugagaaacauccccagcagaaucagcaucuacuggaccaucgugaagcccggcgacauccugcugaucaacagcaccggcaaccugaucgcccccagaggcuacuucaagaucagaagcggcaagagcagcaucaugagaagcgacgcccccaucggcaagugcaacagcgagugcaucacccccaacggcagcauccccaacgacaagcccuuccagaacgugaacagaaucaccuacggcgccugccccagauacgugaagcagaacacccugaagcuggccaccggcaugagaaacgugcccgagaagcagaccagaggcaucuucggcgccaucgccggcuucaucgagaacggcugggagggcaugguggacggcugguacggcuucagacaccagaacagcgagggcaucggccaggccgccgaccugaagagcacccaggccgccaucgaccagaucaacggcaagcugaacagacugaucggcaagaccaacgagaaguuccaccagaucgagaaggaguucagcgagguggagggcagaauccaggaccuggagaaguacguggaggacaccaagaucgaccuguggagcuacaacgccgagcugcugguggcccuggagaaccagcacaccaucgaccugaccgacagcgagaugaacaagcuguucgagaagaccaagaagcagcugagagagaacgccgaggacaugggcaacggcugcuucaagaucuaccacaagugcgacaacgccugcaucggcagcaucagaaacggcaccuacgaccacgacguguacagagacgaggcccugaacaacagauuccagaucaagggcguggagcugaagagcggcuacaaggacuggauccuguggaucagcuucgccaucagcugcuuccugcugugcguggcccugcugggcuucaucaugugggccugccagaagggcaacaucagaugcaacaucugcaucuga

SEQ ID NO: 168040 - RNA, 1701 nt, Artificial Sequence; identical to SEQ ID NO: 168038
  derived and/or modified CDS sequence (opt4) from hemagglutinin__InfluenzaA__AEX34145

SEQ ID NO: 168041 - RNA, 1701 nt, Artificial Sequence
  derived and/or modified CDS sequence (opt4) from hemagglutinin__InfluenzaA__AEX34156
augaagaccaucaucgcccugagcuacauccugugccugguguucgcccagaagcugcccggcaacgacaacagcaccgccacccugugccugggccaccacgccgugcccaacggcaccaucgugaagaccaucaccaacgaccagaucgaggugaccaacgccaccgagcuggugcagagcagcagcaccggcgagaucugcggcagcccccaccagauccuggacggcgagaacugcacccugaucgacgcccugcugggcgacccccagugcgacggcuuccagaacaagaagugggaccuguucguggagagaagcaaggccuacagcaacugcuaccccuacgacgugcccgacuacgccagccugagaagccugguggccagcagcggcacccuggaguucaacaacgagagcuucaacuggaccggcgugacccagaacggcaccagcagcgccugcaucagaagaagcaacaacagcuucuucagcagacugaacuggcugacccaccugaaguucaaguaccccgcccugaacgugaccaugcccaacaacgagaaguucgacaagcuguacaucuggggcgugcaccaccccggcaccgacaacgaccagaucuuccuguacgcccaggccagcggcagaaucaccgugagcaccaagagaagccagcagaccgugauccccaacaucggcagcagacccagagugagaaacauccccagcagaaucagcaucuacuggaccaucgugaagcccggcgacauccugcugaucaacagcaccggcaaccugaucgcccccagaggcuacuucaagaucagaagcggcaagagcagcaucaugagaagcgacgcccccaucggcaagugcaacagcgagugcaucacccccaacggcagcauccccaacgacaagcccuuccagaacgugaacagaaucaccuacggcgccugccccagauacgugaagcagaacacccugaagcuggccaccggcaugagaaacgugcccgagaagcagaccagaggcaucuucggcgccaucgccggcuucaucgagaacggcugggagggcaugguggacggcugguacggcuucagacaccagaacagcgagggcaccggccaggccgccgaccugaagagcacccaggccgccaucgaccagaucaacggcaagcugaacagacugaucggcaagaccaacgagaaguuccaccagaucgagaaggaguucagcgagguggagggcagaauccaggaccuggagaaguacguggaggacaccaagaucgaccuguggagcuacaacgccgagcugcugguggcccuggagaaccagcacaccaucgaccugaccgacagcgagaugaacaagcuguucgagaagaccaagaagcagcugagagagaacgccgaggacaugggcaacggcugcuucaagaucuaccacaagugcgacaacgccugcaucggcagcaucagaaacggcaccuacgaccacgacguguacagagacgaggcccugaacaacagauuccagaucaagggcguggagcugaagagcggcuacaaggacuggauccuguggaucagcuucgccaucagcugcuuccugcugugcguggugcugcugggcuucaucaugugggccugccagaagggcaacaucagaugcaacaucugcaucuga

SEQ ID NO: 168042 - RNA, 1701 nt, Artificial Sequence; identical to SEQ ID NO: 161988
  derived and/or modified CDS sequence (opt4) from hemagglutinin__InfluenzaA__AEX34178

SEQ ID NO: 168043 - RNA, 1701 nt, Artificial Sequence
  derived and/or modified CDS sequence (opt4) from hemagglutinin__InfluenzaA__AEX34188
augaagaccaucaucgcccugagcuacauccugugccugguguucgcccagaaguuccccggcaacgacaacagcaccgccacccugugccugggccaccacgccgugcccaacggcaccaucgugaagaccaucaccaacgaccagaucgaggugaccaacgccaccgagcuggugcagagcagcagcaccggcgagaucugcgacagcccccaccagauccuggacggcgagaacugcacccugaucgacgcccugcugggcgacccccagugcgacggcuuccagaacaagaacugggaccuguucguggagagaagcaaggccuacagcaacugcuaccccuacgacgugcccgacuacgccagccugagaagccugguggccagcagcggcacccuggaguucaacaacgagagcuucaacuggaccggcgugacccagaacggcaccagcagcgccugcaucagaagaagcaacaacagcuucuucagcagacugaacuggcugacccaccugaaguucaaguaccccgcccugaacgugaccaugcccaacaacgagaacuucgacaagcuguacaucuggggcgugcaccaccccggcaccgacaacgaccagaucuuccuguacgcccaggccagcggcagaaucaccgugagcaccaagagaagccagcagaccgugauccccaacaucggcagcagacccagagugagaaacauccccagcagaaucagcaucuacuggaccaucgugaagcccggcgacauccugcugaucaacagcaccggcaaccugaucgcccccagaggcuacuucaagaucagaagcggcaagagcagcaucaugagaagcgacgcccccaucggcaagugcaacagcgagugcaucacccccaacggcagcauccccaacgacaagcccuuccagaacgugaacagaaucaccuacggcgccugccccagauacgugaagcagaacacccugaagcuggccaccggcaugagaaacgugcccgagaagcagaccagaggcaucuucggcgccaucgccggcuucaucgagaacggcugggagggcaugguggacggcugguacggcuucagacaccagaacagcgagggcaucggccaggccgccgaccugaagagcacccaggccgccaucgaccagaucaacggcaagcugaacagacugaucggcaagaccaacgagaaguuccaccagaucgagaaggaguucagcgagguggagggcagaauccaggaccuggagaaguacguggaggacaccaagaucgaccuguggagcuacaacgccgagcugcugguggcccuggagaaccagcacaccaucgaccugaccgacagcgagaugaacaagcuguucgagaagaccaagaagcagcugagagagaacgccgaggacaugggcaacggcugcuucaagaucuaccacaagugcgacaacgccugcaucggcagcaucagaaacggcaccuacgaccacgacguguacagagacgaggcccugaacaacagauuccagaucaagggcguggagcugaagagcggcuacaaggacuggauccuguggaucagcuucgccaucagcugcuuccugcugugcaucgcccugcugggcuucaucaugugggccugccagaagggcaacaucagaugcaacaucugcaucuga

SEQ ID NO: 168044 - RNA, 1701 nt, Artificial Sequence; identical to SEQ ID NO: 162494
  derived and/or modified CDS sequence (opt4) from hemagglutinin__InfluenzaA__AEX34199

SEQ ID NO: 168045 - RNA, 1701 nt, Artificial Sequence
  derived and/or modified CDS sequence (opt4) from hemagglutinin__InfluenzaA__AEX34221
augaagaccaucaucgcccugagcuacauccugugccugguguucgcccagaagcugcccggcaucgacaacagcaccgccacccugugccugggccaccacgccgugcccaacggcaccaucgugaagaccaucaccaacgaccagaucgaggugaccaacgccaccgagcuggugcagagcagcagcaccggcggcaucugcgacagcccccaccagauccuggacggcgagaacugcacccugaucgacgcccugcugggcgacccccagugcgacggcuuccagaacaagaagugggaccuguucguggagagaagcaaggccuacagcaacugcuaccccuacgacgugcccgacuacgccagccugagaagccugguggccagcagcggcacccuggaguucaacaacgagagcuucaacuggaccggcgugacccagaacggcaccagcagcgccugcaagagaggcagcaacaacagcuucuucagcagacugaacuggcugacccacagcaaguucaaguaccccgcccugaacgugaccaugcccaacaacgaggaguucgacaagcuguacaucuggggcgugcaccaccccggcaccgacaacgaccagaucuuccuguacgcccaggccagcggcagaaucaccgugagcaccaagagaagccagcagaccgugauccccaacaucggcagcagacccagagugagaaacauccccagcagaaucagcaucuacuggaccaucgugaagcccggcgacauccugcugaucaacagcaccggcaaccugaucgcccccagaggcuacuucaagaucagaagcggcaagagcagcaucaugagaagcgacgcccccaucggcaagugcgacagcgagugcaucacccccaacggcagcauccccaacgacaagcccuuccagaacgugaacagaaucaccuacggcgccugccccagauacgugaagcagaacacccugaagcuggccaccggcaugagaaacgugcccgagaagcagaccagaggcaucuucggcgccaucgccggcuucaucgagaacggcugggagggcaugguggacggcugguacggcuucagacaccagaacagcgagggcaucggccaggccgccgaccugaagagcacccaggccgccaucgaccagaucaacggcaagcugaacagacugaucggcaagaccaacgagaaguuccaccagaucgagaaggaguucagcgagguggagggcagaauccaggaccuggagaaguacguggaggacaccaagaucgaccuguggagcuacaacgccgagcugcugguggcccuggagaaccagcacaccaucgaccugaccgacagcgagaugaacaagcuguucgagaagaccaagaagcagcugagagagaacgccgaggacaugggcaacggcugcuucaagaucuaccacaagugcgacaacgccugcaucggcagcaucagaaacggcaccuacgaccacgacguguacagagacgaggcccugaacaacagauuccagaucaagggcguggagcugaagagcggcuacaaggacuggauccuguggaucagcuucgccaucagcugcuuccugcugugcguggcccugcugggcuucaucaugugggccugccagaagggcaacaucagaugcaacaucugcaucuga

SEQ ID NO: 168046 - RNA, 1701 nt, Artificial Sequence; identical to SEQ ID NO: 161988
  derived and/or modified CDS sequence (opt4) from hemagglutinin__InfluenzaA__AEX34243

SEQ ID NO: 168047 - RNA, 1701 nt, Artificial Sequence; identical to SEQ ID NO: 168043
  derived and/or modified CDS sequence (opt4) from hemagglutinin__InfluenzaA__AEX34254

SEQ ID NO: 168048 - RNA, 1701 nt, Artificial Sequence; identical to SEQ ID NO: 161988
  derived and/or modified CDS sequence (opt4) from hemagglutinin__InfluenzaA__AEX34265

SEQ ID NO: 168049 - RNA, 1701 nt, Artificial Sequence
  derived and/or modified CDS sequence (opt4) from hemagglutinin__InfluenzaA__AEX34275
augaagaccaucaucgcccugagcuacauccugugccugguguucgcccagaagcugcccggcaucgacaacagcaccgccacccugugccugggccaccacgccgugcccaacggcaccaucgugaagaccaucaccaacgaccagaucgaggugaccaacgccaccgagcuggugcagaacagcagcaccggcggcaucugcgacagcccccaccagauccuggacggcgagaacugcacccugaucgacgcccugcugggcgacccccagugcgacggcuuccagaacaagaagugggaccuguucguggagagaagcaaggccuacagcaacugcuaccccuacgacgugcccgacuacgccagccugagaagccugguggccagcagcggcacccuggaguucaacaacgagagcuucaacuggaccggcgugacccagaacggcaccagcagcgccugcaagagaggcagcaacaacagcuucuucagcagacugaacuggcugacccacagcaaguucaaguaccccgcccugaacgugaccaugcccaacaacgaggaguucgacaagcuguacaucuggggcgugcugcaccccggcaccgacaacgaccagaucuuccuguacgcccaggccagcggcagaaucaccgugagcaccaagagaagccagcagaccgugauccccaacaucggcagcagacccagagugagaaacauccccagcagaaucagcaucuacuggaccaucgugaagcccggcgacauccugcugaucaacagcaccggcaaccugaucgcccccagaggcuacuucaagaucagaagcggcaagagcagcaucaugagaagcgacgcccccaucggcaagugcaacagcgagugcaucacccccaacggcagcauccccaacgacaagcccuuccagaacgugaacagaaucaccuacggcgccugccccagauacgugaagcagaacacccugaagcuggccaccggcaugagaaacgugcccgagaagcagaccagaggcaucuucggcgccaucgccggcuucaucgagaacggcugggagggcaugguggacggcugguacggcuucagacaccagaacagcgagggcaucggccaggccgccgaccugaagagcacccaggccgccaucgaccagaucaacggcaagcugaacagacugaucggcaagaccaacgagaaguuccaccagaucgagaaggaguucagcgagguggagggcagaauccaggaccuggagaaguacguggaggacaccaagaucgaccuguggagcuacaacgccgagcugcugguggcccuggagaaccagcacaccaucgaccugaccgacagcgagaugaacaagcuguucgagaagaccaagaagcagcugagagagaacgccgaggacaugggcaacggcugcuucaagaucuaccacaagugcgacaacgccugcaucggcagcaucagaaacggcaccuacgaccacuacguguacagagacgaggcccugaacaacagauuccagaucaagggcguggagcugaagagcggcuacaaggacuggauccuguggaucagcuucgccaucagcugcuuccugcugugcguggcccugcugggcuucaucaugugggccugccagaagggcaacaucagaugcaacaucugcaucuga

SEQ ID NO: 168050 - RNA, 1698 nt, Artificial Sequence; identical to SEQ ID NO: 162548
  derived and/or modified CDS sequence (opt4) from hemagglutinin__InfluenzaA__AEX34318

SEQ ID NO: 168051 - RNA, 1698 nt, Artificial Sequence
  derived and/or modified CDS sequence (opt4) from hemagglutinin__InfluenzaA__AEX34329
augaaggugaagcugcuggugcugcugugcaccuucaccgccaccuacgccgacaccaucugcaucggcuaccacgccaacaacagcaccgacaccguggacaccgugcuggagaagaacgugaccgugacccacagcgugaaccugcuggagaacagccacaacggcaagcugugccugcugaagggcaucgccccccugcagcugggcaacugcagcguggccggcuggauccugggcaaccccgagugcgagcugcuggugagcaaggagagcuggagcuacaucguggagaagcccaaccccgagaacggcaccugcuaccccggccacuucgccgacuacgaggagcugagagagcagcugagcagcgugagcagcuucgagagauucgagaucuuccccaaggagagcagcuggcccaaccacaccgugaccggcgugagcgccagcugcagccacaacggcgagagcagcuucuacagaaaccugcuguggcugaccggcaagaacggccuguaccccaaccugagcaagagcuacgccaacaacaaggagaaggaggugcuggugcuguggggcgugcaccacccccccaacaucggcgaccagaaggcccuguaccacaccgagaacgccuacgugagcguggugagcagccacuacagcagaaaguucacccccgagaucgccaagagacccaaggugagagaccaggagggcagaaucaacuacuacuggacccugcuggagcccggcgacaccaucaucuucgaggccaacggcaaccugaucgcccccagauacgccuucgcccugagcagaggcuucggcagcggcaucaucaacagcaacgcccccauggacaagugcgacgccaagugccagaccccccagggcgccaucaacagcagccugcccuuccagaacgugcaccccgugaccaucggcgagugccccaaguacgugagaagcgccaagcugagaauggugaccggccugagaaacauccccagcauccagagcagaggccuguucggcgccaucgccggcuucaucgagggcggcuggaccggcaugguggacggcugguacggcuaccaccaccagaacgagcagggcagcggcuacgccgccgaccagaagagcacccagaacgccaucaacggcaucaccaacaaggugaacagcgugaucgagaagaugaacacccaguucaccgccgugggcaaggaguucaacaagcuggagagaagaauggagaaccugaacaagaagguggacgacggcuucaucgacaucuggaccuacaacgccgagcugcuggugcugcuggagaacgagagaacccuggacuuccacgacagcaacgugaagaaccuguacgagaaggugaagagccagcugaagaacaacgccaaggagaucggcaacggcugcuucgaguucuaccacaagugcaacgacgagugcauggagagcgugaagaacggcaccuacgacuaccccaaguacagcgaggagagcaagcugaacagagagaagaucgagggcgugaagcuggagagcaugggcguguaccagauccuggccaucuacagcaccguggccagcagccuggugcugcuggugagccugggcgccaucagcuucuggaugugcagcaacggcagccugcagugcagaaucugcaucuga

SEQ ID NO: 168052 - RNA, 1701 nt, Artificial Sequence
  derived and/or modified CDS sequence (opt4) from hemagglutinin__InfluenzaA__AEX34352
augaagaccaucaucgcccugagcuacauccugugccugguguucgcccagaagcugcccggcaacgacaacagcaccgccacccugugccugggccaccacgccgugcccaacggcaccaucgugaagaccaucaccaacgaccagaucgaggugaccaacgccaccgagcuggugcagagcagcagcaccggcgagaucugcgacagcccccaccagauccuggacggcgagaacugcacccugaucgacgcccugcugggcgacccccagugcgacggcuuccagaacaagaagugggaccuguucguggagagaagcaaggccuacagcaacugcuaccccuacgacgugcccgacuacgccagccugagaagccugguggccagcagcggcacccuggaguucaacaacgagagcuucaacuggaccggcgugacccagaacggcaccagcagcgccugcaucagaagaagcaacaacagcuucuucagcagacugaacuggcugacccaccugaaguucaaguaccccgcccugaacgugaccaugcccaacaacgagaaguucgacaagcuguacaucuggggcgugcaccaccccggcaccgacaacgaccagaucuuccuguacgcccaggccagcggcagaaucaccgugagcaccaagagaagccagcagaccgugauccccaacaucggcagcagacccagagugagaaacauccccagcagaaucagcaucuacuggaccaucgugaagcccggcgacauccugcugaucaacagcaccggcaaccugaucgcccccagaggcuacuucaagaucagaagcggcaagagcagcaucaugagaagcgacgcccccaucggcaagugcaacagcgagugcaucacccccaacggcagcauccugaacgacaagcccuuccagaacgugaacagaaucaccuacggcgccugccccagauacgugaagcagaacacccugaagcuggccaccggcaugagaaacgugcccgagaagcagaccagaggcaucuucggcgccaucgccggcuucaucgagaacggcugggagggcaugguggacggcugguacggcuucagacaccagaacagcgagggcaucggccaggccgccgaccugaagagcacccaggccgccaucgaccagaucaacggcaagcugaacagacugaucggcaagaccaacgagaaguuccaccagaucgagaaggaguucagcgagguggagggcagaauccaggaccuggagaaguacguggaggacaccaagaucgaccuguggagcuacaacgccgagcugcugguggcccuggagaaccagcacaccaucgaccugaccgacagcgagaugaacaagcuguucgagaagaccaagaagcagcugagagagaacgccgaggacaugggcaacggcugcuucaagaucuaccacaagugcgacaacgccugcaucggcagcaucagaaacggcaccuacgaccacgacguguacagagacgaggcccugaacaacagauuccagaucaagggcguggagcugaagagcggcuacaaggacuggauccuguggaucagcuucgccaucagcugcuuccugcugugcguggcccugcugggcuucaucaugugggccugccagaagggcaacaucagaugcaacaucugcaucuga

SEQ ID NO: 168053 - RNA, 1701 nt, Artificial Sequence; identical to SEQ ID NO: 162494
  derived and/or modified CDS sequence (opt4) from hemagglutinin__InfluenzaA__AEX34364

SEQ ID NO: 168054 - RNA, 1701 nt, Artificial Sequence; identical to SEQ ID NO: 162494
  derived and/or modified CDS sequence (opt4) from hemagglutinin__InfluenzaA__AEX34375

SEQ ID NO: 168055 - RNA, 1701 nt, Artificial Sequence
  derived and/or modified CDS sequence (opt4) from hemagglutinin__InfluenzaA__AEX34386
augaagaccaucaucgcccugagcuacauccugugccugguguucgcccagaagcugcccggcaacgacaacagcaccgccacccugugccugggccaccacgccgugcccaacggcaccaucgugaagaccaucaccaacgaccagaucgaggugaccaacgccaccgagcuggugcagagcagcagcaccggcgagaucugcgacagcccccaccagauccuggacggcgagaacugcacccugaucgacgcccugcugggcgacccccagugcgacggcuuccagaacaagaagugggaccuguucaucgagagaagcaaggccuacagcaacugcuaccccuacgacgugcccgacuacgccagccugagaagccugguggccagcagcggcacccuggaguucaacaacgagagcuucaacuggaccggcgugacccagaacggcaccagcagcgccugcaucagaagaagcaacaacagcuucuucagcagacugaacuggcugacccaccugaaguucaaguaccccgcccugaacgugaccaugcccaacaacgagcaguucgacaagcuguacaucuggggcgugcaccaccccggcaccgacaacgaccagaucuuccuguacgcccaggccagcggcagaaucaccgugagcaccaagagaagccagcagaccgugauccccaacaucggcagcagacccagagugagaaacauccccagcagaaucagcaucuacuggaccaucgugaagcccggcgacauccugcugaucaacagcaccggcaaccugaucgcccccagaggcuacuucaagaucagaagcggcaagagcagcaucaugagaagcgacgcccccaucggcaagugcaacagcgagugcaucacccccaacggcagcauccccaacgacaagcccuuccagaacgugaacagaaucaccuacggcgccugccccagauacgugaagcagaacacccugaagcuggccaccggcaugagaaacgugcccgagaagcagaccagaggcaucuucggcgccaucgccggcuucaucgagaacggcugggagggcaugguggacggcugguacggcuucagacaccagaacagcgagggcagaggccaggccgccgaccugaagagcacccaggccgccaucgaccagaucaacggcaagcugaacagacugaucggcaagaccaacgagaaguuccaccagaucgagaaggaguucagcgagguggagggcagaauccaggaccuggagaaguacguggaggacaccaagaucgaccuguggagcuacaacgccgagcugcugguggcccuggagaaccagcacaccaucgaccugaccgacagcgagaugaacaagcuguucgagaagaccaagaagcagcugagagagaacgccgaggacaugggcaacggcugcuucaagaucuaccacaagugcgacaacgccugcaucggcagcaucagaaacggcaccuacgaccacgacguguacagagacgaggcccugaacaacagauuccagaucaagggcguggagcugaagagcggcuacaaggacuggauccuguggaucagcuucgccaucagcugcuuccugcugugcguggcccugcugggcuucaucaugugggccugccagaagggcaacaucagaugcaacaucugcaucuga

SEQ ID NO: 168056 - RNA, 1701 nt, Artificial Sequence
  derived and/or modified CDS sequence (opt4) from hemagglutinin__InfluenzaA__AEX34407
augaagaccaucaucgcccugagcuacauccugugccugguguucgcccagaagcugcccggcaacgacaacagcauggccacccugugccugggccaccacgccgugcccaacggcaccaucgugaagaccaucaccaacgaccagaucgaggugaccaacgccaccgagcuggugcagagcagcagcaccggcgagaucugcgacagcccccaccagauccuggacggcgagaacugcacccugaucgacgcccugcugggcgacccccagugcgacggcuuccagaacaagaagugggaccuguucguggagagaagcaaggccuacagcaacugcuaccccuacgacgugcccgacuacgccagccugagaagccugguggccagcagcggcacccuggaguucaacaacgagagcuucaacuggaccggcgugacccagaacggcaccagcagcgccugcaucagaagaagcaacaacagcuucuucagcagacugaacuggcugacccaccugaaguucaaguaccccgcccugaacgugaccaugcccaacaacgagcaguucgacaagcuguacaucuggggcgugcaccaccccggcaccgacaacgaccagaucuuccuguacgcccaggccagcggcagaaucaccgugagcaccaagagaagccagcagaccgugauccccaacaucggcagcagacccagagugagaaacauccccagcagaaucagcaucuacuggaccaucgugaagcccggcgacauccugcugaucaacagcaccggcaaccugaucgcccccagaggcuacuucaagauccugagcggcaagagcagcaucaugagaagcgacgcccccaucggcaagugcaacagcgagugcaucacccccaacggcagcauccccaacgacaagcccuuccagaacgugaacagaaucaccuacggcgccugccccagauacgugaagcagaacacccugaagcuggccaccggcaugagaaacgugcccgagaagcagaccagaggcaucuucggcgccaucgccggcuucaucgagaacggcugggagggcaugguggacggcugguacggcuucagacaccagaacagcgagggcagaggccaggccgccgaccugaagagcacccaggccgccaucgaccagaucaacggcaagcugaacagacugaucggcaagaccaacgagaaguuccaccagaucgagaaggaguucagcgagguggagggcagaauccaggaccuggagaaguacguggaggacaccaagguggaccuguggagcuacaacgccgagcugcugguggcccuggagaaccagcacaccaucgaccugaccgacagcgagaugaacaagcuguucgagaagaccaagaagcagcugagagagaacgccgaggacaugggcaacggcugcuucaagaucuaccacaagugcgacaacgccugcaucggcagcaucagaaacggcaccuacgaccacgacguguacagagacgaggcccugaacaacagauuccagaucaagggcguggagcugaagagcggcuacaaggacuggauccuguggaucagcuucgccaucagcugcuuccugcugugcguggcccugcugggcuucaucaugugggccugccagaagggcaacaucagaugcaacaucugcaucuga

SEQ ID NO: 168057 - RNA, 1698 nt, Artificial Sequence
  derived and/or modified CDS sequence (opt4) from hemagglutinin__InfluenzaA__AEX34440
augaaggugaagcugcuggugcugcugugcaccuucaccgccaccuacgccgacaccaucugcaucggcuaccacgccaacaacagcaccgacaccguggacaccgugcuggagaagaacgugaccgugacccacagcgugaaccugcuggaggacagccacaacggcaagcugugccugcugaagggcaucgccccccugcagcugggcaacugcagcguggccggcuggauccugggcaaccccgagugcgagcugcugaccagcagagagagcuggagcuacaucguggagaagcccaaccccgagaacggcaccugcuaccccggccacuucgccgacuacgaggagcugagagagcagcugagcagcgugagcagcuucgagagauucgagaucuuccccaaggagagcagcuggcccaaccacaccaccaccggcgugagcgccagcugcagccacaacggcgagagcagcuucuacaagaaccugcuguggcugaccggcaagaacggccuguaccccaaccugagcaagagcuacgccaacaacaaggagaaggaggugcuggugcuguggggcgugcaccacccccccaacaucggcaaccagagagcccuguaccacaccgagaacgccuacgugagcguggugagcagccacuacagcagaaaguucacccccgagaucgccaagagacccaaggugagagaccaggagggcagaaucaacuacuacuggacccugcuggagcccggcgacaccaucaucuucgaggccaacggcaaccugaucgcccccagauacgccuucgcccugagcagaggcuucggcagcggcaucaucaacagcaacgcccccauggacgagugcgacgccaagugccagaccccccagggcgccaucaacagcagccugcccuuccagaacgugcaccccgugaccaucggcgagugccccaaguacgugagaagcgccaagcugagaauggugaccggccugagaaacauccccagcauccagagcagaggccuguucggcgccaucgccggcuucaucgagggcggcuggaccggcaugguggacggcugguacggcuaccaccaccagaacgagcagggcagcggcuacgccgccgaccagaagagcacccagaacgccaucaacggcaucaccaacaaggugaacagcgugaucgagaagaugaacacccaguucaccgccgugggcaaggaguucaacaagcuggagagaagaauggagaaccugaacaagaagguggacgacggcuucaucgacaucuggaccuacaacgccgagcugcuggugcugcuggagaacgagagaacccuggacuuccacgacagcaacgugaagaaccuguacgagaaggugaagagccagcugaagaacaacgccaaggagaucggcaacggcugcuucgaguucuaccacaagugcaacgacgagugcauggagagcgugaagaacggcaccuacgacuaccccaaguacagcgaggagagcaagcugaacagagagaagaucgacggcgugaagcuggagagcaugggcguguaccagauccuggccaucuacagcaccguggccagcagccuggugcugcuggugagccugggcgccaucagcuucuggaugugcagcaacggcagccugcagugcagaaucugcaucuga

SEQ ID NO: 168058 - RNA, 1698 nt, Artificial Sequence; identical to SEQ ID NO: 160359
  derived and/or modified CDS sequence (opt4) from hemagglutinin__InfluenzaA__AEX34462

SEQ ID NO: 168059 - RNA, 1698 nt, Artificial Sequence
  derived and/or modified CDS sequence (opt4) from hemagglutinin__InfluenzaA__AEX34473
augaaggugaagcugcuggugcugcugugcaccuucaccgccaccuacgccgacaccaucugcaucggcuaccacgccaacaacagcaccgacaccguggacaccgugcuggagaagaacgugaccgugacccacagcgugaaccugcuggaggacagccacaacggcaagcugugccugcugaagggcaucgccccccugcagcugggcaacugcagcguggccggcuggauccugggcaaccccgagugcgagcugcugaucagcaaggagagcuggagcuacaucguggagacccccaaccccgagaacggcaccugcuaccccggcuacuucgccgacuacgaggagcugagagagcagcugagcagcgugagcagcuucgagagauucgagaucuuccccaaggagagcagcuggcccaaccacaccgugaccggcgugagcgccagcugcagccacaacggcaagagcagcuucuacagaaaccugcuguggcugaccggcaagagcggccuguaccccaaccugagcaagagcuacgccaacaacaaggagaaggaggugcuggugcuguggggcgugcaccacccccccaacaucggcgaccagagagcccuguaccacaccgagaacgccuacgugagcguggugagcagccacuacagcagaagauucacccccgagaucgccaagagacccaaggugagagaccaggagggcagaaucaacuacuacuggacccugcuggagcccggcgacaccaucaucuucgaggccaacggcaaccugaucgcccccagauacgccuucgcccugagcagaggcuucggcagcggcaucaucaccagcaacgcccccauggacgagugcgacgccaagugccagaccccccagggcgccaucaacagcagccugcccuuccagaacgugcaccccgugaccaucggcgagugccccaaguacgugaagagcgccaagcugagaauggugaccggccugagaaacauccccagcauccagagcagaggccuguucggcgccaucgccggcuucaucgagggcggcuggaccggcaugguggacggcugguacggcuaccaccaccagaacgagcagggcagcggcuacgccgccgaccagaagagcacccagagcgccaucaacggcaucaccaacaaggugaacagcgugaucgagaagaugaacacccaguucaccgccgugggcaaggaguucaacaagcuggagagaagaauggagaaccugaacaagaagguggacgacggcuuccuggacaucuggaccuacaacgccgagcugcuggugcugcuggagaacgagagaacccuggacuuccacgacagcaacgugaagaaccuguacgagaaggugaagagccagcugaagaacaacgccaaggagaucggcaacggcugcuucgaguucuaccacaagugcaacgacgagugcauggagagcgugaagaacggcaccuacgacuaccccaaguacagcgaggagagcaagcugaacagagagaagaucgacggcgugaagcuggagagcaugggcguguaccagauccuggccaucuacagcaccguggccagcagccuggugcugcuggugagccugggcgccaucagcuucuggaugugcagcaacggcagccugcagugcagaaucugcaucuga

SEQ ID NO: 168060 - RNA, 1698 nt, Artificial Sequence
  derived and/or modified CDS sequence (opt4) from hemagglutinin__InfluenzaA__AEX34495
augaaggugaagcugcuggugcugcugugcaucuucaccgccaccuacgccgacaccaucugcaucggcuaccacgccaacaacagcaccgacaccguggacaccgugcuggagaagaacgugaccgugacccacagcgugaaccugcuggaggacagccacaacggcaagcugugccugcugaagggcaucgccccccugcagcugggcaacugcagcguggccggcuggauccugggcaaccccgagugcgagcugcugaucagcaaggagagcuggagcuacaucguggagacccccaaccccgagaacggcaccugcuaccccggcuacuucgccgacuacgaggagcugagagagcagcugagcagcgugagcagcuucgagagauucgagaucuuccccaaggagagcagcuggcccaaccacaccgugaccggcgugagcgccagcugcagccacaacggcaagagcagcuucuacagaaaccugcuguggcugaccggcaagagcggccuguaccccaaccugagcaagagcuacgccaacaacaaggagaaggaggugcuggugcuguggggcgugcaccacccccccaacaucggcgugcagagagcccuguaccacaccgagaacgccuacgugagcguggugagcagccacuacagcagaagauucacccccgagaucgccaagagacccaaggugagagaccaggagggcagaaucaacuacuacuggacccugcuggagcccggcgacaccaucaucuucgaggccaacggcaaccugaucgcccccagauacgccuucgcccugagcagaggcuucggcagcggcaucaucaccagcaacgcccccauggacgagugcgacgccaagugccagaccccccagggcgccaucaacagcagccugcccuuccagaacgugcaccccgugaccaucggcgagugccccaaguacgugaagagcgccaagcugagaauggugaccggccugagaaacauccccagcauccagagcagaggccuguucggcgccaucgccggcuucaucgagggcggcuggaccggcaugguggacggcugguacggcuaccaccaccagaacgagcagggcagcggcuacgccgccgaccagaagagcacccagaacgccaucaacggcaucaccaacaaggugaacagcgugaucgagaagaugaacacccaguucaccgccgugggcaaggaguucaacaagcuggagagaagaauggagaaccugaacaagaagguggacgacggcuuccuggacaucuggaccuacaacgccgagcugcuggugcugcuggagaacgagagaacccuggacuuccacgacagcaacgugaagaaccuguacgagaaggugaagagccagcugaagaacaacgccaaggagaucggcaacggcugcuucgaguucuaccacaagugcaacgacgagugcauggagagcgugaagaacggcaccuacgacuaccccaaguacagcgaggagagcaagcugaacagagagaagaucgacggcgugaagcuggagagcaugggcguguaccagauccuggccaucuacagcaccguggccagcagccuggugcugcuggugagccugggcgccaucagcuucuggaugugcagcaacggcagccugcagugcagaaucugcaucuga

SEQ ID NO: 168061 - RNA, 1698 nt, Artificial Sequence; identical to SEQ ID NO: 168060
  derived and/or modified CDS sequence (opt4) from hemagglutinin__InfluenzaA__AEX34506

SEQ ID NO: 168062 - RNA, 1698 nt, Artificial Sequence; identical to SEQ ID NO: 168060
  derived and/or modified CDS sequence (opt4) from hemagglutinin__InfluenzaA__AEX34517

SEQ ID NO: 168063 - RNA, 1698 nt, Artificial Sequence; identical to SEQ ID NO: 168060
  derived and/or modified CDS sequence (opt4) from hemagglutinin__InfluenzaA__AEX34528

SEQ ID NO: 168064 - RNA, 1698 nt, Artificial Sequence; identical to SEQ ID NO: 168060
  derived and/or modified CDS sequence (opt4) from hemagglutinin__InfluenzaA__AEX34539

SEQ ID NO: 168065 - RNA, 1698 nt, Artificial Sequence; identical to SEQ ID NO: 168060
  derived and/or modified CDS sequence (opt4) from hemagglutinin__InfluenzaA__AEX34550

SEQ ID NO: 168066 - RNA, 1698 nt, Artificial Sequence; identical to SEQ ID NO: 168060
  derived and/or modified CDS sequence (opt4) from hemagglutinin__InfluenzaA__AEX34561

SEQ ID NO: 168067 - RNA, 1698 nt, Artificial Sequence; identical to SEQ ID NO: 168060
  derived and/or modified CDS sequence (opt4) from hemagglutinin__InfluenzaA__AEX34572

SEQ ID NO: 168068 - RNA, 1698 nt, Artificial Sequence; identical to SEQ ID NO: 168060
  derived and/or modified CDS sequence (opt4) from hemagglutinin__InfluenzaA__AEX34583

SEQ ID NO: 168069 - RNA, 1698 nt, Artificial Sequence; identical to SEQ ID NO: 168060
  derived and/or modified CDS sequence (opt4) from hemagglutinin__InfluenzaA__AEX34594

SEQ ID NO: 168070 - RNA, 1698 nt, Artificial Sequence; identical to SEQ ID NO: 168060
  derived and/or modified CDS sequence (opt4) from hemagglutinin__InfluenzaA__AEX34605

SEQ ID NO: 168071 - RNA, 1698 nt, Artificial Sequence; identical to SEQ ID NO: 168060
  derived and/or modified CDS sequence (opt4) from hemagglutinin__InfluenzaA__AEX34616

SEQ ID NO: 168072 - RNA, 1698 nt, Artificial Sequence; identical to SEQ ID NO: 168060
  derived and/or modified CDS sequence (opt4) from hemagglutinin__InfluenzaA__AEX34627

SEQ ID NO: 168073 - RNA, 1698 nt, Artificial Sequence; identical to SEQ ID NO: 168060
  derived and/or modified CDS sequence (opt4) from hemagglutinin__InfluenzaA__AEX34638

SEQ ID NO: 168074 - RNA, 1698 nt, Artificial Sequence
  derived and/or modified CDS sequence (opt4) from hemagglutinin__InfluenzaA__AEX34650
augaaggugaagcugcuggugcugcugugcaccuucaccgccaccuacgccgacaccaucugcaucggcuaccacgccaacaacagcaccgacaccguggacaccgugcuggagaagaacgugaccgugacccacagcgugaaccugcuggaggacagccacaacggcaagcugugccugcugaagggcaucgccccccugcagcugggcaacugcagcguggccggcuggauccugggcaaccccgagugcgagcugcugaucagcaaggagagcuggagcuacaucguggagacccccaaccccgagaacggcaccugcuaccccggcuacuucgccgacuacgaggagcugagagagcagcugagcagcgugagcagcuucgagagauucgagaucuuccccaaggagagcagcuggcccaaccacaccgugaccggcgugagcgccagcugcagccacaacggcaagagcagcuucuacagaaaccugcuguggcugaccggcaagaacggccuguaccccaaccugagcaagagcuacgccaacaacaaggagaaggaggugcuggugcuguggggcgugcaccacccccccaacaucggcaaccagagaagccuguaccacaccgagaacgccuacgugagcguggugagcagccacuacagcagaagauucacccccgagaucgccaagagacccaaggugagagaccaggagggcagaaucaacuacuacuggacccugcuggagcccggcgacaccaucaucuucgaggccaacggcaaccugaucgcccccagauucgccuucgcccugagcagaggcuucggcagcggcaucaucaccagcaacgcccccauggacgagugcgacgccaagugccagaccccccagggcgccaucaacagcagccugcccuuccagaacgugcaccccgugaccaucggcgagugccccaaguacgugagaagcgccaagcugagaauggugaccggccugagaaacauccccagcauccagagcagaggccuguucggcgccaucgccggcuucaucgagggcggcuggaccggcaugguggacggcugguacggcuaccaccaccagaacgagcagggcagcggcuacgccgccgaccagaagagcacccagaacgccaucaacggcaucaccaacaaggugaacagcgugaucgagaagaugaacacccaguucaccgccgugggcaaggaguucaacaagcuggagagaagaauggagaaccugaacaagaagguggacgacggcuuccuggacaucuggaccuacaacgccgagcugcuggugcugcuggagaacgagagaacccuggacuuccacgacagcaacgugaagaaccuguacgagaaggugaagagccagcugaagaacaacgccaaggagaucggcaacggcugcuucgaguucuaccacaagugcaacgacgagugcauggagagcgugaagaacggcaccuacgacuaccccaaguacagcgaggagagcaagcugaacagagagaagaucgacggcgugaagcuggagagcaugggcguguaccagauccuggccaucuacagcaccguggccagcagccuggugcugcuggugagccugggcgccaucagcuucuggaugugcagcaacggcagccugcagugcagaaucugcaucuga

SEQ ID NO: 168075 - RNA, 1698 nt, Artificial Sequence
  derived and/or modified CDS sequence (opt4) from hemagglutinin__InfluenzaA__AEX34661
augaaggugaagcugcuggugcugcugugcaccuucaccgccaccuacgccgacaccaucugcaucggcuaccacgccaacaacagcaccgacaccguggacaccgugcuggagaagaacgugaccgugacccacagcgugaaccugcuggaggacagccacaacggcaagcugugccugcugaagggcaucgccccccugcagcugggcaacugcagcguggccggcuggauccugggcaaccccgagugcgagcugcugaucagcaaggagagcuggagcuacaucguggagacccccaaccccgagaacggcaccugcuaccccggcuacuucgccgacuacgaggagcugagagagcagcugagcagcgugagcagcuucgagagauucgagaucuuccccaaggagagcagcuggcccaaccacaccgugaccggcgugagcgccagcugcagccacaacggcaagagcagcuucuacagaaaccugcuguggcugaccggcaagaagggccuguaccccaaccugagcaagagcuacgccaacaacaaggagaaggaggugcuggugcuguggggcgugcaccacccccccaacaucggcgaccagagagcccuguaccacaccgagaacgccuacgugagcguggugagcagccacuacagcagaagauucacccccgagaucgccaagagacccaaggugagagaccaggagggcagaaucaacuacuacuggacccugcuggagcccggcgacaccaucaucuucgaggccaacggcaaccugaucgcccccagauucgccuucgcccugagcagaggcuucggcagcggcaucaucaccagcaacgcccccauggacgagugcgacgccaagugccagaccccccagggcgccaucaacagcagccugcccuuccagaacgugcaccccgugaccaucggcgagugccccaaguacgugagaagcgccaagcugagaauggccaccggccugagaaacauccccagcauccagagcagaggccuguucggcgccaucgccggcuucaucgagggcggcuggaccggcaugguggacggcugguacggcuaccaccaccagaacgagcagggcagcggcuacgccgccgaccagaagagcacccagaacgccaucaacggcaucaccaagaaggugaacagcgugaucgagaagaugaacacccaguucaccgccgugggcaaggaguucagcaagcuggagagaagaauggagaaccugaacaagaagguggacgacggcuuccuggacaucuggaccuacaacgccgagcugcuggugcugcuggagaacgagagaacccuggacuuccacgacagcaacgugaagaaccuguacgagaaggugaagagccagcugaagaacaacgccaaggagaucggcaacggcugcuucgaguucuaccacaagugcaacgacgagugcauggagagcgugaagaacggcaccuacgacuaccccaaguacagcgaggagagcaagcugaacagagagaagaucgacggcgugaagcuggagagcaugggcguguaccagauccuggccaucuacagcaccguggccagcagccuggugcugcuggugagccugggcgccaucagcuucuggaugugcagcaacggcagccugcagugcagaaucugcaucuga

SEQ ID NO: 168076 - RNA, 1698 nt, Artificial Sequence
  derived and/or modified CDS sequence (opt4) from hemagglutinin__InfluenzaA__AEX34672
augaaggugaagcugcuggugcugcugugcaccuucaccgccaccuacgccgacaccaucugcaucggcuaccacgccaacaacagcaccgacaccguggacaccgugcuggacaagaacgugaccgugacccacagcgugaaccugcuggaggacagccacaacggcaagcugugccugcugaagggcaucgccccccugcagcugggcaacugcagcguggccggcuggauccugggcaaccccgagugcgagcugcugaucagcagagagagcuggagcuacaucguggagaagcccaaccccgagaacggcaccugcuaccccggccacuucgccgacuacgaggagcugagagagcagcugagcagcgugagcagcuucgagagauucgagaucuuccccaaggagagcagcuggcccaaccacaccaccaccggcgugagcgccagcugcagccacgacggcgagagcagcuucuacaagaaccugcuguggcugaccggcaagaacggccuguaccccaaccugagcaagagcuacgccaacaacaaggagaaggaggugcuggugcuguggggcgugcaccacccccccaacaucggcgugcagagagcccuguaccacaccgagaacgccuacgugagcguggugagcagccacuacagcagaaaguucacccccgagaucgccaagagacccaaggugagagaccaggagggcagaaucaacuacuacuggacccugcuggagcccggcgacaccaucaucuucgaggccaacggcaaccugaucgcccccagauacgccuucgcccugagcagaggcuucggcagcggcaucaucaacagcaacgcccccauggacgagugcgacgccaagugccagaccccccagggcgccaucaacagcagccugcccuuccagaacgugcaccccgugaccaucggcgagugccccaaguacgugagaagcgccaagcugagaauggugaccggccugagaaacauccccagcauccagagcagaggccuguucggcgccaucgccggcuucaucgagggcggcuggaccggcaugguggacggcugguacggcuaccaccaccagaacgagcagggcagcggcuacgccgccgaccagaagagcacccagaacgccaucaacggcaucaccaacaaggugaacagcgugaucgagaagaugaacacccaguucaccgccgugggcaaggaguucaacaagcuggagagaagaauggagaaccugaacaagaagguggacgacggcuucaucgacaucuggaccuacaacgccgagcugcuggugcugcuggagaacgagagaacccuggacuuccacgacagcaacgugaagaaccuguacgagaaggugaagagccagcugaagaacaacgccaaggagaucggcaacggcugcuucgaguucuaccacaagugcaacgacgagugcauggagagcgugaagaacggcaccuacgacuaccccaaguacagcgaggagagcaagcugaacagagagaagaucgacggcgugaagcuggagagcaugggcguguaccagauccuggccaucuacagcaccguggccagcagccuggugcugcuggugagccugggcgccaucagcuucuggaugugcagcaacggcagccugcagugcagaaucugcaucuga

SEQ ID NO: 168077 - RNA, 1698 nt, Artificial Sequence
  derived and/or modified CDS sequence (opt4) from hemagglutinin__InfluenzaA__AEX34683
augaaggugaagcugcuggugcugcugugcaccuucaccgccaccuacgccgacaccaucugcaucggcuaccacgccaacaacagcaccgacaccguggacaccgugcuggagaagaacgugaccgugacccacagcgugaaccugcuggaggacagccacaacggcaagcugugccugcugaagggcaucgccccccugcagcugggcaacugcagcguggccggcuggauccugggcaaccccgagugcgagcugcugaucagcagagagagcuggagcuacaucguggagaagcccaaccccgagaacggcaccugcuaccccggccacuucgccgacuacgaggagcugagagagcagcugagcagcgugagcagcuucgagagauucgagaucuuccccaaggagagcagcuggcccuaccacaccaccaccggcgugagcgccagcugcagccacaacggcgagagcagcuucuacaagaaccugcuguggcugaccggcaagaacggccuguaccccaaccugagcaagagcuacgccaacaacaaggagaaggaggugcuggugcuguggggcgugcaccacccccccaacaucggcgaccagagagcccuguaccacaccgagaacgccuacgugagcguggugagcagccacuacagcagaaaguucacccccgagaucgccaagagacccaaggugagagaccaggagggcagaaucaacuacuacuggacccugcuggagcccggcgacaccaucaucuucgaggccaacggcaaccugaucgcccccagauacgccuucgcccugagcagaggcuucggcagcggcaucaucaacagcaacgcccccauggacgagugcgacgccaagugccagaccccccagggcgccaucaacagcagccugcccuuccagaacgugcaccccgugaccaucggcgagugccccaaguacgugagaagcgccaagcugagaauggugaccggccugagaaacauccccagcauccagagcagaggccuguucggcgccaucgccggcuucaucgagggcggcuggaccggcaugguggacggcugguacggcuaccaccaccagaacgagcagggcuucggcuacgccgccgaccagaagagcacccagaacgccaucaacggcaucaccaacaaggugaacagcgugaucgagaagaugaacacccaguucaccgccgugggcaaggaguucaacaagcuggagagaagaauggagaaccugaacaagaagguggacgacggcuucaucgacaucuggaccuacaacgccgagcugcuggugcugcuggagaacgagagaacccuggacuuccacgacagcaacgugaagaaccuguacgagaaggugaagagccagcugaagaacaacgccaaggagaucggcaacggcugcuucgaguucuaccacaagugcaacgacgagugcauggagagcgugaagaacggcaccuacgacuaccccaaguacagcgaggagagcaagcugaacagagagaagaucgacggcgugaagcuggagagcaugggcguguaccagauccuggccaucuacagcaccguggccagcagccuggugcugcuggugagccugggcgccaucagcuucuggaugugcagcaacggcagccugcagugcagaaucugcaucuga

SEQ ID NO: 168078 - RNA, 1698 nt, Artificial Sequence
  derived and/or modified CDS sequence (opt4) from hemagglutinin__InfluenzaA__AEX34757
augaaggugaagcugcuggugcugcugugcaccuucaccgccaccuacgccgacaccaucugcaucggcuaccacgccaacaacagcaccgacaccguggacaccgugcuggagaagaacgugaccgugacccacagcgugaaccugcuggaggacagccacaacggcaagcugugccugcugaagggcaucgccccccugcagcugggcaacugcagcguggccggcuggauccugggcaaccccgagugcgagcugcugaucagcagagagagcuggagcuacaucguggagaagcccaaccccgagaacggcaccugcuaccccggccacuucgccgacuacgaggagcugagagagcagcugagcagcgugagcagcuucgagagauucgagaucuuccccaaggagagcagcuggcccaaccacaccaccaccggcgugagcgccagcugcagccacaacggcggcagcagcuucuacaagaaccugcuguggcugaccagaaagaacggccuguaccccaaccugagcaagagcuacgccaacaacaaggagaaggaggugcuggugcuguggggcgugcaccacccccccaacaucggcgaccagagagcccuguaccacaccgagaacgccuacgugagcguggugagcagccacuacagcagaaaguucacccccgagaucgccaagagacccaaggugagagaccaggagggcagaaucaacuacuacuggacccugcuggagcccggcgacaccaucaucuucgaggccaacggcaaccugaucgcccccagauacgccuucgcccugagcagaggcuucggcagcggcaucaucaacagcaacgcccccauggacgagugcgacgccaagugccagaccccccagggcgccaucaacagcagccugcccuuccagaacgugcaccccgugaccaucggcgagugccccaaguacgugagaagcgccaagcugagaauggugaccggccugagaaacauccccagcauccagagcagaggccuguucggcgccaucgccggcuucaucgagggcggcuggaccggcaugguggacggcugguacggcuaccaccaccagaacgagcagggcagcggcuacgccgccgaccagaagagcacccagaacgccaucaacggcaucaccaacaaggugaacagcgugaucgagaagaugaacacccaguucaccgccgugggcaaggaguucaacaagcuggagagaagaauggagaaccugaacaagaagguggacgacggcuucaucgacaucuggaccuacaacgccgagcugcuggugcugcuggagaacgagagaacccuggacuuccacgacagcaacgugaagaaccuguacgagaaggugaagagccagcugaagaacaacgccaaggagaucggcaacggcugcuucgaguucuaccacaagugcaacgacgagugcauggagagcgugaagaacggcaccuacgacuaccccaaguacagcgaggagagcaagcugaacagagagaagaucgacggcgugaagcuggagagcaugggcguguaccagauccuggccaucuacagcaccguggccagcagccuggugcugcuggugagccugggcgccaucagcuucuggaugugcagcaacggcagccugcagugcagaaucugcaucuga

SEQ ID NO: 168079 - RNA, 1698 nt, Artificial Sequence
  derived and/or modified CDS sequence (opt4) from hemagglutinin__InfluenzaA__AEX34768
augaaggugaagcugcuggugcugcugugcaccuucaccgccaccuacgccgacaccaucugcaucggcuaccacgccaacaacagcaccgacaccguggacaccgugcuggagaagaacgugaccgugacccacagcgugaaccugcuggaggacagccacaacggcaagcugugccugcugaagggcaucgccccccugcagcugggcaacugcagcguggccggcuggauccugggcaaccccgagugcgagcugcugaucagcagagagagcuggagcuacaucguggagaagcccaaccccgagaacggcaccugcuaccccggccacuucgccgacuacgaggagcugagagagcagcugagcagcgugagcagcuucgagagauucgagaucuuccccaaggacagcagcuggcccaaccacaccaccaccggcgugagcgccagcugcagccacaacggcgagagcagcuucuacaagaaccugcuguggcugaccggcaagaacggccuguaccccaaccugagcaagagcuacgccaacaacaaggagaaggaggugcuggugcuguggggcgugcaccacccccccaacaucggcgaccagagagcccuguaccacaccgagaacgccuacgugagcguggugagcagccacuacagcagaaaguucacccccgagaucgccaagagacccaaggugagagaccagggcggcagaaucaacuacuacuggacccugcuggagcccggcgacaccaucaucuucgaggccaacggcaaccugaucgcccccagauacgccuucgcccugagcagaggcuucggcagcggcaucaucaacagcaacgcccccauggacgagugcgacgccaagugccagaccccccagggcgccaucaacagcagccugcccuuccagaacgugcaccccgugaccaucggcgagugccccaaguacgugagaagcgccaagcugagaauggugaccggccugagaaacauccccagcauccagagcagaggccuguucggcgccaucgccggcuucaucgagggcggcuggaccggcaugguggacggcugguacggcuaccaccaccagaacgagcagggcagcggcuacgccgccgaccagaagagcacccagaacgccaucaacggcaucaccaacaaggugaacagcgugaucgagaagaugaacacccaguucaccgccgugggcaaggaguucaacaagcuggagagaagaauggagaaccugaacaagaagguggacgacggcuucaucgacaucuggaccuacaacgccgagcugcuggugcugcuggagaacgagagaacccuggacuuccacgacagcaacgugaagaaccuguacgagaaggugaagagccagcugaagaacaacgccaaggagaucggcaacggcugcuucgaguucuaccacaagugcaacgacgagugcauggagagcgugaagaacggcaccuacgacuaccccaaguacagcgaggagagcaagcugaacagagagaagaucgacggcgugaagcuggagagcaugggcguguaccagauccuggccaucuacagcaccguggccagcagccuggugcugcuggugagccugggcgccaucagcuucuggaugugcagcaacggcagccugcagugcagaaucugcaucuga

SEQ ID NO: 168080 - RNA, 1698 nt, Artificial Sequence
  derived and/or modified CDS sequence (opt4) from hemagglutinin__InfluenzaA__AEX34779
augaaggugaagcugcuggugcugcugugcaccuucaccgccaccuacgccgacaccaucugcaucggcuaccacgccaacaacagcaccgacaccguggacaccgugcuggagaagaacgugaccgugacccacagcgugaaccugcuggagaacagccacaacggcaagcugugccugcugaagggcaucgccccccugcagcugggcaacugcagcguggccggcuggauccugggcaaccccgagugcgagcugcugaucagcaaggagagcuggagcuacaucguggagaagcccaaccccgagaacggcaccugcuaccccggccacuucgccgacuacgaggagcugagagagcagcugagcagcgugagcagcuucgagagauucgagaucuuccccaaggagagcagcuggcccaaccacaccgugaccggcgugagcgccagcugcagccacaacggcgagagaagcuucuacagaaaccugcuguggcugaccggcaagaacggccuguaccccaaccugagcaagagcuacgccaacaacaaggagaaggaggugcuggugcuguggggcgugcaccacccccccaacaucggcaaccagaaggcccuguaccacaccgagaacgccuacgugagcguggugagcagccacuacagcagaaaguucacccccgagaucgccaagagacccaaggugagagaccaggagggcagaaucaacuacuacuggacccugcuggagcccggcgacaccaucaucuucgaggccaacggcaaccugaucgcccccagauacgccuucgcccugagcagaggcuucggcagcggcaucaucaacagcaacgcccccauggacaagugcgacgccaagugccagaccccccagggcgccaucaacagcagccugcccuuccagaacgugcaccccgugaccaucggcgagugccccaaguacgugagaagcgccaagcugagaauggugaccggccugagaaacauccccagcauccagagcagaggccuguucggcgccaucgccggcuucaucgagggcggcuggaccggcaugguggacggcugguacggcuaccaccaccagaacgagcagggcagcggcuacgccgccgaccagaagagcacccagaacgccaucaacggcaucaccaacaaggugaacagcgugaucgagaagaugaacacccaguucaccgccgugggcaaggaguucaacaagcuggagagaagaauggagaaccugaacaagaagguggacgacggcuucaucgacaucuggaccuacaacgccgagcugcuggugcugcuggagaacgagagaacccuggacuuccacgacagcaacgugaagaaccuguacgagaaggugaagagccagcugaagaacaacgccaaggagaucggcaacggcugcuucgaguucuaccacaagugcaacgacgagugcauggagagcgugaagaacggcaccuacgacuaccccaaguacagcgaggagagcaagcugaacagagagaagaucgacggcgugaagcuggagagcaugggcguguaccagauccuggccaucuacagcaccguggccagcagccuggugcugcuggugagccugggcgccaucagcuucuggaugugcagcaacggcagccugcagugcagaaucugcaucuga

SEQ ID NO: 168081 - RNA, 1698 nt, Artificial Sequence; identical to SEQ ID NO: 164157
  derived and/or modified CDS sequence (opt4) from hemagglutinin__InfluenzaA__AEX34790

SEQ ID NO: 168082 - RNA, 1698 nt, Artificial Sequence
  derived and/or modified CDS sequence (opt4) from hemagglutinin__InfluenzaA__AEX34801
augaaggugaagcugcuggugcugcugugcaccuucaccgccaccuacgccgacaccaucugcaucggcuaccacgccaacaacagcaccgacaccguggacaccgugcuggagaagaacgugaccgugacccacagcgugaaccugcuggaggacaaccacaacggcaagcugugccugcugaagggcaucgccccccugcagcugggcaacugcagcguggccggcuggauccugggcaaccccgagugcgagcugcugaucagcaaggagagcuggagcuacaucguggagaagcccaaccccgagaacggcgccugcuaccccggccacuucgccgacuacgaggagcugagagagcagcugagcagcgugagcagcuucaagagauucgagaucuuccccaaggagagcagcuggcccaaccacaccgugaccggcgugagcgccagcugcagccacaacggcgagagcagcuucuacaagaaccugcuguggcugaccggcaagaacggccuguaccccaaccugagcaagagcuacgccaacaacaaggagaaggaggugcuggugcuguggggcgugcaccacccccccaacaucggcgaccagaugacccuguaccacaaggagaacgccuacgugagcguggugagcagccacuacagcagaaaguucacccccgagaucgccaagagacccaaggugagagaccaggagggcagaaucaacuacuacuggacccugcuggagcccggcgacaccaucaucuucgaggccagcggcaaccugaucgcccccagauacgccuucgcccugagcagaggcuucggcagcggcaucaucaacagcgacgcccccauggacgagugcgacgccaagugccagaccccccagggcgccaucaacagcagccugcccuuccagaacgugcaccccgugaccaucggcgagugccccaaguacgugagaagcgccaagcugagaauggugaccggccugagaaacauccccagcauccagagcagaggccuguucggcgccaucgccggcuucaucgagggcggcuggaccggcaugguggacggcugguacggcuaccaccaccagaacgagcagggcagcggcuacgccgccgaccagaagagcacccagaacgccaucaacggcaucaccaacaaggugaacagcgugaucgagaagaugaacacccaguucaccgccgugggcaaggaguucaacaagcuggagagaagaauggagaaccugaacaagaagguggacgacggcuucaucgacguguggaccuacaacgccgagcugcuggugcugcuggagaacgagagaacccuggacuuccacgacagcaacgugaagaaccuguacgagaaggugaagaaccagcugaagaacaacgccaaggagaucggcaacggcugcuucgaguucuaccacaagugcaacgacgagugcauggagagcgugaagaacggcaccuacgacuaccccaaguacagcgaggagagcaagcugagcagagagaagaucgacggcgugaagcuggagagcaugggcguguaccagauccuggccaucuacagcaccguggccagcagccuggugcugcuggugagccugggcgccaucagcuucuggaugugcagcaacggcagccugcagugcagaaucugcaucuga

SEQ ID NO: 168083 - RNA, 1698 nt, Artificial Sequence
  derived and/or modified CDS sequence (opt4) from hemagglutinin__InfluenzaA__AEX34812
augaaggugaagcugcuggugcugcugugcaccuucaccgccaccuacgccgacaccaucugcaucggcuaccacgccaacaacagcaccgacaccguggacaccgugcuggagaagaacgugaccgugacccacagcgugaaccugcuggagaacagccacaacggcaagcugugccugcugaagggcaucgccccccugcagcugggcaacugcagcguggccggcuggauccugggcaaccccgagugcgagcugcugaucagcaaggagagcuggagcuacaucguggagaagcccaaccccgagaacggcaccugcuaccccggccacuucgccgacuacgaggagcugagagagcagcugagcagcgugagcagcuucgagagauucgagaucuuccccaaggagagcagcuggcccaaccacaccgugaccggcgugagcgccagcugcagccacaacggcgagagcagcuucuacagaaaccugcuguggcugaccggcaagaacggccuguaccccaaccugagcaagagcuacgccaacaacaaggagaaggaggugcuggugcuguggggcgugcaccacccccccaacaucggcgaccagaaggcccuguaccacaccgagaacgccuacgugagcguggugagcagccacuacagcagaaaguucacccccgagaucgccaagagacccaaggugagagaccaggagggcagaaucaacuacuacuggacccugcuggagcccggcgacaccaucaucuucgaggccaacggcaaccugaucgcccccagauacgccuucgcccugagcagaggcuucggcagcggcaucaucaacagcaacgcccccauggacaagugcgacgccaagugccagaccccccagggcgccaucaacagcagccugcccuuccagaacgugcaccccgugaccaucggcgagugccccaaguacgugagaagcgccaagcugagaauggugaccggccugagaaacauccccagcauccagagcagaggccuguucggcgccaucgccggcuucaucgagggcggcuggaccggcaugguggacggcugguacggcuaccaccaccagaacgagcagggcagcggcuacgccgccgaccagaagagcacccagaacgccaucgacggcaucaccaacaaggugaacagcgugaucgagaagaugaacacccaguucaccgccgugggcaaggaguucaacaagcuggagagaagaauggagaaccugaacaagaagguggacgacggcuucaucgacaucuggaccuacaacgccgagcugcuggugcugcuggagaacgagagaacccuggacuuccacgacagcaacgugaagaaccuguacgagaaggugaagagccagcugaagaacaacgccaaggagaucggcaacggcugcuucgaguucuaccacaagugcaacgacgagugcauggagagcgugaagaacggcaccuacgacuaccccaaguacagcgaggagagcaagcugaacagagagaagaucgacggcgugaagcuggagagcaugggcguguaccagauccuggccaucuacagcaccguggccagcagccuggugcugcuggugagccugggcgccaucagcuucuggaugugcagcaacggcagccugcagugcagaaucugcaucuga

SEQ ID NO: 168084 - RNA, 1698 nt, Artificial Sequence
  derived and/or modified CDS sequence (opt4) from hemagglutinin__InfluenzaA__AEX34834
augaaggugaagcugcuggugcugcugugcaccuucaccgccaccuacgccgacaccaucugcaucggcuaccacgccaacaacagcaccgacaccguggacaccgugcuggagaagaacgugaccgugacccacagcgugaaccugcuggaggacaaccacaacggcaagcugugccugcugaagggcaucgccccccugcagcugggcaacugcagcguggccggcuggauccugggcaaccccgagugcgagcugcugaacagcaaggagagcuggagcuacaucguggagaagcccaaccccgagaacggcaccugcuaccccggccacuucgccgacuacgaggagcugagagagcagcugagcagcgugagcagcuucaagagauucgagaucuuccccaaggagagcagcuggcccaaccacaccgugaccggcgugagcgccagcugcagccacaacggcgagagcagcuucuacaagaaccugcuguggcugaccggcaagaacggccuguaccccaaccugagcaagagcuacgccaacaacaaggagaaggaggugcuggugcuguggggcgugcaccacccccccaacaucggcgaccagaugacccuguaccacaaggagaacgccuacgugagcguggugagcagccacuacagcagaaaguucacccccgagaucaccaagagacccaaggugagagaccaggagggcagaaucaacuacuacuggacccugcuggagcccggcgacaccaucaucuucgaggccagcggcaaccugaucgcccccagauacgccuucgcccugagcagaggcuucggcagcggcaucaucaacagcaacgcccccauggacgagugcgacgccaagugccagaccccccagggcgccaucaacagcagccugcccuuccagaacgugcaccccgugaccaucggcgagugccccaaguacgugagaagcgccaagcugagaauggugaccggccugagaaacauccccagcauccagagcagaggccuguucggcgccaucgccggcuucaucgagggcggcuggaccggcaugguggacggcugguacggcuaccaccaccagaacgagcagggcagcggcuacgccgccgaccagaagagcacccagaacgccaucaacggcaucaccaacaaggugaacagcgugaucgagaagaugaacacccaguucaccgccgugggcaaggaguucaacaagcuggagagaagaauggagaaccugaacaagaagguggacgacggcuucaucgacguguggaccuacaacgccgagcugcuggugcugcuggagaacgagagaacccuggacuuccacgacagcaacgugaagaaccuguacgagaaggugaagaaccagcugaagaacaacgccaaggagaucggcaacggcugcuucgaguucuaccacaagugcaacgacgagugcauggagagcgugaagaacggcaccuacgacuaccccaaguacagcgaggagagcaagcugagcagagagaagaucgacggcgugaagcuggagagcaugggcguguaccagauccuggccaucuacagcaccguggccagcagccuggugcugcuggugagccugggcgccaucagcuucuggaugugcagcaacggcagccugcagugcagaaucugcaucuga

SEQ ID NO: 168085 - RNA, 1698 nt, Artificial Sequence
  derived and/or modified CDS sequence (opt4) from hemagglutinin__InfluenzaA__AEX34845
augaaggugaagcugcuggugcugcugugcaccuucaccgccaccuacgccgacaccaucugcaucggcuaccacgccaacaacagcaccgacaccguggacaccgugcuggagaagaacgugaccgugacccacagcgugaaccugcuggagaacagccacaacggcaagcugugccugcugaagggcaucgccccccugcagcugggcaacugcagcguggccggcuggauccugggcaaccccgagugcgagcugcuggugcccaaggagagcuggagcuacaucguggagaagcccaaccccgagaacggcaccugcuaccccggccacuucgccgacuacgaggagcugagagagcagcugagcagcgugagcagcuucgagagauucgagaucuuccccaaggagagcagcuggcccaaccacaccgugaccggcgugagcgccagcugcagccacaacggcgagagcagcuucuacagaaaccugcuguggcugaccggcaagaacggccuguaccccaaccugagcaagagcuacgccaacaacaaggagaaggaggugcuggugcuguggggcgugcaccacccccccaacaucggcgaccagaaggcccuguaccacaccgagaacgccuacgugagcguggugagcagccacuacagcagaaaguucacccccgagaucgccaagagacccaaggugagagaccaggagggcagaaucaacuacuacuggacccugcuggagcccggcgacaccaucaucuucgaggccaacggcaaccugaucgcccccagauacgccuucgcccugagcagaggcuucggcagcggcaucaucaacagcaacgcccccauggacaagugcgacgccaagugccagaccccccagggcgccaucaacagcagccugcccuuccagaacgugcaccccgugaccaucggcgagugccccaaguacgugagaagcgccaagcugagaauggugaccggccugagaaacauccccagcauccagagcagaggccuguucggcgccaucgccggcuucaucgagggcggcuggaccggcaugguggacggcugguacggcuaccaccaccagaacgagcagggcagcggcuacgccgccgaccagaagagcacccagaacgccaucaacggcaucaccaacaaggugaacagcgugaucgagaagaugaacacccaguucaccgccgugggcaaggaguucaacaagcuggagagaagaauggagaaccugaacaagaagguggacgacggcuucaucgacaucuggaccuacaacgccgagcugcuggugcugcuggagaacgagagaacccuggacuuccacgacagcaacgugaagaaccuguacgagaaggugaagagccagcugaagaacaacgccaaggagaucggcaacggcugcuucgaguucuaccacaagugcaacgacgagugcauggagagcgugaagaacggcaccuacgacuaccccaaguacagcgaggagagcaagcugaacagagagaagaucgagggcgugaagcuggagagcaugggcguguaccagauccuggccaucuacagcaccguggccagcagccuggugcugcuggugagccugggcgccaucagcuucuggaugugcagcaacggcagccugcagugcagaaucugcaucuga

SEQ ID NO: 168086 - RNA, 1698 nt, Artificial Sequence; identical to SEQ ID NO: 164157
  derived and/or modified CDS sequence (opt4) from hemagglutinin__InfluenzaA__AEX34856

SEQ ID NO: 168087 - RNA, 1698 nt, Artificial Sequence
  derived and/or modified CDS sequence (opt4) from hemagglutinin__InfluenzaA__AEX34867
augaaggugaagcugcuggugcugcugugcaccuucaccgccaccuacgccgacaccaucugcaucggcuaccacgccaacaacagcaccgacaccguggacaccgugcuggagaagaacgugaccgugacccacagcgugaaccugcuggagaacagccacaacggcaagcugugccugcugaagggcaucgccccccugcagcugggcaacugcagcguggccggcuggauccugggcaaccccgagugcgagcugcuggugagcaaggagagcuggagcuacaucguggagaagcccaaccccgagaacggcaccugcuaccccggccacuucgccgacuacgaggagcugagagagcagcugaucagcgugagcagcuucgagagauucgagaucuuccccaaggagagcagcuggcccaaccacaccgugaccggcgugagcgccagcugcagccacaacggcgagagcagcuucuacagaaaccugcuguggcugaccggcaagaacggccuguaccccaaccugagcaagagcuacgccaacaacaaggagaaggaggugcuggugcuguggggcgugcaccacccccccaacaucggcgaccagaaggcccuguaccacaccgagaacgccuacgugagcguggugagcagccacuacagcagaaaguucacccccgagaucgccaagagacccaaggugagagaccaggagggcagaaucaacuacuacuggacccugcuggagcccggcgacaccaucaucuucgaggccaacggcaaccugaucgcccccagauacgccuucgcccugagcagaggcuucggcagcggcaucaucaacagcaacgcccccauggacaagugcgacgccaagugccagacccccagaggcgccaucaacagcagccugcccuuccagaacgugcaccccgugaccaucggcgagugccccaaguacgugagaagcgccaagcugagaauggugaccggccugagaaacauccccagcauccagagcagaggccuguucggcgccaucgccggcuucaucgagggcggcuggaccggcaugguggacggcugguacggcuaccaccaccagaacgagcagggcagcggcuacgccgccgaccagaagagcacccagaacgccaucaacggcaucaccaacaaggugaacagcgugaucgagaagaugaacacccaguucaccgccgugggcaaggaguucaacaagcuggagagaagaauggagaaccugaacaagaagguggacgacggcuucaucgacaucuggaccuacaacgccgagcugcuggugcugcuggagaacgagagaacccuggacuuccacgacagcaacgugaagaaccuguacgagaaggugaagagccagcugaagaacaacgccaaggagaucggcaacggcugcuucgaguucuaccacaagugcaacgacgagugcauggagagcgugaagaacggcaccuacgacuaccccaaguacagcgaggagagcaagcugaacagagagaagaucgagggcgugaagcuggagagcaugggcguguaccagauccuggccaucuacagcaccguggccagcagccuggugcugcuggugagccugggcgccaucagcuucuggaugugcagcaacggcagccugcagugcagaaucugcaucuga

SEQ ID NO: 168088 - RNA, 1698 nt, Artificial Sequence; identical to SEQ ID NO: 164157
  derived and/or modified CDS sequence (opt4) from hemagglutinin__InfluenzaA__AEX34878

SEQ ID NO: 168089 - RNA, 1698 nt, Artificial Sequence
  derived and/or modified CDS sequence (opt4) from hemagglutinin__InfluenzaA__AEX34889
augaaggugaaccugcuggugcugcugugcaccuucaccgccaccuacgccgacaccaucugcaucggcuaccacgccaacaacagcaccgacaccguggacaccgugcuggagaagaacgugaccgugacccacagcgugaaccugcuggagaacagccacaacggcaagcugugccugcugaagggcaucgccccccugcagcugggcaacugcagcguggccggcuggauccugggcaaccccgagugcgagcugcugaucagcaaggagagcuggagcuacaucguggagaagcccaaccccgagaacggcaccugcuaccccggccacuucgccgacuacgaggagcugagagagcagcugagcagcgugagcagcuucgagagauucgagaucuuccccaaggagagcagcuggcccaaccacaccgugaccggcgugagcgccagcugcagccacaacggcgagagcagcuucuacagaaaccugcuguggcugaccggcaagaacggccuguaccccaaccugagcaagagcuacgccaacaacaaggagaaggaggugcuggugcuguggggcgugcaccacccccccaacaucggcgaccagaaggcccuguaccacaccgagaacgccuacgugagcguggugagcagccacuacagcagaaaguucacccccgagaucgccaagagacccaaggugagagaccaggagggcagaaucaacuacuacuggacccugcuggagcccggcgacaccaucaucuucgaggccaacggcaaccugaucgcccccagauacgccuucgcccugagcagaggcuucggcagcggcaucaucaacagcaacgcccccauggacaagugcgacgccaagugccagaccccccagggcgccaucaacagcagccugcccuuccagaacgugcaccccgugaccaucggcgagugccccaaguacgugagaagcgccaagcugagaauggugaccggccugagaaacauccccagcauccagagcagaggccuguucggcgccaucgccggcuucaucgagggcggcuggaccggcaugguggacggcugguacggcuaccaccaccagaacgagcagggcagcggcuacgccgccgaccagaagagcacccagaacgccaucaacggcaucaccaacaaggugaacagcgugaucgagaagaugaacacccaguucaccgccgugggcaaggaguucaacaagcuggagagaagaauggagaaccugaacaagaagguggacgacggcuucaucgacaucuggaccuacaacgccgagcugcuggugcugcuggagaacgagagaacccuggacuuccacgacagcaacgugaagaaccuguacgagaaggugaagagccagcugaagaacaacgccaaggagaucggcaacggcugcuucgaguucuaccacaagugcaacgacgagugcauggagagcgugaagaacggcaccuacgacuaccccaaguacagcgaggagagcaagcugaacagagagaagaucgacggcgugaagcuggagagcaugggcguguaccagauccuggccaucuacagcaccguggccagcagccuggugcugcuggugagccugggcgccaucagcuucuggaugugcagcaacggcagccugcagugcagaaucugcaucuga

SEQ ID NO: 168090 - RNA, 1698 nt, Artificial Sequence
  derived and/or modified CDS sequence (opt4) from hemagglutinin__InfluenzaA__AEX34900
augaaggugaagcugcuggugcugcugugcaccuucaccgccaccuacgccgacaccaucugcaucggcuaccacgccaacaacagcaccgacaccguggacaccgugcuggagaagaacgugaccgugacccacagcgugaaccugcuggaggacaaccacaacggcaagcugugccugcugaagggcaucgccccccugcagcugggcaacugcagcguggccggcuggauccugggcaaccccgagugcgagcugcugaucagcaaggagagcuggagcuacaucguggagaagcccaaccccgagaacggcaccugcuaccccggccacuucgccgacuacgaggagcugagagagcagcugagcagcgugagcagcuucgagagauucgagaucuuccccaaggagagcagcuggcccaaccacaccgugaccggcgugagcgccagcugcagccacaacggcgagagcagcuucuacaagaaccugcuguggcugaccggcaagaacggccuguaccccaaccugagcaagagcuacgccaacaacaaggagaaggaggugcuggugcuguggggcgugcaccacccccccaacaucggcgaccagaugacccuguaccacaaggagaacgccuacgugagcguggugagcagccacuacagcagaaaguucacccccgagaucgccaagagacccaaggugagagaccaggagggcagaaucaacuacuacuggacccugcuggagcccggcgacaccaucaucuucgaggccagcggcaaccugaucgcccccagauacgccuucgcccugagcagaggcuucggcagcggcaucaucaacagcaacgcccccauggacgagugcgacgccaagugccagaccccccagggcgccaucaacagcagccugcccuuccagaacgugcaccccgugaccaucggcgagugccccaaguacgugagaagcgccaagcugagaauggugaccggccugagaaacauccccagcauccagagcagaggccuguucggcgccaucgccggcuucaucgagggcggcuggaccggcaugguggacggcugguacggcuaccaccaccagaacgagcagggcagcggcuacgccgccgaccagaagagcacccagaacgccaucaacggcgugaccaacaaggugaacagcgugaucgagaagaugaacacccaguucaccgccgugggcaaggaguucaacaagcuggagagaagaauggagaaccugaacaagaagguggacgacggcuucaucgacguguggaccuacaacgccgagcugcuggugcugcuggagaacgagagaacccuggacuuccacgacagcaacgugaagaaccuguacgagaaggugaagaaccagcugaagaacaacgccaaggagaucggcaacggcugcuucgaguucuaccacaagugcaacgacgagugcauggagagcgugaagaacggcaccuacgacuaccccaaguacagcgaggagagcaagcugagcagagagaagaucgacggcguggagcuggagagcaugggcguguaccagauccuggccaucuacagcaccguggccagcagccuggugcugcuggugagccugggcgccaucagcuucuggaugugcagcaacggcagccugcagugcagaaucugcaucuga

SEQ ID NO: 168091 - RNA, 1698 nt, Artificial Sequence
  derived and/or modified CDS sequence (opt4) from hemagglutinin__InfluenzaA__AEX34911
augaaggugaagcugcuggugcugcugugcaccuucaccgccaccuacgccgacaccaucugcaucggcuaccacgccaacaacagcaccgacaccguggacaccgugcuggagaagaacgugaccgugacccacagcgugaaccugcuggagaacagccacaacggcaagcugugccugcugaagggcaucgccccccugcagcugggcaacugcagcguggccggcuggauccugggcaaccccgagugcgagcugcugaucagccaggagagcuggagcuacaucguggagaagcccaaccccgagaacggcaccugcuaccccggccacuucgccgacuacgaggagcugagagagcagcugagcagcgugagcagcuucgagagauucgagaucuuccccaaggagagcagcuggcccaaccacaccgugaccggcgugagcgccagcugcagccacaacggcgagagcagcuucuacagaaaccugcuguggcugaccggcaagaacggccuguaccccaaccugagcaagagcuacgccaacaacaaggagaaggaggugcuggugcuguggggcgugcaccacccccccaacaucggcgaccagaaggcccuguaccacaccgagaacgccuacgugagcguggugagcagccacuacagcagaaaguucacccccgagaucgccaagagacccaaggugagagaccaggagggcagaaucaacuacuacuggacccugcuggagcccggcgacaccaucaucuucgaggccaacggcaaccugaucgcccccagauacgccuucgcccugagcagaggcuucggcagcggcaucaucaacagcaacgcccccauggacaagugcgacgccaagugccagaccccccagggcgccaucaacagcagccugcccuuccagaacgugcaccccgugaccaucggcgagugccccaaguacgugagaagcgccaagcugagaauggugaccggccugagaaacauccccagcauccagagcagaggccuguucggcgccaucgccggcuucaucgagggcggcuggaccggcaugguggacggcugguacggcuaccaccaccagaacgagcagggcagcggcuacgccgccgaccagaagagcacccagaacgccaucaacggcaucaccaacaaggugaacagcgugaucgagaagaugaacacccaguucaccgccgugggcaaggaguucaacaagcuggagagaagaauggagaaccugaacaagaagguggacgacggcuucaucgacaucuggaccuacaacgccgagcugcuggugcugcuggagaacgagagaacccuggacuuccacgacagcaacgugaagaaccuguacgagaaggugaagagccagcugaagaacaacgccaaggagaucggcaacggcugcuucgaguucuaccacaagugcaacgacgagugcauggagagcgugaagaacggcaccuacgacuaccccaaguacagcgaggagagcaagcugaacagagagaagaucgacggcgugaagcugggcagcaugggcguguaccagauccuggccaucuacagcaccguggccagcagccuggugcugcuggugagccugggcgccaucagcuucuggaugugcagcaacggcagccugcagugcagaaucugcaucuga

SEQ ID NO: 168092 - RNA, 1698 nt, Artificial Sequence
  derived and/or modified CDS sequence (opt4) from hemagglutinin__InfluenzaA__AEX34922
augaaggugaagcugcuggugcugcugugcaccuucaccgccaccuacgccgacaccaucugcaucggcuaccacgccaacaacagcaccgacaccguggacaccgugcuggagaagaacgugaccgugacccacagcgugaaccugcuggagaacagccacaacggcaagcugugccugcugaagggcaucgccccccugcagcugggcaacugcagcguggccggcuggauccugggcaaccccgagugcgagcugcugaucagcaaggagagcuggagcuacaucguggagaagcccaaccccgagaacggcaccugcuaccccggccacuucgccgacuacgaggagcugagagagcagcugagcagcgugagcagcuucgagagauucgagaucuuccccaaggagagcagcuggcccaaccacaccgugaccggcgugagcgccagcugcagccacaacggcgagagcagcuucuacagaaaccugcuguggcugaccggcaagaacggccuguaccccaaccugagcaagagcuacgccaacaacaaggagaaggaggugcuggugcuguggggcgugcaccacccccccaacaucggcgaccagaaggcccuguaccacaccgagaacgccuacgugagcguggugagcagccacuacagcagaagauucacccccgagaucgccaagagacccaaggugagagaccaggagggcagaaucaacuacuacuggacccugcuggagcccggcgacaccaucaucuucgaggccaacggcaaccugaucgcccccagauacgccuucgcccugagcagaggcuucggcagcggcaucaucaacagcaacgcccccauggacaagugcgacgccaagugccagaccccccagggcgccaucaacagcagccugcccuuccagaacgugcaccccgugaccaucggcgagugccccaaguacgugagaagcgccaagcugagaauggugaccggccugagaaacauccccagcauccagagcagaggccuguucggcgccaucgccggcuucaucgagggcggcuggaccggcaugguggacggcugguacggcuaccaccaccagaacgagcagggcagcggcuacgccgccgaccagaagagcacccagaacgccaucaacggcaucaccaacaaggugaacagcgugaucgagaagaugaacacccaguucaccgccgugggcaaggaguucaacaagcuggagagaagaauggagaaccuggacaagaagguggacgacggcuucaucgacaucuggaccuacaacgccgagcugcuggugcugcuggagaacgagagaacccuggacuuccacgacagcaacgugaagaaccuguacgagaaggugaagagccagcugaagaacaacgccaaggagaucggcaacggcugcuucgaguucuaccacaagugcaacgacgagugcauggagagcgugaagaacggcaccuacgacuaccccaaguacagcgaggagagcaagcugaacagagagaagaucgacggcgugaagcuggagagcaugggcguguaccagauccuggccaucuacagcaccguggccagcagccuggugcugcuggugagccugggcgccaucagcuucuggaugugcagcaacggcagccugcagugcagaaucugcaucuga

SEQ ID NO: 168093 - RNA, 1698 nt, Artificial Sequence; identical to SEQ ID NO: 162548
  derived and/or modified CDS sequence (opt4) from hemagglutinin__InfluenzaA__AEX34933

SEQ ID NO: 168094 - RNA, 1698 nt, Artificial Sequence; identical to SEQ ID NO: 162548
  derived and/or modified CDS sequence (opt4) from hemagglutinin__InfluenzaA__AEX34944

SEQ ID NO: 168095 - RNA, 1698 nt, Artificial Sequence
  derived and/or modified CDS sequence (opt4) from hemagglutinin__InfluenzaA__AEX34955
augaaggccaagcugcuggugcugcugugcaccuucaccgccaccuacgccgacaccaucugcaucggcuaccacgccaacaacagcaccgacaccguggacaccgugcuggagaagaacgugaccgugacccacagcgugaaccugcuggagaacagccacaacggcaagcugugccugcugaagggcaucgccccccugcagcugggcaacugcagcguggccggcuggauccugggcaaccccgagugcgagcugcugaucagcaaggagagcuggagcuacaucguggagaagcccaaccccgagaacggcaccugcuaccccggccacuucgccgacuacgaggagcugagagagcagcugagcagcgugagcagcuucgagagauucgagaucuuccccaaggagagcagcuggcccaaccacaccgugaccggcgugagcgccagcugcagccacaacggcgagagcagcuucuacagaaaccugcuguggcugaccggcaagaacggccuguaccccaaccugagcaagagcuacgccaacaacaaggagaaggaggugcuggugcuguggggcgugcaccacccccccaacaucggcgaccagaaggcccuguaccacaccgagaacgccuacgugagcguggugagcagccacuacagcagaaaguucacccccgagaucgccaagagacccaaggugagagaccaggagggcagaaucaacuacuacuggacccugcuggagcccggcgacaccaucaucuucgaggccaacggcaaccugaucgcccccagauacgccuucgcccugagcagaggcuucggcagcggcaucaucaacagcaacgcccccauggacaagugcgacgccaagugccagaccccccagggcgccaucaacagcagccugcccuuccagaacgugcaccccgugaccaucggcgagugccccaaguacgugagaagcgccaagcugagaauggugaccggccugagaaacauccccagcauccagagcagaggccuguucggcgccaucgccggcuucaucgagggcggcuggaccggcaugguggacggcugguacggcuaccaccaccagaacgagcagggcagcggcuacgccgccgaccagaagagcacccagaacgccaucaacggcaucaccaacaaggugaacagcgugaucgagaagaugaacacccaguucaccgccgugggcaaggaguucaacaagcuggagagaagaauggagaaccugaacaagaagguggacgacggcuucaucgacaucuggaccuacaacgccgagcugcuggugcugcuggagaacgagagaacccuggacuuccacgacagcaacgugaagaaccuguacgagaaggugaagagccagcugaagaacaacgccaaggagaucggcaacggcugcuucgaguucuaccacaagugcaacgacgagugcauggagagcgugaagaacggcaccuacgacuaccccaaguacagcgaggagagcaagcugaacagagagaagaucgacggcgugaagcuggagagcaugggcguguaccagauccuggccaucuacagcaccguggccagcagccuggugcugcuggugagccugggcgccaucagcuucuggaugugcagcaacggcagccugcagugcagaaucugcaucuga

SEQ ID NO: 168096 - RNA, 1698 nt, Artificial Sequence
  derived and/or modified CDS sequence (opt4) from hemagglutinin__InfluenzaA__AEX34966
augaaggugaagcugcuggugcugcugugcaccuucaccgccaccuacgccgacaccaucugcaucggcuaccacgccaacaacagcaccgacaccguggacaccgugcuggagaagaacgugaccgugacccacagcgugaaccugcuggagaacagccacaacggcaagcugugccugcugaagggcaucgccccccugcagcugggcaacugcagcguggccggcuggauccugggcaaccccgagugcgagcugcugaucagcaaggagagcuggagcuacaucguggagaagcccaaccccgagaacggcaccugcuaccccggccacuucgccgacuacgaggagcugagagagcagcugagcagcgugagcagcuucgagagauucgagaucuuccccaaggagagcagcuggcccaaccacaccgugaccggcgugagcgccagcugcagccacaacggcgagagcagcuucuacagaaaccugcuguggcugaccggcaagaacggccuguaccccaaccugagcaagagcuacgccaacaacaaggagaaggaggugcuggugcuguggggcgugcaccacccccccaacaucggcgaccagaaggcccuguaccacaccgagaacgccuacgugagcguggugagcagccacuacagcagaaaguucacccccgagaucgccaagagacccaaggugagagaccaggagggcagaaucaacuacuacuggacccugcuggagcccggcgacaccaucauguucgaggccaacggcaaccugaucgcccccagauacgccuucgcccugagcagaggcuucggcagcggcaucaucaacagcaacgcccccauggacaagugcgacgccaagugccagaccccccagggcgccaucaacagcagccugcccuuccagaacgugcaccccgugaccaucggcgagugccccaaguacgugagaagcgccaagcugagaauggugaccggccugagaaacauccccagcauccagagcagaggccuguucggcgccaucgccggcuucaucgagggcggcuggaccggcaugguggacggcugguacggcuaccaccaccagaacgagcagggcagcggcuacgccgccgaccagaagagcacccagaacgccaucaacggcaucaccaacaaggugaacagcgugaucgagaagaugaacacccaguucaccgccgugggcaaggaguucaacaagcuggagagaagaauggagaaccugaacaagaagguggacgacggcuucaucgacaucuggaccuacaacgccgagcugcuggugcugcuggagaacgagagaacccuggacuuccacgacagcaacgugaagaaccuguacgagaaggugaagagccagcugaagaacaacgccaaggagaucggcaacggcugcuucgaguucuaccacaagugcaacgacgagugcauggagagcgugaagaacggcaccuacgacuaccccaaguacagcgaggagagcaagcugaacagagagaagaucgacggcgugaagcuggagagcaugggcguguaccagauccuggccaucuacagcaccguggccagcagccuggugcugcuggugagccugggcgccaucagcuucuggaugugcagcaacggcagccugcagugcagaaucugcaucuga

SEQ ID NO: 168097 - RNA, 1698 nt, Artificial Sequence; identical to SEQ ID NO: 168096
  derived and/or modified CDS sequence (opt4) from hemagglutinin__InfluenzaA__AEX34977

SEQ ID NO: 168098 - RNA, 1698 nt, Artificial Sequence; identical to SEQ ID NO: 168096
  derived and/or modified CDS sequence (opt4) from hemagglutinin__InfluenzaA__AEX34988

SEQ ID NO: 168099 - RNA, 1698 nt, Artificial Sequence; identical to SEQ ID NO: 164157
  derived and/or modified CDS sequence (opt4) from hemagglutinin__InfluenzaA__AEX34999

SEQ ID NO: 168100 - RNA, 1698 nt, Artificial Sequence; identical to SEQ ID NO: 168096
  derived and/or modified CDS sequence (opt4) from hemagglutinin__InfluenzaA__AEX35010

SEQ ID NO: 168101 - RNA, 1698 nt, Artificial Sequence; identical to SEQ ID NO: 168096
  derived and/or modified CDS sequence (opt4) from hemagglutinin__InfluenzaA__AEX35032

SEQ ID NO: 168102 - RNA, 1698 nt, Artificial Sequence; identical to SEQ ID NO: 168096
  derived and/or modified CDS sequence (opt4) from hemagglutinin__InfluenzaA__AEX35043

SEQ ID NO: 168103 - RNA, 1698 nt, Artificial Sequence
  derived and/or modified CDS sequence (opt4) from hemagglutinin__InfluenzaA__AEX35054
augaaggugaagcugcuggugcugcugugcaccuucaccgccaccuacgccgacaccaucugcaucggcuaccacgccaacaacagcaccgacaccguggacaccgugcuggagaagaacgugaccgugacccacagcgugaaccugcuggagaacagccacaacggcaagcugugccugcugaagggcaucgccccccugcagcugggcaacugcagcguggccggcuggauccugggcaaccccgagugcgagcugcugaucagcaaggagagcuggagcuacaucguggagaagcccaaccccgagaacggcaccugcuaccccggccacuucgccgacuacgaggagcugagagagcagcugagcagcgugagcagcuucgagagauucgagaucuuccccaaggagagcagcuggcccaaccacaccgugaccggcgugagcgccagcugcagccacaacggcgagagcagcuucuacagaaaccugcuguggcugaccggcaagaacggccuguaccccaaccugagcaagagcuacgccaacaacaaggagaaggaggugcuggugcuguggggcgugcaccacccccccaacaucggcgaccagaaggcccuguaccacaccgagaacgccuacgugagcguggugagcagccacuacagcagaaaguucacccccgagaucgccaagagacccaaggugagagaccaggagggcagaaucaacuacuacuggacccugcuggagcccggcgacaccaucauguucgaggccaacggcaaccugaucgcccccagauacgccuucgcccugaacagaggcuucggcagcggcaucaucaacagcaacgcccccauggacaagugcgacgccaagugccagaccccccagggcgccaucaacagcagccugcccuuccagaacgugcaccccgugaccaucggcgagugccccaaguacgugagaagcgccaagcugagaauggugaccggccugagaaacauccccagcauccagagcagaggccuguucggcgccaucgccggcuucaucgagggcggcuggaccggcaugguggacggcugguacggcuaccaccaccagaacgagcagggcagcggcuacgccgccgaccagaagagcacccagaacgccaucaacggcaucaccaacaaggugaacagcgugaucgagaagaugaacacccaguucaccgccgugggcaaggaguucaacaagcuggagagaagaauggagaaccugaacaagaagguggacgacggcuucaucgacaucuggaccuacaacgccgagcugcuggugcugcuggagaacgagagaacccuggacuuccacgacagcaacgugaagaaccuguacgagaaggugaagagccagcugaagaacaacgccaaggagaucggcaacggcugcuucgaguucuaccacaagugcaacgacgagugcauggagagcgugaagaacggcaccuacgacuaccccaaguacagcgaggagagcaagcugaacagagagaagaucgacggcgugaagcuggagagcaugggcguguaccagauccuggccaucuacagcaccguggccagcagccuggugcugcuggugagccugggcgccaucagcuucuggaugugcagcaacggcagccugcagugcagaaucugcaucuga

SEQ ID NO: 168104 - RNA, 1698 nt, Artificial Sequence; identical to SEQ ID NO: 168096
  derived and/or modified CDS sequence (opt4) from hemagglutinin__InfluenzaA__AEX35065

SEQ ID NO: 168105 - RNA, 1698 nt, Artificial Sequence; identical to SEQ ID NO: 162548
  derived and/or modified CDS sequence (opt4) from hemagglutinin__InfluenzaA__AEX35076

SEQ ID NO: 168106 - RNA, 1698 nt, Artificial Sequence
  derived and/or modified CDS sequence (opt4) from hemagglutinin__InfluenzaA__AEX35087
augaaggugaagcugcuggugcugcugugcaccuucaccgccaccuacgccgacaccaucugcaucggcuaccacgccaacaacagcaccgacaccguggacaccgugcuggagaagaacgugaccgugacccacagcgugaaccugcuggaggacaaccacaacggcaagcugugccugcugaagggcaucgccccccugcagcugggcaacugcagcguggccggcuggauccugggcaaccccgagugcgagcugcugaucagcaaggagagcuggagcuacaucguggagaagcccaaccccgagaacggcaccugcuaccccggccacuucgccgacuacgaggagcugagagagcagcugagcagcgugagcagcuucaagagauucgagaucuuccccaaggagagcagcuggcccaaccacaccgugaccggcgugagcgccagcugcagccacaacggcgagagcagcuucuacaagaaccugcuguggcugaccggcaagaacggccuguaccccaaccugagcaagagcuacgccaacaacaaggagaaggaggugcuggugcuguggggcgugcaccacccccccaacaucggcgaccagaugacccuguaccacaaggagaacgccuacgugagcguggugagcagccacuacagcagaaaguucacccccgagaucgccaagagacccaaggugagagaccaggagggcagaaucaacuacuacuggacccugcuggagcccggcgacaccaucaucuucgaggccagcggcaaccugaucgcccccagauacgccuucgcccugagcagaggcuucggcagcggcaucaucaacagcaacgcccccauggacgagugcgacgccaagugccagaccccccagggcgccaucaacagcagccugcccuuccagaacgugcaccccgugaccaucggcgagugccccaaguacgugagaagcgccaagcugagaauggugaccggccugagaaacauccccagcauccagagcagaggccuguucggcgccaucgccggcuucaucgagggcggcuggaccggcaugguggacggcugguacggcuaccaccaccagaacgagcagggcagcggcuacgccgccgaccagaagagcacccagaacgccaucaacggcaucaccaacaaggugaacagcgugaucgagaagaugaacacccaguucaccgccgugggcaaggaguucaacaagcuggagagaagaauggagaaccugaacaagaagguggacgacggcuucaucgacguguggaccuacaacgccgagcugcuggugcugcuggagaacgagagaacccuggacuuccacgacagcaacgugaagaaccuguacgagaaggugaagaaccagcugaagaacaacgccaaggagaucggcaacggcugcuucgaguucuaccacaagugcaacgacgagugcauggagagcgugaagaacggcaccuacgacuaccccaaguacagcgaggagagcaagcugagcagagagaagaucgacggcgugaagcuggagagcaugggcguguaccagauccuggccaucuacagcaccguggccagcagccuggugcugcuggugagccugggcgccaucagcuucuggaugugcagcaacggcagccugcagugcagaaucugcaucuga

SEQ ID NO: 168107 - RNA, 1698 nt, Artificial Sequence
  derived and/or modified CDS sequence (opt4) from hemagglutinin__InfluenzaA__AEX35098
augaaggugaagcugcuggugcugcugugcaccuucaccgccaccuacgccgacaccaucugcaucggcuaccacgccaacaacagcaccgacaccguggacaccgugcuggagaagaacgugaccgugacccacagcgugaaccugcuggagaacagccacaacggcaagcugugccugcugaagggcaucgccccccugcagcugggcaacugcagcguggccggcuggauccugggcaaccccgagugcgagcugcugaucagcaaggagagcuggagcuacaucguggagaagcccaaccccgagaacggcaccugcuaccccggccacuucgccgacuacgaggagcugagagagcagcugagcagcgugagcagcuucgagagauucgagaucuuccccaaggagagcagcuggcccaaccacaccgugaccggcgugagcgccagcugcagccacaacggcgagagcagcuucuacagaaaccugcuguggcugaccggcaagaacggccuguaccccaaccugagcaagagcuacgccaacaacaaggagaaggaggugcuggugcuguggggcgugcaccacccccccaacaucggcgaccagaaggcccuguaccacaccgagaacgccuacgugagcgugaugagcagccacuacagcagaaaguucacccccgagaucgccaagagacccaaggugagagaccaggagggcagaaucaacuacuacuggacccugcuggagcccggcgacaccaucaucuucgaggccaacggcaaccugaucgcccccagauacgccuucgcccugagcagaggcuucggcagcggcaucaucaacagcaacgcccccauggacaagugcgacgccaagugccagaccccccagggcgccaucaacagcagccugcccuuccagaacgugcaccccgugaccaucggcgagugccccaaguacgugagaagcgccaagcugagaauggugaccggccugagaaacauccccagcauccagagcagaggccuguucggcgccaucgccggcuucaucgagggcggcuggaccggcaugguggacggcugguacggcuaccaccaccagaacgagcagggcagcggcuacgccgccgaccagaagagcacccagaacgccaucaacggcaucaccaacaaggugaacagcgugaucgagaagaugaacacccaguucaccgccgugggcaaggaguucaacaagcuggagagaagaauggagaaccugaacaagaagguggacgacggcuucaucgacaucuggaccuacaacgccgagcugcuggugcugcuggagaacgagagaacccuggacuuccacgacagcaacgugaagaaccuguacgagaaggugaagagccagcugaagaacaacgccaaggagaucggcaacggcugcuucgaguucuaccacaagugcaacgacgagugcauggagagcgugaagaacggcaccuacgacuaccccaaguacagcgaggagagcaagcugaacagagagaagaucgacggcgugaagcuggagagcaugggcguguaccagauccuggccaucuacagcaccguggccagcagccuggugcugcuggugagccugggcgccaucagcuucuggaugugcagcaacggcagccugcagugcagaaucugcaucuga

SEQ ID NO: 168108 - RNA, 1698 nt, Artificial Sequence
  derived and/or modified CDS sequence (opt4) from hemagglutinin__InfluenzaA__AEX35109
augaaggugaagcugcuggugcugcugugcaccuucaccgccaccuacgccgacaccaucugcaucggcuaccacgccaacaacagcaccgacaccguggacaccgugcuggagaagaacgugaccgugacccacagcgugaaccugcuggagaacagccacaacggcaagcugugccugcugaagggcaucgccccccugcagcugggcaacugcagcguggccggcuggauccugggcaaccccgagugcgagcugcugaucagcaaggagagcuggagcuacaucguggagaagcccaaccccgagaacggcaccugcuaccccggccacuucgccgacuacgaggagcugagagagcagcugagcagcgugagcagcuucgagagauucgagaucuuccccaaggagagcagcuggcccaaccacaccgugaccggcgugagcgccagcugcagccacaacggcgagagcagcuucuacagaaaccugcuguggcugaccggcaagaacggccuguaccccaaccugagcaagagcuacgccaacaacaaggagaaggaggugcuggugcuguggggcgugcaccagccccccaacaucggcgaccagaaggcccuguaccacaccgagaacgccuacgugagcguggugagcagccacuacagcagaaaguucacccccgagaucgccaagagacccaaggugagagaccaggagggcagaaucaacuacuacuggacccugcuggagcccggcgacaccaucaucuucgaggccaacggcaaccugaucgcccccagauacgccuucgcccugagcagaggcuucggcagcggcaucaucaacagcaacgcccccauggacaagugcgacgccaagugccagaccccccagggcgccaucaacagcagccugcccuuccagaacgugcaccccgugaccaucggcgagugccccaaguacgugagaagcgccaagcugagaauggugaccggccugagaaacauccccagcauccagagcagaggccuguucggcgccaucgccggcuucaucgagggcggcuggaccggcaugguggacggcugguacggcuaccaccaccagaacgagcagggcagcggcuacgccgccgaccagaagagcacccagaacgccaucaacggcaucaccaacaaggugaacagcgugaucgagaagaugaacacccaguucaccgccgugggcaaggaguucaacaagcuggagagaagaauggagaaccugaacaagaagguggacgacggcuucaucgacaucuggaccuacaacgccgagcugcuggugcugcuggagaacgagagaacccuggacuuccacgacagcaacgugaagaaccuguacgagaaggugaagagccagcugaagaacaacgccaaggagaucggcaacggcugcuucgaguucuaccacaagugcaacgacgagugcauggagagcgugaagaacggcaccuacgacuaccccaaguacagcgaggagagcaagcugaacagagagaagaucgacggcgugaagcuggagagcaugggcguguaccagauccuggccaucuacagcaccguggccagcagccuggugcugcuggugagccugggcgccaucagcuucuggaugugcagcaacggcagccugcagugcagaaucugcaucuga

SEQ ID NO: 168109 - RNA, 1698 nt, Artificial Sequence
  derived and/or modified CDS sequence (opt4) from hemagglutinin__InfluenzaA__AEX35120
augaaggugaagcugcuggugcugcugugcaccuucaccgccaccuacgccgacaccaucugcaucggcuaccacgccaacaacagcaccgacaccguggacaccgugcuggagaagaacgugaccgugacccacagcgugaaccugcuggagaacagccacaacggcaagcugugccugcugaagggcaucgccccccugcagcugggcaacugcagcguggccggcuggauccugggcaaccccgagugcgagcugcugaucagcaaggagagcuggagcuacaucguggagaagcccaaccccgagaacggcaccugcuaccccggccacuucgccgacuacgaggagcugagagagcagcugagcagcgugagcagcuucgagagauucgagaucuuccccaaggagagcagcuggcccaaccacaccgugaccggcgugagcgccagcugcagccacaacggcgagagcagcuucuacagaaaccugcuguggcugaccggcaagaacggccuguaccccaaccugagcaagagcuacgccaacaacaaggagaaggaggugcuggugcuguggggcgugcaccacccccccaacaucggcgaccagaaggcccuguaccacaccgagaacgccuacgugagcguggugagcagccacuacagcagaaaguucacccccgagaucgccaagagacccaaggugagagacagagagggcagaaucaacuacuacuggacccugcuggagcccggcgacaccaucaucuucgaggccaacggcaaccugaucgcccccagauacgccuucgcccugagcagaggcuucggcagcggcaucaucaacagcaacgcccccauggacaagugcgacgccaagugccagaccccccagggcgccaucaacagcagccugcccuuccagaacgugcaccccgugaccaucggcgagugccccaaguacgugagaagcgccaagcugagaauggugaccggccugagaaacauccccagcauccagagcagaggccuguucggcgccaucgccggcuucaucgagggcggcuggaccggcaugguggacggcugguacggcuaccaccaccagaacgagcagggcagcggcuacgccgccgaccagaagagcacccagaacgccaucaacggcaucaccaacaaggugaacagcgugaucgagaagaugaacacccaguucaccgccgugggcaaggaguucaacaagcuggagagaagaauggagaaccugaacaagaagguggacgacggcuucaucgacaucuggaccuacaacgccgagcugcuggugcugcuggagaacgagagaacccuggacuuccacgacagcaacgugaagaaccuguacgagaaggugaagagccagcugaagaacaacgccaaggagaucggcaacggcugcuucgaguucuaccacaagugcaacgacgagugcauggagagcgugaagaacggcaccuacgacuaccccaaguacagcgaggagagcaagcugaacagagagaagaucgacggcgugaagcuggagagcaugggcguguaccagauccuggccaucuacagcaccguggccagcagccuggugcugcuggugagccugggcgccaucagcuucuggaugugcagcaacggcagccugcagugcagaaucugcaucuga

SEQ ID NO: 168110 - RNA, 1698 nt, Artificial Sequence; identical to SEQ ID NO: 167853
  derived and/or modified CDS sequence (opt4) from hemagglutinin__InfluenzaA__AEX35131

SEQ ID NO: 168111 - RNA, 1698 nt, Artificial Sequence; identical to SEQ ID NO: 167853
  derived and/or modified CDS sequence (opt4) from hemagglutinin__InfluenzaA__AEX35142

SEQ ID NO: 168112 - RNA, 1698 nt, Artificial Sequence
  derived and/or modified CDS sequence (opt4) from hemagglutinin__InfluenzaA__AEX35153
augaaggugaagcugcuggugcugcugugcaccuucaccgccaccuacgccgacaccaucugcaucggcuaccacgccaacaacagcaccgacaccguggacaccgugcuggagaagaacgugaccgugacccacagcgugaaccugcuggaggacaaccacaacggcaagcugugccugcugaagggcaucgccccccugcagcugggcaacugcagcguggccggcuggauccugggcaaccccgagugcgagcugcugaucagcaaggagagcuggagcuacaucguggagaagcccaaccccgagaacggcaccugcuaccccggccacuucgccgacuacgaggagcugagagagcagcugagcagcgugagcagcuucgagagauucgagaucuuccccaaggagagcagcuggcccaaccacaccgugaccggcgugagcgccagcugcagccacaacggcgagagcagcuucuacaagaaccugcuguggcugaccggcaagaacggccuguaccccaaccugagcaagagcuacgccaacaacaaggagaaggaggugcuggugcuguggggcgugcaccacccccccaacaucggcaaccagaugacccuguaccacaaggagaacgccuacgugagcguggugagcagccacuacagcagaaaguucacccccgagaucgccaagagacccaaggugagagaccaggagggcagaaucaacuacuacuggacccugcuggagcccggcgacaccaucaucuucgaggccagcggcaaccugaucgcccccagauacgccuucgcccugagcagaggcuucggcagcggcaucaucaacagcaacgcccccauggacgagugcgacgccaagugccagaccccccagggcgccaucaacagcaaccugcccuuccagaacgugcaccccgugaccaucggcgagugccccaaguacgugagaagcgccaagcugagaauggugaccggccugagaaacauccccagcauccagagcagaggccuguucggcgccaucgccggcuucaucgagggcggcuggaccggcaugguggacggcugguacggcuaccaccaccagaacgagcagggcagcggcuacgccgccgaccagaagagcacccagaacgccaucaacggcaucaccaacaaggugaacagcgugaucgagaagaugaacacccaguucaccgccgugggcaaggaguucaacaagcuggagagaagaauggagaaccugaacaagaagguggacgacggcuucaucgacguguggaccuacaacgccgagcugcuggugcugcuggagaacgagagaacccuggacuuccacgacagcaacgugaagagccuguacgagaaggugaagaaccagcugaagaacaacgccaaggagaucggcaacggcugcuucgaguucuaccacaagugcaacgacgagugcauggagagcgugaagaacggcaccuacgacuaccccaaguacagcgaggagagcaagcugagcagagagaagaucgacggcgugaagcuggagagcaugggcguguaccagauccuggccaucuacagcaccguggccagcagccuggugcugcuggugagccugggcgccaucagcuucuggaugugcagcaacggcagccugcagugcagaaucugcaucuga

SEQ ID NO: 168113 - RNA, 1698 nt, Artificial Sequence
  derived and/or modified CDS sequence (opt4) from hemagglutinin__InfluenzaA__AEX35164
augaaggugaagcugcuggugcugcugugcgccuucaccgccaccuacgccgacaccaucugcaucggcuaccacgccaacaacagcaccgacaccguggacaccgugcuggagaagaacgugaccgugacccacagcgugaaccugcuggagaacagccacaacggcaagcugugccugcugaagggcaucgccccccugcagcugggcaacugcagcguggccggcuggauccugggcaaccccgagugcgagcugcugaucagcaaggagagcuggagcuacaucguggagaagcccaaccccgagaacggcaccugcuaccccggccacuucgccgacuacgaggagcugagagagcagcugagcagcgugagcagcuucgagagauucgagaucuuccccaaggagagcagcuggcccaaccacaccgugaccggcgugagcgccagcugcagccacaacggcgagagcagcuucuacagaaaccugcuguggcugaccggcaagaacggccuguaccccaaccugagcaagagcuacgccaacaacaaggagaaggaggugcuggugcuguggggcgugcaccacccccccaacaucggcgugcagaaggcccuguaccacaccgagaacgccuacgugagcguggugagcagccacuacagcagaaaguucacccccgagaucgccaagagacccaaggugagagaccaggagggcagaaucaacuacuacuggacccugcuggagcccggcgacaccaucaucuucgaggccaacggcaaccugaucgcccccagauacgccuucgcccugagcagaggcuucggcagcggcaucaucaacagcaacgcccccauggacaagugcgacgccaagugccagaccccccagggcgccaucaacagcagccugcccuuccagaacgugcaccccgugaccaucggcgagugccccaaguacgugagaagcgccaagcugagaauggugaccggccugagaaacauccccagcauccagagcagaggccuguucggcgccaucgccggcuucaucgagggcggcuggaccggcaugguggacggcugguacggcuaccaccaccagaacgagcagggcagcggcuacgccgccgaccagaagagcacccagaacgccaucaacggcaucaccaacaaggugaacagcgugaucgagaagaugaacacccaguucaccgccgugggcaaggaguucaacaagcuggagagaagaauggagaaccugaacaagaagguggacgacggcuucaucgacaucuggaccuacaacgccgagcugcuggugcugcuggagaacgagagaacccuggacuuccacgacagcaacgugaagaaccuguacgagaaggugaagagccagcugaagaacaacgccaaggagaucggcaacggcugcuucgaguucuaccacaagugcaacgacgagugcauggagagcgugaagaacggcaccuacgacuaccccaaguacagcgaggagagcaagcugaacagagagaagaucgacggcgugaagcuggagagcaugggcguguaccagauccuggccaucuacagcaccguggccagcagccuggugcugcuggugagccugggcgccaucagcuucuggaugugcagcaacggcagccugcagugcagaaucugcaucuga

SEQ ID NO: 168114 - RNA, 1698 nt, Artificial Sequence
  derived and/or modified CDS sequence (opt4) from hemagglutinin__InfluenzaA__AEX35175
augaaggugaagcugcuggugcugcugugcaccuucaccgccaccuacgccgacaccaucugcaucggcuaccacgccaacaacagcaccgacaccguggacaccgugcuggagaagaacgugaccgugacccacagcguggaccugcuggaggacagccacaacggcaagcugugccugcugaagggcaucgccccccugcagcugggcaacugcagcguggccggcuggauccugggcaaccccgagugcgagcugcugaucagcaaggagagcuggagcuacaucguggagacccccaaccccgagaacggcaccugcuaccccggcuacuucgccgacuacgaggagcugagagagcagcugagcagcgugagcagcuucgagagauucgagaucuuccccaaggagagcagcuggcccaaccacaccgugaccggcgugaccgccagcugcagccacaacggcaagagcagcuucuacagaaaccugcuguggcugaccggcaagaacggccuguaccccaaccugagcaagagcuacgccaacaacaaggagaaggaggugcuggugcuguggggcgugcaccacccccccaacaucggcgaccagagagcccuguaccacaccgagaacgccuacgugagcguggugagcagccacuacagcagaagauucacccccgagaucgccaagagacccaaggugagagaccaggagggcagaaucaacuacuacuggacccugcuggagcccggcgacaccaucaucuucgaggccaacggcaaccugaucgcccccagauucgccuucgcccugaacagaggcuucggcagcggcaucaucaccagcaacgcccccauggacggcugcgacgccaagugccagaccccccagggcgccaucaacagcagccugcccuuccagaacgugcaccccgugaccaucggcgagugccccaaguacgugagaagcgccaagcugagaauggccaccggccugagaaacauccccagcauccagagcagaggccuguucggcgccaucgccggcuucaucgagggcggcuggaccggcaugguggacggcugguacggcuaccaccaccagaacgagcagggcagcggcuacgccgccgaccagaagagcacccagaacgccaucaacggcaucaccaacaaggugaacagcgugaucgagaagaugaacacccaguucaccgccgugggcaaggaguucagcaagcuggagagaagaauggagaaccugaacaagaagguggacgacggcuuccuggacaucuggaccuacaacgccgagcugcuggugcugcuggagaacgagagaacccuggacuuccacgacagcaacgugaagaaccuguacgagaaggugaagagccagcugaagaacaacgccaaggagaucggcaacggcugcuucgaguucuaccacaagugcaacgacgagugcauggagagcgugaagaacggcaccuacgacuaccccaaguacagcgaggagagcaagcugaacagagagaagaucgacggcgugaagcuggagagcaugggcguguaccagauccuggccaucuacagcaccguggccagcagccuggugcugcuggugagccugggcgccaucagcuucuggaugugcagcaacggcagccugcagugcagaaucugcaucuga

SEQ ID NO: 168115 - RNA, 1698 nt, Artificial Sequence
  derived and/or modified CDS sequence (opt4) from hemagglutinin__InfluenzaA__AEX35186
augaaggugaagcugcuggugcugcugugcaccuucaccgccaccuacgccgacaccaucugcaucggcuaccacgccaacaacagcaccgacaccguggacaccgugcuggagaagaacgugaccgugacccacagcgugaaccugcuggaggacagccacaacggcaagcugugccugcugaagggcaucgccccccugcagcugggcaacugcagcguggccggcuggauccugggcaaccccgagugcgagcugcugaucagcagagagagcuggagcuacaucguggagaagcccaaccccgagaacggcaccugcuaccccggccacuucgccgacuacgaggagcugagagagcagcugagcagcgugagcagcuucgagagauucgagaucuuccccaaggagagcagcuggcccaaccacaccaccaccggcgugagcgccagcugcagccacaacggcgagagcagcuucuacaagaaccugcuguggcugaccggcaagaacggccuguaccccaaccugagcaagagcuacgccaacaacaaggagaaggaggugcuggugcuguggggcgugcaccacccccccaacaucggcaaccagagagcccuguaccacaccgagaacgccuacgugagcguggugagcagccacuacagcagaaaguucacccccgagaucgccaagagacccaaggugagagaccaggagggcagaaucaacuacuacuggacccugcuggagcccggcgacaccaucaucuucgaggccaacggcaaccugaucgcccccagauacgccuucgcccugagcagaggcuucggcagcggcaucaucaacagcaacgcccccauggacgagugcgacgccaagugccagaccccccagggcgccaucaacagcagccugcccuuccagaacgugcaccccgugaccaucggcgagugccccaaguacgugagaagcgccaagcugagaauggugaccggccugagaaacauccccagcauccagagcagaggccuguucggcgccaucgccggcuucaucgagggcggcuggaccggcaugguggacggcugguacggcuaccaccaccagaacgagcagggcagcggcuacgccgccgaccagaagagcacccagaacgccaucaacggcaucaccaacaaggugaacagcgugaucgagaagaugaacacccaguucaccgccgugggcaaggaguucaacaagcuggagagaagaauggagaaccugaacaagaagguggacgacggcuucaucgacaucuggaccuacaacgccgagcugcuggugcugcuggagaacgagagaacccuggacuuccacgacagcaacgugaagaaccuguacgagaaggugaagagccagcugaagaacaacgccaaggagaucggcaacggcugcuucgaguucuaccacaagugcaacgacgagugcauggagagcgugaagaacggcaccuacgacuaccccaaguacagcgaggagagcaagcugaacagagagaagaucgacggcgugaagcuggagagcaugggcguguaccagauccuggccaucuacagcaccguggccagcagccuggugcugcuggugagccugggcgccaucagcuucuggaugugcagcaacggcagccugcagugcagaaucugcaucuga

SEQ ID NO: 168116 - RNA, 1698 nt, Artificial Sequence; identical to SEQ ID NO: 168115
  derived and/or modified CDS sequence (opt4) from hemagglutinin__InfluenzaA__AEX35197

SEQ ID NO: 168117 - RNA, 1698 nt, Artificial Sequence; identical to SEQ ID NO: 162548
  derived and/or modified CDS sequence (opt4) from hemagglutinin__InfluenzaA__AEX35208

SEQ ID NO: 168118 - RNA, 1701 nt, Artificial Sequence
  derived and/or modified CDS sequence (opt4) from hemagglutinin__InfluenzaA__AEX35219
augaagaccaucaucgcccugagcuacauccugugccugguguucgcccagaagcugcccggcaacgacaacagcaccgccacccugugccugggccaccacgccgugcccaacggcacccuggugaagaccaucaccaacgaccagaucgaggugaccaacgccaccgagcuggugcagagcagcagcaccggcggcaucugcgacagcccccaccagauccuggacggcgagaacugcacccugaucgacgcccugcugggcgacccccacugcgacggcuuccagaacaaggagugggaccuguucguggagagaagcaaggccuacagcaacugcuaccccuacgacgugcccgacuacgccagccugagaagccugguggccagcagcggcacccuggaguucaacaacgagagcuucaacuggaccggcguggcccagaacggcaccagcagcgccugcaagagaagaagcaacaagagcuucuucagcagacugaacuggcugcaccagcugaaguacaaguaccccgcccugaacgugaccaugcccaacaacgagaaguucgacaagcuguacaucuggggcgugcaccaccccagcaccgacagcgaccagaucagccuguacgcccaggccagcggcagagugaccgugagcaccaagagaagccagcagaccgugauccccaacaucggcagcagacccugggugagagacgugagcagcagaaucagcaucuacuggaccaucgugaagcccggcgacauccugcugaucaacagcaccggcaaccugaucgcccccagaggcuacuucaagaucagaagcggcaagagcagcaucaugagaagcgacgcccccaucggcaagugcaacagcgagugcaucacccccaacggcagcauccccaacgacaagcccuuccagaacgugaacagaaucaccuacggcgccugccccagauacgugaagcagaacacccugaagcuggccaccggcaugagaaacgugcccgagaagcagaccagaggcaucuucggcgccaucgccggcuucaucgagaacggcugggagggcaugguggacggcugguacggcuucagacaccagaacagcgagggcaccggccaggccgccgaccugaagagcacccaggccgccaucaaccagaucaacggcaagcugaacagacugaucggcaagaccaacgagaaguuccaccagaucgagaaggaguucagcgagguggagggcagaauccaggaccuggagaaguacguggaggacaccaagaucgaccuguggagcuacaacgccgagcugcugguggcccuggagaaccagcacaccaucgaccugaccgacagcgagaugaacaagcuguucgagagaaccaagaagcagcugagagagaacgccgaggacaugggcaacggcugcuucaagaucuaccacaagugcgacaacgccugcaucggcagcaucagaaacggcaccuacgaccacgacguguacagagacgaggcccugaacaacagauuccagaucaagggcguggagcugaagagcggcuacaaggacuggauccuguggaucagcuucgccaugagcugcuuccugcugugcguggugcugcugggcuucaucaugugggccugccagaagggcaacaucagaugcaacaucugcaucuga

SEQ ID NO: 168119 - RNA, 1698 nt, Artificial Sequence; identical to SEQ ID NO: 168060
  derived and/or modified CDS sequence (opt4) from hemagglutinin__InfluenzaA__AEX35230

SEQ ID NO: 168120 - RNA, 1701 nt, Artificial Sequence; identical to SEQ ID NO: 161957
  derived and/or modified CDS sequence (opt4) from hemagglutinin__InfluenzaA__AEX35241

SEQ ID NO: 168121 - RNA, 1698 nt, Artificial Sequence; identical to SEQ ID NO: 168060
  derived and/or modified CDS sequence (opt4) from hemagglutinin__InfluenzaA__AEX35263

SEQ ID NO: 168122 - RNA, 1698 nt, Artificial Sequence; identical to SEQ ID NO: 168060
  derived and/or modified CDS sequence (opt4) from hemagglutinin__InfluenzaA__AEX35274

SEQ ID NO: 168123 - RNA, 1701 nt, Artificial Sequence; identical to SEQ ID NO: 161855
  derived and/or modified CDS sequence (opt4) from hemagglutinin__InfluenzaA__AEX35285

SEQ ID NO: 168124 - RNA, 1701 nt, Artificial Sequence; identical to SEQ ID NO: 168021
  derived and/or modified CDS sequence (opt4) from hemagglutinin__InfluenzaA__AEX35296

SEQ ID NO: 168125 - RNA, 1701 nt, Artificial Sequence
  derived and/or modified CDS sequence (opt4) from hemagglutinin__InfluenzaA__AEX35307
augaagaccaucaucgcccugagcuacauccugugccugguguucgcccagaagauccccggcaacgacaacagcaccgccacccugugccugggccaccacgccgugcccaacggcaccaucgugaagaccaucaccaacgaccagaucgaggugaccaacgccaccgagcuggugcagagcagcagcaccggcggcaucugcgacagcccccaccagauccuggacggcgagaacugcacccugaucgacgcccugcugggcgacccccagugcgacggcuuccagaacaagaagugggaccuguucguggagagaagcaaggccuacagcaacugcuaccccuacgacgugcccgacuacgccagccugagaagccugguggccagcagcggcacccuggaguucaacaacgagagcuucaacuggaccggcgugacccagaacggcaccagcagcgccugcaagagaagaagcaacaagagcuucuucagcagacugaacuggcugacccaccugaaguacaaguaccccgcccugaacgugaccaugcccaacaacgagaaguucgacaagcuguacaucuggggcgugcaccaccccggcaccgacagcgaccagaucagccuguacgcccaggccagcggcagaaucaccgugagcaccaagagaagccagcagaccgugauccccaacaucggcagcagacccagagugagagacgugagcagcagaaucagcaucuacuggaccaucgugaagcccggcgacauccugcugaucaacagcaccggcaaccugaucgcccccagaggcuacuucaagaucagaagcggcaagagcagcaucaugagaagcgacgcccccaucggcaagugcaacagcgagugcaucacccccaacggcagcauccccaacgacaagcccuuccagaacgugaacagaaucaccuacggcgccugccccagauacgugaagcagaacacccugaagcuggccaccggcaugagaaacgugcccgagaagcagaccagaggcaucuucggcgccaucgccggcuucaucgagaacggcugggagggcaugguggacggcugguacggcuucagacaccagaacagcgagggcaccggccaggccgccgaccugaagagcacccaggccgccaucaaccagaucaacggcaagcugaacagacugaucggcaagaccaacgagaaguuccaccagaucgagaaggaguucagcgagguggagggcagaauccaggaccuggagaaguacguggaggacaccaagaucgaccuguggagcuacaacgccgagcugcugguggcccuggagaaccagcacaccaucgaccugaccgacagcgagaugaacaagcuguucgagagaaccaagaagcagcugagagagaacgccgaggacaugggcaacggcugcuucaagaucuaccacaagugcgacaacgccugcaucggcagcaucagaaacggcaccuacgaccacgacguguacagagacgaggcccugaacaacagauuccagaucaagggcguggagcugaagagcggcuacaaggacuggauccuguggaucagcuucgccaucagcugcuuccugcugugcguggugcugcugggcuucaucaugugggccugccagaagggcaacaucagaugcaacaucugcaucuga

SEQ ID NO: 168126 - RNA, 1701 nt, Artificial Sequence; identical to SEQ ID NO: 168021
  derived and/or modified CDS sequence (opt4) from hemagglutinin__InfluenzaA__AEX35318

SEQ ID NO: 168127 - RNA, 1701 nt, Artificial Sequence
  derived and/or modified CDS sequence (opt4) from hemagglutinin__InfluenzaA__AEX35329
augaagaccaucaucgcccugagcuacuuccugugccugguguucgcccagaagcugcccggcaacgacaacagcaccgccacccugugccugggccaccacgccgugcccaacggcaccaucgugaagaccaucaccaacgaccagaucgaggugaccaacgccaccgagcuggugcagaacagcagcaccggcggcaucugcgacagcccccaccagauccuggacggcgagaacugcacccugaucgacgcccugcugggcgacccccagugcgacggcuuccagaacaagaagugggaccuguucguggagagaagcaaggccuacagcaacugcuaccccuacgacgugcccgacuacgccagccugagaagccugguggccagcagcggcacccuggaguucaacaacgagagcuucaacuggaccggcgugacccagaacggcaccagcagcgccugcaagagaagaagcaacaagagcuucuucagcagacugaacuggcugacccaccugaaguacaaguaccccgcccugaacgugaccaugcccaacaacgagaaguucgacaagcuguacaucuggggcgugcaccaccccggcaccgacagcgaccagaucagccuguacgcccaggccagcggcagaaucaccgugagcaccaagagaagccagcagaccgugauccccaacaucggcagcagacccagagugagagacgugagcagcagaaucagcaucuacuggaccaucgugaagcccggcgacauccugcugaucaacagcaccggcaaccugaucgcccccagaggcuacuucaagaucagaagcggcaagagcagcaucaugagaagcgacgcccccaucggcaagugcaacagcgagugcaucacccccaacggcagcauccccaacgacaagcccuuccagaacgugaacagaaucaccuacggcgccugccccagauacgugaagcagaacacccugaagcuggccaccggcaugagaaacgugcccgagaagcagaccagaggcaucuucggcgccaucgccggcuucaucgagaacggcugggagggcaugguggacggcugguacggcuucagacaccagaacagcgagggcaccggccaggccgccgaccugaagagcacccaggccgccaucaaccagaucaacggcaagcugaacagacugaucggcaagaccaacgagaaguuccaccagaucgagaaggaguucagcgagguggagggcagaauccaggaccuggagaaguacguggaggacaccaagaucgaccuguggagcuacaacgccgagcugcugguggcccuggagaaccagcacaccaucgaccugaccgacagcgagaugaacaagcuguucgagagaaccaagaagcagcugagagagaacgccgaggacaugggcaacggcugcuucaagaucuaccacaagugcgacaacgccugcaucggcagcaucagaaacggcaccuacgaccacgacguguacagagacgaggcccugaacaacagauuccagaucaagggcguggagcugaagagcggcuacaaggacuggauccuguggaucagcuucgccaucagcugcuuccugcugugcguggcccugcugggcuucaucaugugggccugccagaagggcaacaucagaugcaacaucugcaucuga

SEQ ID NO: 168128 - RNA, 1701 nt, Artificial Sequence
  derived and/or modified CDS sequence (opt4) from hemagglutinin__InfluenzaA__AEX35340
augaagaccaucaucgcccugagcuacauccugugccugguguucgcccagaagcugcccggcaacgacaacagcaccgccacccugugccugggccaccacgccgugcccaacggcaccaucgugaagaccaucaccaacgaccagaucgaggugaccaacgccaccgagcuggugcagaacagcagcaccggcggcaucugcgacagcccccaccagauccuggacggcgagaacugcacccugaucgacgcccugcugggcgacccccagugcgacggcuuccagaacaagaagugggaccuguucguggagagaagcaaggccuacagcaacugcuaccccuacgacgugcccgacuacgccagccugagaagccugguggccagcagcggcacccuggaguucaacaacgagagcuucaacuggaccggcgugacccagaacggcaccagcagcgccugcaagagaagaagcaacaagagcuucuucagcagacugaacuggcugacccaccugaaguacaaguaccccgcccugaacgugaccaugcccaacaacgagaaguucgacaagcuguacaucuggggcgugcaccaccccggcaccgacagcgaccagaucagccuguacgcccaggccagcggcagaaucaccgugagcaccaagagaagccagcagaccgugauccccaacaucggcagcagacccagagugagagacgugagcagcagaaucagcaucuacuggaccaucgugaagcccggcgacauccugcugaucaacagcaccggcaaccugaucgcccccagaggcuacuucaagaucagaagcggcaagagcagcaucaugagaagcgacgcccccaucggcaagugcaacagcgagugcaucacccccaacggcagcauccccaacgacaagcccuuccagaacgugaacagaaucaccuacggcgccugccccagauacgugaagcagaacacccugaagcuggccaccggcaugagaaacgugcccgagaagcagaccagaggcaucuucggcgccaucgccggcuucaucgagaacggcugggagggcaugguggacggcugguacggcuucagacaccagaacagcgagggcaccggccaggccgccgaccugaagagcacccaggccgccaucaaccagaucaacggcaagcugaacagacugaucggcaagaccaacgagaaguuccaccagaucgagaaggaguucagcgagguggagggcagaauccaggaccuggagaaguacguggaggacaccaagaucgaccuguggagcuacaacgccgagcugcugguggcccuggagaaccagcacaccaucgaccugaccgacagcgagaugaacaagcuguucgagagaaccaagaagcagcugagagagaacgccgaggacaugggcaacggcugcuucaagaucuaccacaagugcgacaacgccugcaucggcagcaucagaaacggcaccuacgaccacgacguguacagagacgaggcccugaacaacagauuccagaucaagggcguggagcugaagagcggcuacaaggacuggauccuguggaucagcuucgccaucagcugcuuccugcugugcguggcccugcugggcuucaucaugugggccugccagaagggcaacaucagaugcaacaucugcaucuga

SEQ ID NO: 168129 - RNA, 1701 nt, Artificial Sequence; identical to SEQ ID NO: 168021
  derived and/or modified CDS sequence (opt4) from hemagglutinin__InfluenzaA__AEX35351

SEQ ID NO: 168130 - RNA, 1701 nt, Artificial Sequence; identical to SEQ ID NO: 168021
  derived and/or modified CDS sequence (opt4) from hemagglutinin__InfluenzaA__AEX35362

SEQ ID NO: 168131 - RNA, 1701 nt, Artificial Sequence; identical to SEQ ID NO: 161855
  derived and/or modified CDS sequence (opt4) from hemagglutinin__InfluenzaA__AEX35373

SEQ ID NO: 168132 - RNA, 1701 nt, Artificial Sequence
  derived and/or modified CDS sequence (opt4) from hemagglutinin__InfluenzaA__AEX35384
augaagaccaucaucgcccugagcuacauccugugccugguguucgcccagaagcugcccggcaacgacaacagcaccgccacccugugccugggccaccacgccgugcccaacggcaccaucgugaagaccaucaccaacgaccagaucgaggugaccaacgccaccgagcuggugcagagcagcagcaccggcggcaucugcgacagcccccaccagauccuggacggcgagaacugcacccugaucgacgcccugcugggcgacccccagugcgacggcuuccagaacaagaagugggaccuguucguggagagaagcaaggccuacagcaacugcuaccccuacgacgugcccgacuacgccagccugagaagccugguggccagcagcggcacccuggaguucaacaacgagagcuucaacuggaccggcgugacccagaacggcaccagcagcgccugcaagagaagaagcaacaagagcuucuucagcagacugaacuggcugacccaccugaaguucaaguaccccgcccugagcgugaccaugcccaacaacgagaaguucgacaagcuguacaucuggggcgugcaccaccccggcaccgacaacgaccagaucagccuguacgcccaggccagcggcagaaucaccgugagcaccaagagaagccagcagaccgugauccccaacaucggcagcagaaccagagugagagacgugcccagcagaaucagcaucuacuggaccaucgugaagcccggcgacauccugcugaucaacagcaccggcaaccugaucgcccccagaggcuacuucaagaucagaagcggcaagagcagcaucaugagaagcgacgcccccaucggcaagugcaacagcgagugcaucacccccaacggcagcauccccaacgacaagcccuuccagaacgugaacagaaucaccuacggcgccugccccagauacgugaagcagaacacccugaagcuggccaccggcaugagaaacgugcccgagaagcagaccagaggcaucuucggcgccaucgccggcuucaucgagaacggcugggagggcaugguggacggcugguacggcuucagacaccagaacagcgagggcaccggccaggccgccgaccugaagagcacccaggccgccaucaaccagaucaacggcaagcugaacagacugaucggcaagaccaacgagaaguuccaccagaucgagaaggaguucagcgagguggagggcagaauccaggaccuggagaaguacguggaggacaccaagaucgaccuguggagcuacaacgccgagcugcugguggcccuggagaaccagcacaccaucgaccugaccgacagcgagaugaacaagcuguucgagagaaccaagaagcagcugagagagaacgccgaggacaugggcaacggcugcuucaagaucuaccacaagugcgacaacgccugcaucggcagcaucagaaacggcaccuacgaccacgacguguacagagacgaggcccugaacaacagauuccagaucaagggcguggagcugaagagcggcuacaaggacuggauccuguggaucagcuucgccaucagcugcuuccugcugugcguggcccugcugggcuucaucaugugggccugccagaagggcaacaucagaugcaacaucugcaucuga

SEQ ID NO: 168133 - RNA, 1701 nt, Artificial Sequence
  derived and/or modified CDS sequence (opt4) from hemagglutinin__InfluenzaA__AEX35395
augaagaccaucaucgcccugagcuacauccugugccugguguucgcccagaagcugcccggcaacgacaacagcaccgccacccugugccugggccaccacgccgugcccaacggcaccaucgugaagaccaucaccaacgaccagaucgaggugaccaacgccaccgagcuggugcagagcagcagcaccggcgagaucugcgacagcccccaccagauccuggacggcgagaacugcacccugaucgacgcccugcugggcgacccccagugcgacggcuuccagaacaagaaguggaaccuguucguggagagaagcaaggccuacagcaacugcuaccccuacgacgugcccgacuacgccagccugagaagccugguggccagcagcggcacccuggaguucaacaacgagagcuucaacuggaccggcgugacccagaacggcaccagcagcgccugcaagagaagaagcaacaagagcuucuucagcagacugaacuggcugacccaccugaaguucaaguaccccgcccugaacgugaccaugcccaacaacgagaaguucgacaagcuguacaucuggggcgugcaccaccccggcaccgacaacgaccagaucagccuguacgcccaggccagcggcagaaucaccgugagcaccaagagaagccagcagaccgugauccccaacaucggcagcagacccagagugagagacgugcccagcagaaucagcaucuacuggaccaucgugaagcccggcgacauccugcugaucaacagcaccggcaaccugaucgcccccagaggcuacuucaagaucagaagcggcaagagcagcaucaugagaagcgacgcccccaucggcaagugcaacagcgagugcaucacccccaacggcagcauccccaacgacaagcccuuccagaacgugaacagaaucaccuacggcgccugccccagauacgugaagcagaacacccugaagcuggccaccggcaugagaaacgugcccgagaagcagaccagaggcaucuucggcgccaucgccggcuucaucgagaacggcugggagggcaugguggacggcugguacggcuucagacaccagaacagcgagggcaccggccaggccgccgaccugaagagcacccaggccgccaucaaccagaucaacggcaagcugaacagacugaucggcaagaccaacgagaaguuccaccagaucgagaaggaguucagcgagguggagggcagaauccaggaccuggagaaguacguggaggacaccaagaucgaccuguggagcuacaacgccgagcugcugguggcccuggagaaccagcacaccaucgaccugaccgacagcgagaugaacaagcuguucgagagaaccaagaagcagcugagagagaacgccgaggacaugggcaacggcugcuucaagaucuaccacaagugcgacaacgccugcaucggcagcaucagaaacggcaccuacgaccacgacguguacagagacgaggcccugaacaacagauuccagaucaagggcguggagcugaagagcggcuacaaggacuggauccuguggaucagcuucgccaucagcugcuuccugcugugcguggcccugcugggcuucaucaugugggccugccagaagggcaacaucagaugcaacaucugcaucuga

SEQ ID NO: 168134 - RNA, 1701 nt, Artificial Sequence; identical to SEQ ID NO: 161855
  derived and/or modified CDS sequence (opt4) from hemagglutinin__InfluenzaA__AEX35406

SEQ ID NO: 168135 - RNA, 1701 nt, Artificial Sequence; identical to SEQ ID NO: 161855
  derived and/or modified CDS sequence (opt4) from hemagglutinin__InfluenzaA__AEX35417

SEQ ID NO: 168136 - RNA, 1701 nt, Artificial Sequence
  derived and/or modified CDS sequence (opt4) from hemagglutinin__InfluenzaA__AEX35428
augaagaccaucaucgcccugagcuacauccugugccugguguucgcccagaagcugcccggcaacgacaacagcaccgccacccugugccugggccaccacgccgugcccaacggcacccuggugaagaccaucaccaacgaccagaucgaggugaccaacgccaccgagcuggugcagagcagcagcaccggcggcaucugcgacagcccccaccagauccuggacggcgagaacugcacccugaucgacgcccugcugggcgacccccacugcgacggcuuccagaacaagaagugggaccuguucguggagagaagcaaggccuacagcaacugcuaccccuacgacgugcccgacuacgccagccugagaagccugguggccagcagcggcacccuggaguucaacaacgagagcuucaacuggaccggcguggcccagaacggcaccagcagcgccugcaagagaagaagcgacaagagcuucuucagcagacugaacuggcugcaccagcugaaguacaaguaccccgcccugaacgugaccaugcccaacaacgagaaguucgacaagcuguacaucuggggcgugcaccaccccggcaccgacagcgaccagaucagccuguacgcccaggccagcggcagaaucaccgugagcaccaagagaagccagcagaccgugauccccaacaucggcagcagacccagagugagagacgugagcagcagaaucagcaucuacuggaccaucgugaagcccggcgacauccuguucaucaacagcaccggcaaccugaucgcccccagaggcuacuucaagaucagaagcggcaagagcagcaucaugagaagcgacgcccccaucgacaagugcaacagcgagugcaucacccccaacggcagcauccccaacgacaagcccuuccagaacgugaacagaaucaccuacggcgccugccccagauacgugaagcagaacacccugaagcuggccaccggcaugagaaacgugcccgagaagcagaccagaggcaucuucggcgccaucgccggcuucaucgagaacggcugggagggcaugguggacggcugguacggcuucagacaccagaacagcgagggcaccggccaggccgccgaccugaagagcacccaggccgccaucaaccagaucaacggcaagcugaacagacugaucggcaagaccaacgagaaguuccaccagaucgagaaggaguucagcgagguggagggcagaauccaggaccuggagaaguacguggaggacaccaagaucgaccuguggagcuacaacgccgagcugcugguggcccuggagaaccagcacaccaucgaccugaccgacagcgagaugaacaagcuguucgagagaaccaagaagcagcugagagagaacgccgaggacaugggcaacggcugcuucaagaucuaccacaagugcgacaacgccugcaucggcagcaucagaaacggcaccuacgaccacgacguguacagagacgaggcccugaacaacagauuccagaucaagggcguggagcugaagagcggcuacaaggacuggauccuguggaucagcuucgccaucagcugcuuccugcugugcguggcccugcugggcuucaucaugugggccugccagaagggcaacaucagaugcaacaucugcaucuga

SEQ ID NO: 168137 - RNA, 1698 nt, Artificial Sequence
  derived and/or modified CDS sequence (opt4) from hemagglutinin__InfluenzaA__AEX35439
augaaggugaagcugcuggugcugcugugcaccuucaccgccaccuacgccgacaccaucugcaucggcuaccacgccaacaacagcaccgacaccguggacaccgugcuggagaagaacgugaccgugacccacagcgugaaccugcuggaggacagccacaacggcaagcugugccugcugaagggcaucgccccccugcagcugggcaacugcagcguggccggcuggauccugggcaaccccgagugcgagcugcugaucagcaaggagagcuggagcuacaucguggagacccccaaccccgagaacggcaccugcuaccccggcuacuucgccgacuacgaggagcugagagagcagcugagcagcgugagcagcuucgagagauucgagaucuuccccaaggagagcagcuggcccaaccacaccgugaccggcgugagcgccagcugcagccacaacggcaagagcagcuucuacagaaaccugcuguggcugaccggcaagaacggccuguaccccaaccugagcaagagcuacgccaacaacaaggagaaggaggugcuggugcuguggggcgugcaccacccccccaacaucggcgaccagagagcccuguaccacaccgagaacgccuacgugagcguggugagcagccacuacagcagaagauucacccccgagaucgccaagagacccaaggugagagaccaggagggcagaaucaacuacuacuggacccugcuggagcccggcgacaccaucaucuucgaggccaacggcaaccugaucgcccccagauucgccuucgcccugagcagaggcuucggcagcggcaucaucaccagcaacgcccccauggacgagugcgacgccaagugccagaccccccagggcgccaucaacagcagccugcccuuccagaacgugcaccccgugaccaucggcgagugccccaaguacgugagaagcgccaagcugagaauggugaccggccugagaaacauccccagcauccagagcagaggccuguucggcgccaucgccggcuucaucgagggcggcuggaccggcaugguggacggcugguacggcuaccaccaccagaacgagcagggcagcggcuacgccgccgaccagaagagcacccagaacgccaucaacggcaucaccaacaaggugaacagcgugaucgagaagaugaacacccaguucaccgccgugggcaaggaguucaacaagcuggagagaagaauggagaaccugaacaagaagguggacgacggcuuccuggacaucuggaccuacaacgccgagcugcuggugcugcuggagaacgagagaacccuggacuuccacgacagcaacgugaagaaccuguacgagaaggugaagagccagcugaagaacaacgccaaggagaucggcaacggcugcuucgaguucuaccacaagugcaacgacgagugcauggagagcgugaagaacggcaccuacgacuaccccaaguacagcgaggagagcaagcugaacagagagaagaucgacggcgugaagcuggagagcaugggcguguaccagauccuggccaucuacagcaccguggccagcagccuggugcugcuggugagccugggcgccaucagcuucuggaugugcagcaacggcagccugcagugcagaaucugcaucuga

SEQ ID NO: 168138 - RNA, 1701 nt, Artificial Sequence
  derived and/or modified CDS sequence (opt4) from hemagglutinin__InfluenzaA__AEX35450
augaagaccaucaucgcccugagcuacauccugugccugguguucgcccagaagcugcccggcaacgacaacagcaccgccacccugugccugggccaccacgccgugcccaacggcaccaucgugaagaccaucaccaacgaccagaucgaggugaccaacgccaccgagcuggugcagagcagcagcaccggcggcaucugcgacagcccccaccagauccuggacggcgagaacugcacccugaucgacgcccugcugggcgacccccagugcgacggcuuccagaacaagaagugggaccuguucguggagagaagcaaggccuacagcaacugcuaccccuacgacgugcccgacuacgccagccugagaagccugguggccagcagcggcacccuggaguucaacaacgagaacuucaacuggaccggcgugacccagaacggcaccagcagcgccugcaagagaagaagcaacaacagcuucuucagcagacugaacuggcugacccaccugaaguucaaguaccccgcccugaacgugaccaugcccaacaacgagaaguucgacaagcuguacaucuggggcgugcaccaccccggcaccgacaacgaccagaucuuccuguacgcccaggccagcggcagaaucaccgugagcaccaagagaagccagcagaccgugauccccaacaucggcagcagacccagagugagaaacauccccagcagaaucagcaucuacuggaccaucgugaagcccggcgacauccugcugaucaacagcaccggcaaccugaucgcccccagaggcuacuucaagauccagagcggcaagagcagcaucaugagaagcgacgcccccaucggcaagugcaacagcgagugcaucacccccaacggcagcauccccaacgacaagcccuuccagaacgugaacagaaucaccuacggcgccugccccagauacgugaagcagaacacccugaagcuggccaccggcaugagaaacgugcccgagaagcagaccagaggcaucuucggcgccaucgccggcuucaucgagaacggcugggagggcaugguggacggcugguacggcuucagacaccagaacagcgagggcaucggccaggccgccgaccugaagagcacccaggccgccaucaaccagaucaacggcaagcugaacagacugaucggcaagaccaacgagaaguuccaccagaucgagaaggaguucagcgagguggagggcagaauccaggaccuggagaaguacguggaggacaccaagaucgaccuguggagcuacaacgccgagcugcugguggcccuggagaaccagcacaccaucgaccugaccgacagcgagaugaacaagcuguucgagagaaccaagaagcagcugagagagaacgccgaggacaugggcaacggcugcuucaagaucuaccacaagugcgacaacgccugcaucggcagcaucagaaacggcaccuacgaccacgacguguacagagacgaggcccugaacaacagauuccagaucaagggcguggagcugaagagcggcuacaaggacuggauccuguggaucagcuucgccaucagcugcuuccugcugugcguggcccugcugggcuucaucaugugggccugccagaagggcaacaucagaugcaacaucugcaucuga

SEQ ID NO: 168139 - RNA, 1701 nt, Artificial Sequence; identical to SEQ ID NO: 160690
  derived and/or modified CDS sequence (opt4) from hemagglutinin__InfluenzaA__AEX35461

SEQ ID NO: 168140 - RNA, 1701 nt, Artificial Sequence
  derived and/or modified CDS sequence (opt4) from hemagglutinin__InfluenzaA__AEX35472
augaagaccaucaucgcccugagcuacauccugugccugguguucgcccagaagcugcccggcaacgacaacagcaccgccacccugugccugggccaccacgccgugcccaacggcaccaucgugaagaccaucaccaacgaccagaucgaggugaccaacgccaccgagcuggugcagagcagcagcaccggcggcaucugcgacagcccccaccagauccuggacggcgagaacugcacccugaucgacgcccugcugggcgacccccagugcgacgacuuccagaacaagaagugggaccuguucguggagagaagcaaggccuacagcaacugcuaccccuacgacgugcccgacuacgccagccugagaagccugguggccagcagcggcacccuggaguucaacaacgagagcuucaacuggaccggcgugacccagaacggcaccagcagcgccugcaagagaagaagcaacaacagcuucuucagcagacugaacuggcugacccaccugaaguucaaguaccccgcccugaacgugaccaugcccaacaacgagaaguucgacaagcuguacaucuggggcgugcaccaccccggcaccgacaacgaccagaucuuccuguacgcccaggccagcggcagaaucaccgugagcaccaagagaagccagcagaccgugauccccaacaucggcagcagacccagagugagaaacauccccagcagaaucagcaucuacuggaccaucgugaagcccggcgacauccugcugaucaacagcaccggcaaccugaucgcccccagaggcuacuucaagaucagaagcggcaagagcagcaucaugagaagcgacgcccccaucggcaagugcaacagcgagugcaucacccccaacggcagcauccccaacgacaagcccuuccagaacgugaacagaaucaccuacggcgccugccccagauacgugaagcagaacacccugaagcuggccaccggcaugagaaacgugcccgagaagcagaccagaggcaucuucggcgccaucgccggcuucaucgagaacggcugggagggcaugguggacggcugguacggcuucagacaccagaacagcgagggcaucggccaggccgccgaccugaagagcacccaggccgccaucaaccagaucaacggcaagcugaacagacugaucggcaagaccaacgagaaguuccaccagaucgagaaggaguucagcgagguggagggcagaauccaggaccuggagaaguacguggaggacaccaagaucgaccuguggagcuacaacgccgagcugcugguggcccuggagaaccagcacaccaucgaccugaccgacagcgagaugaacaagcuguucgagagaaccaagaagcagcugagagagaacgccgaggacaugggcaacggcugcuucaagaucuaccacaagugcgacaacgccugcaucggcagcaucagaaacggcaccuacgaccacgacguguacagagacgaggcccugaacaacagauuccagaucaagggcguggagcugaagagcggcuacaaggacuggauccuguggaucagcuucgccaucagcugcuuccugcugugcguggugcugcugggcuucaucaugugggccugccagaagggcaacaucagaugcaacaucugcaucuga

SEQ ID NO: 168141 - RNA, 1701 nt, Artificial Sequence; identical to SEQ ID NO: 160690
  derived and/or modified CDS sequence (opt4) from hemagglutinin__InfluenzaA__AEX35483

SEQ ID NO: 168142 - RNA, 1701 nt, Artificial Sequence
  derived and/or modified CDS sequence (opt4) from hemagglutinin__InfluenzaA__AEX35494
augaagaccaucaucgcccugagcuacauccugugccugguguucgcccagaagcugcccggcaacgacaacagcaccgccacccugugccugggccaccacgccgugcccaacggcaccaucgugaagaccaucaccaacgaccagaucgaggugaccaacgccaccgagcuggugcagagcagcagcaccggcggcaucugcgacagcccccaccagauccuggacggcgagaacugcacccugaucgacgcccugcugggcgacccccagugcgacggccugcagaacaagaagugggaccuguucguggagagaagcaaggccuacagcaacugcuaccccuacgacgugcccgacuacgccagccugagaagccugguggccagcagcggcacccuggaguucaacaacgagagcuucaacuggaccggcgugacccagaacggcaccagcagcgccugcaagagaagaagcaacaacagcuucuucagcagacugaacuggcugacccaccugaaguucaaguaccccgcccugaacgugaccaugcccaacaacgagaaguucgacaagcuguacaucuggggcgugcaccaccccggcaccgacaacgaccagaucuuccuguacgcccaggccagcggcagaaucaccgugagcaccaagagaagccagcagaccgugauccccaacaucggcagcagacccagagugagaaacauccccagcagaaucagcaucuacuggaccaucgugaagcccggcgacauccugcugaucaacagcaccggcaaccugaucgcccccagaggcuacuucaagaucagaagcggcaagagcagcaucaugagaagcgacgcccccaucggcaagugcaacagcgagugcaucacccccaacggcagcauccccaacgacaagcccuuccagaacgugaacagaaucaccuacggcgccugccccagauacgugaagcagaacacccugaagcuggccaccggcaugagaaacgugcccgagaagcagaccagaggcaucuucggcgccaucgccggcuucaucgagaacggcugggagggcaugauggacggcugguacggcuucagacaccagaacagcgagggcaucggccaggccgccgaccugaagagcacccaggccgccaucaaccagaucaacggcaagcugaacagacugaucggcaagaccaacgagaaguuccaccagaucgagaaggaguucagcgagguggagggcagaauccaggaccuggagaaguacguggaggacaccaagaucgaccuguggagcuacaacgccgagcugcugguggcccuggagaaccagcacaccaucgaccugaccgacagcgagaugaacaagcuguucgagagaaccaagaagcagcugagagagaacgccgaggacaugggcaacggcugcuucaagaucuaccacaagugcgacaacgccugcaucggcagcaucagaaacggcaccuacgaccacgacguguacagagacgaggcccugaacaacagauuccagaucaagggcguggagcugaagagcggcuacaaggacuggauccuguggaucagcuucgccaucagcugcuuccugcugugcguggcccugcugggcuucaucaugugggccugccagaagggcaacaucagaugcaacaucugcaucuga

SEQ ID NO: 168143 - RNA, 1701 nt, Artificial Sequence
  derived and/or modified CDS sequence (opt4) from hemagglutinin__InfluenzaA__AEX35505
augaagaccaucaucgcccugagcuacauccugugccugguguucgcccagaagcugcccggcaacgacaacagcaccgccacccugugccugggccaccacgccgugcccaacggcaccaucgugaagaccaucaccaacgaccagaucgaggugaccaacgccaccgagcuggugcagagcagcagcaccggcggcaucugcgacagcccccaccagauccuggacggcgagaacugcacccugaucgacgcccugcugggcgacccccagugcgacgacuuccagaacaagaagugggaccuguucguggagagaagcaaggccuacagcaacugcuaccccuacgacgugcccgacuacgccagccugagaagccugguggccagcagcggcacccuggaguucaacaacgagagcuucaacuggaccggcgugacccagaacggcaccagcagcgccugcaagagaagaagcaacaacagcuucuucagcagacugaacuggcugacccaccugaaguucaaguaccccgcccugaacgugaccaugcccaacaacgagaaguucgacaagcuguacaucuggggcgugcaccaccccggcaccgacaacgaccagaucuuccuguacgcccaggccagcggcagaaucaccgugagcaccaagagaagccagcagaccgugauccccaacaucggcagcagacccagagugagaaacauccccagcagaaucagcaucuacuggaccaucgugaagcccggcgacauccugcugaucaacagcaccggcaaccugaucgcccccagaggcuacuucaagauccugagcggcaagagcagcaucaugagaagcgacgcccccaucggcaagugcaacagcgagugcaucacccccaacggcagcauccccaacgacaagcccuuccagaacgugaacagaaucaccuacggcgccugccccagauacgugaagcagaacacccugaagcuggccaccggcaugagaaacgugcccgagaagcagaccagaggcaucuucggcgccaucgccggcuucaucgagaacggcugggagggcaugguggacggcugguacggcuucagacaccagaacagcgagggcaucggccaggccgccgaccugaagagcacccaggccgccaucaaccagaucaacggcaagcugaacagacugaucggcaagaccaacgagaaguuccaccagaucgagaaggaguucagcgagguggagggcagaauccaggaccuggagaaguacguggaggacaccaagaucgaccuguggagcuacaacgccgagcugcugguggcccuggagaaccagcacaccaucgaccugaccgacagcgagaugaacaagcuguucgagagaaccaagaagcagcugagagagaacgccgaggacaugggcaacggcugcuucaagaucuaccacaagugcgacaacgccugcaucggcagcaucagaaacggcaccuacgaccacgacguguacagagacgaggcccugaacaacagauuccagaucaagggcguggagcugaagagcggcuacaaggacuggauccuguggaucagcuucgccaucagcugcuuccugcugugcguggcccugcugggcuucaucaugugggccugccagaagggcaacaucagaugcaacaucugcaucuga

SEQ ID NO: 168144 - RNA, 1701 nt, Artificial Sequence
  derived and/or modified CDS sequence (opt4) from hemagglutinin__InfluenzaA__AEX35516
augaagaccaucaucgcccugagcuacauccugugccugguguucgcccagaagcugcccggcaacgacaacagcaccgccacccugugccugggccaccacgccgugcccaacggcaccaucgugaagaccaucaccaacgaccagaucgaggugaccaacgccaccgagcuggugcagagcagcagcaccggcggcaucugcgacagcccccaccagauccuggacggcgagaacugcacccugaucgacgcccugcugggcgacccccagugcgacggccugcagaacaagaagugggaccuguucguggagagaagcaaggccuacagcaacugcuaccccuacgacgugcccgacuacgccagccugagaagccugguggccagcagcggcacccuggaguucaacaacgagagcuucaacuggaccggcgugacccagaacggcaccagcagcgccugcaagagaagaagcaacaacagcuucuucagcagacugaacuggcugacccaccugaaguucaaguaccccgcccugaacgugaccaugcccaacaacgagaaguucgacaagcuguacaucuggggcgugcaccaccccggcaccgacaacgaccagaucuuccuguacgcccaggccagcggcagaaucaccgugagcaccaagagaagccagcagaccgugauccccaacaucggcagcagacccagagugagaaacauccccagcagaaucagcaucuacuggaccaucgugaagcccggcgacauccugcugaucaacagcaccggcaaccugaucgcccccagaggcuacuucaagaucagaagcggcaagagcagcaucaugagaagcgacgcccccaucggcaagugcaacagcgagugcaucacccccaacggcagcauccccaacgacaagcccuuccagaacgugaacagaaucaccuacggcgccugccccagauacgugaagcagaacacccugaagcuggccaccggcaugagaaacgugcccgagaagcagaccagaggcaucuucggcgccaucgccggcuucaucgagaacggcugggagggcaugguggacggcugguacggcuucagacaccagaacagcgagggcaucggccaggccgccgaccugaagagcacccaggccgccaucaaccagaucaacggcaagcugaacagacugaucggcaagaccaacgagaaguuccaccagaucgagaaggaguucagcgagguggagggcagaauccaggaccuggagaaguacguggaggacaccaagaucgaccuguggagcuacaacgccgagcugcugguggcccuggagaaccagcacaccaucgaccugaccgacagcgagaugaacaagcuguucgagagaaccaagaagcagcugagagagaacgccgaggacaugggcaacggcugcuucaagaucuaccacaagugcgacaacgccugcaucggcagcaucagaaacggcaccuacgaccacgacguguacagagacgaggcccugaacaacagauuccagaucaagggcguggagcugaagagcggcuacaaggacuggauccuguggaucagcuucgccaucagcugcuuccugcugugcguggcccugcugggcuucaucaugugggccugccagaagggcaacaucagaugcaacaucugcaucuga

SEQ ID NO: 168145 - RNA, 1701 nt, Artificial Sequence
  derived and/or modified CDS sequence (opt4) from hemagglutinin__InfluenzaA__AEX35527
augaagaccaucaucgcccugagcuacauccugugccugguguucgcccagaagcugcccggcaacgacaacagcaccgccacccugugccugggccaccacgccgugcccaacggcaccaucgugaagaccaucaccaacgaccagaucgaggugaccaacgccaccgagcuggugcagagcagcagcaccggcggcaucugcgacagcccccaccagauccuggacggcgagaacugcacccugaucgacgcccugcugggcgacccccagugcgacggcuuccagaacaagaagugggaccuguucguggagagaagcaaggccuacagcaacugcuaccccuacgacgugcccgacuacgugagccugagaagccugguggccagcagcggcacccuggaguucaacaacgagagcuucaacuggaccggcgugacccagaacggcaccagcagcgccugcaagagaagaagcaacaacagcuucuucagcagacugaacuggcugacccaccugaaguucaaguaccccgcccugaacgugaccaugcccaacaacgagcaguucgacaagcuguacaucuggggcgugcaccaccccggcaccgacaacgaccagaucagccuguacgcccaggccagcggcagaaucaccgugagcaccaagagaagccagcagaccgugauccccaacaucggcagcagacccagagugagagacauccccagcagaaucagcaucuacuggaccaucgugaagcccggcgacauccugcugaucaacagcaccggcaaccugaucgcccccagaggcuacuucaagaucagaagcggcaagagcagcaucaugagaagcgacgcccccaucggcaagugcaacagcgagugcaucacccccaacggcagcauccccaacgacaagcccuuccagaacgugaacagaaucaccuacggcgccugccccagauacgugaagcagaacacccugaagcuggccaccggcaugagaaacgugcccgagaagcagaccagaggcaucuucggcgccaucgccggcuucaucgagaacggcugggagggcaugguggacggcugguacggcuucagacaccagaacagcgagggcaucggccaggccgccgaccugaagagcacccaggccgccaucaaccagaucaacggcaagcugaacagacugaucggcaagaccaacgagaaguuccaccagaucgagaaggaguucagcgagguggagggcagaauccaggaccuggagaaguacguggaggacaccaagaucgaccuguggagcuacaacgccgagcugcugguggcccuggagaaccagcacaccaucgaccugaccgacagcgagaugaacaagcuguucgagagaaccaagaagcagcugagagagaacgccgaggacaugggcaacggcugcuucaagaucuaccacaagugcgacaacgccugcaucggcagcaucagaaacggcaccuacgaccacgacguguacagagacgaggcccugaacaacagauuccagaucaagggcguggagcugaagagcggcuacaaggacuggauccuguggaucagcuucgccaucagcugcuuccugcugugcguggcccugcugggcuucaucaugugggccugccagaagggcaacaucagaugcaacaucugcaucuga

SEQ ID NO: 168146 - RNA, 1701 nt, Artificial Sequence
  derived and/or modified CDS sequence (opt4) from hemagglutinin__InfluenzaA__AEX35549
augaagaccaucaucgcccugagcuacauccugugccugguguucgcccagaagcugcccggcaacgacaacagcaccgccacccugugccugggccaccacgccgugcccaacggcaccaucgugaagaccaucaccaacgaccagaucgaggugaccaacgccaccgagcuggugcagagcagcagcaccggcggcaucugcgacagcccccaccagauccuggacggcgagaacugcacccugaucgacgcccugcugggcgacccccagugcgacggcuuccagaacaagaagugggaccuguucguggagagaagcaaggccuacagcaacugcuaccccuacgacgugcccgacuacgccagccugagaagccugaucgccagcagcggcacccuggaguucaacaacgagagcuucaacuggaccggcgugacccagaacggcaccagcagcgccugcaagagaggcagcaacaacagcuucuucagcagacugaacuggcugacccaccugaaguucaaguaccccgcccugaacgugaccaugcccaacaacgaggaguucgacaagcuguacaucuggggcgugcaccaccccggcaccgacaacgaccagaucagccuguacgcccaggccagcggcaagaucaccgugagcaccaagagaagccagcagaccgugauccccaacaucggcagcagacccagagugagagacauccccagcagaaucagcaucuacuggaccaucgugaagcccggcgacauccugcugaucaacagcaccggcaaccugaucgcccccagaggcuacuucaagaucagaagcggcaagagcagcaucaugagaagcgacgcccccaucgacaagugcaacagcgagugcaucacccccaacggcagcauccccaacgacaagcccuuccagaacgugaacaagaucaccuacggcgccugccccagauacgugaagcagaacacccugaagcuggccaccggcaugagaaacgugcccgagaagcagaccagaggcaucuucggcgccaucgccggcuucaucgagaacggcugggagggcaugguggacggcugguacggcuucagacaccagaacagcgagggcaucggccaggccgccgaccugaagagcacccaggccgccaucgaccagaucaacggcaagcugaacagacugaucggcaagaccaacgagaaguuccaccagaucgagaaggaguucagcgagguggagggcagaauccaggaccuggagaaguacguggaggacaccaagaucgaccuguggagcuacaacgccgagcugcugguggcccuggagaaccagcacaccaucgaccugaccgacagcgagaugaacaagcuguucgagagaaccaagaagcagcugagagagaacgccgaggacaugggcaacggcugcuucaagaucuaccacaagugcgacaacgccugcaucggcagcaucagaaacggcaccuacgaccacgacguguacagagacgaggcccugaacaacagauuccagaucaagggcguggagcugaagagcggcuacaaggacuggauccuguggaucagcuucgccaucagcugcuuccugcugugcguggcccugcugggcuucaucaugugggccugccagaagggcaacaucagaugcaacaucugcaucuga

SEQ ID NO: 168147 - RNA, 1701 nt, Artificial Sequence
  derived and/or modified CDS sequence (opt4) from hemagglutinin__InfluenzaA__AEX35560
augaagaccaucaucgcccugagcuacauccugugccugguguucgcccagaagcugcccggcaacgacaacagcaccgccacccugugccugggccaccacgccgugcccaacggcaccaucgugaagaccaucaccaacgaccagaucgaggugaccaacgccaccgagcuggugcagagcagcagcaccggcggcaucugcgacagcccccaccagauccuggacggcgagaacugcacccugaucgacgcccugcugggcgacccccagugcgacggcuuccagaacaagaagugggaccuguucguggagagaagcaaggccuacagcaacugcuaccccuacgacgugcccgacuacgugagccugagaagccugguggccagcagcggcacccuggaguucaacaacgagagcuucaacuggaccggcgugacccagaacggcaccagcagcgccugcaagagaagaagcaacaacagcuucuucagcagacugaacuggcugacccaccugaaguucaaguaccccgcccugaacgugaccaugcccaacaacgagcaguucgacaagcuguacaucuggggcgugcaccaccccggcaccgacaacgaccagaucagccuguacgcccaggccagcggcagaaucaccgugagcaccaagagaagccagcagaccgugauccccaacaucggcagcagacccagagugagagacauccccagcagaaucagcaucuacuggaccaucgugaagcccggcgacauccugcugaucaacagcaccggcaaccugaucgcccccagaggcuacuucaagaucagaagcggcaagagcagcaucaugagaagcgacgcccccaucggcaagugcaacagcgagugcaucacccccaacggcagcauccccaacgacaagcccuuccagaacgugaacagaaucaccuacggcgccugccccagauacgugaagcagaacacccugaagcuggccaccggcaugagaaacgugcccgagaagcagaccagaggcaucuucggcgccaucgccggcuucaucgagaacggcugggagggcaugguggacggcugguacggcuucagacaccagaacagcgugggcaucggccaggccgccgaccugaagagcacccaggccgccaucaaccagaucaacggcaagcugaacagacugaucggcaagaccaacgagaaguuccaccagaucgagaaggaguucagcgagguggagggcagaauccaggaccuggagaaguacguggaggacaccaagaucgaccuguggagcuacaacgccgagcugcugguggcccuggagaaccagcacaccaucgaccugaccgacagcgagaugaacaagcuguucgagagaaccaagaagcagcugagagagaacgccgaggacaugggcaacggcugcuucaagaucuaccacaagugcgacaacgccugcaucggcagcaucagaaacggcaccuacgaccacgacguguacagagacgaggcccugaacaacagauuccagaucaagggcguggagcugaagagcggcuacaaggacuggauccuguggaucagcuucgccaucagcugcuuccugcugugcguggcccugcugggcuucaucaugugggccugccagaagggcaacaucagaugcaacaucugcaucuga

SEQ ID NO: 168148 - RNA, 1701 nt, Artificial Sequence
  derived and/or modified CDS sequence (opt4) from hemagglutinin__InfluenzaA__AEX35571
augaagaccaucaucgcccugagcuacauccugugccugguguucgcccagaagcugcccggcaacgacaacagcaccgccacccugugccugggccaccacgccgugcccaacggcaccaucgugaagaccaucaccaacgaccagaucgaggugaccaacgccaccgagcuggugcagagcagcagcaccggcggcaucugcgacagcccccaccagauccuggacggcgagaacugcacccugaucgacgcccugcugggcgacccccagugcgacggcuuccagaacaagaagugggaccuguucguggagagaagcagagccuacagcaacugcuaccccuacgacgugcccgacuacgccagccugagaagccugguggccagcagcggcacccuggaguucaacaacgagagcuucaacuggaccggcgugacccagaacggcaccagcagcgccugcaagagaagaagcaacaacagcuucuucagcagacugaacuggcugacccaccugaaguucaaguaccccgcccugaacgugaccaugcccaacaacgagaaguucgacaagcuguacaucuggggcgugcaccaccccggcaccgacaacgaccagaucuuccuguacgcccaggccagcggcagaaucaccgugagcaccaagagaagccagcagaccgugauccccaacaucggcagcagacccagagugagaaacauccccagcagaaucagcaucuacuggaccaucgugaagcccggcgacauccugcugaucaacagcaccggcaaccugaucgcccccagaggcuacuucaagaucagaagcggcaagagcagcaucaugagaagcgacgcccccaucggcaagugcaacagcgagugcaucacccccaacggcagcauccccaacgacaagcccuuccagaacgugaacagaaucaccuacggcgccugccccagauacgugaagcagaacacccugaagcuggccaccggcaugagaaacgugcccgagaagcagaccagaggcaucuucggcgccaucgccggcuucaucgagaacggcugggagggcaugguggacggcugguacggcuucagacaccagaacagcgagggcaucggccaggccgccgaccugaagagcacccaggccgccaucaaccagaucaacggcaagcugaacagacugaucggcaagaccaacgagaaguuccaccagaucgagaaggaguucagcgagguggagggcagaauccaggaccuggagaaguacguggaggacaccaagaucgaccuguggagcuacaacgccgagcugcugguggcccuggagaaccagcacaccaucgaccugaccgacagcgagaugaacaagcuguucgagagaaccaagaagcagcugagagagaacgccgaggacaugggcaacggcugcuucaagaucuaccacaagugcgacaacgccugcaucggcagcaucagaaacggcaccuacgaccacgacguguacagagacgaggcccugaacaacagauuccagaucaagggcguggagcugaagagcggcuacaaggacuggauccuguggaucagcuucgccaucagcugcuuccugcugugcguggcccugcugggcuucaucaugugggccugccagaagggcaacaucagaugcaacaucugcaucuga

SEQ ID NO: 168149 - RNA, 1701 nt, Artificial Sequence; identical to SEQ ID NO: 160690
  derived and/or modified CDS sequence (opt4) from hemagglutinin__InfluenzaA__AEX35582

SEQ ID NO: 168150 - RNA, 1701 nt, Artificial Sequence
  derived and/or modified CDS sequence (opt4) from hemagglutinin__InfluenzaA__AEX35593
augaagaccaucaucgcccugagcuacauccugugccugguguucgcccagaagcugcccggcaacgacaacagcaccgccacccugugccugggccaccacgccgugcccaacggcaccaucgugaagaccaucaccaacgaccagaucgaggugaccaacgccaccgagcuggugcagagcagcagcaccggcggcaucugcgacagcccccaccagauccuggacggcgagaacugcacccugaucgacgcccugcugggcgacccccagugcgacggcuuccagaacaagaagugggaccuguucguggagagaagcaaggccuacagcaacugcuaccccuacgacgugcccgacuacgccagccugagaagccugguggccagcagcggcacccuggaguucaacaacgagagcuucaacuggaccggcgugacccagaacggcaccagcagcgccugcaagagaagaagcaacaacagcuucuucagcagacugaacuggcugacccaccugaaguucaaguaccccgcccugaacgugaccaugcccaacaacgagaaguucgacaagcuguacaucuggggcgugcaccaccccggcaccgacaacgaccagaucuuccuguacgcccaggccagcggcagaaucaccgugagcaccaagagaagccagcagaccgugauccccaacaucggcagcagacccagagugagaaacauccccagcagaaucagcaucuacuggaccaucgugaagcccggcgacauccugcugaucaacagcaccggcaaccugaucgcccccagaggcuacuucaagaucagaagcggcaagagcagcaucaugagaagcgacgccccccugggcaagugcaacagcgagugcaucacccccaacggcagcauccccaacgacaagcccuuccagaacgugaacagaaucaccuacggcgccugccccagauacgugaagcagaacacccugaagcuggccaccggcaugagaaacgugcccgagaagcagaccagaggcaucuucggcgccaucgccggcuucaucgagaacggcugggagggcaugguggacggcugguacggcuucagacaccagaacagcgagggcaucggccaggccgccgaccugaagagcacccaggccgccaucaaccagaucaacggcaagcugaacagacugaucggcaagaccaacgagaaguuccaccagaucgagaaggaguucagcgagguggagggcagaauccaggaccuggagaaguacguggaggacaccaagaucgaccuguggagcuacaacgccgagcugcugguggcccuggagaaccagcacaccaucgaccugaccgacagcgagaugaacaagcuguucgagagaaccaagaagcagcugagagagaacgccgaggacaugggcaacggcugcuucaagaucuaccacaagugcgacaacgccugcaucggcagcaucagaaacggcaccuacgaccacgacguguacagagacgaggcccugaacaacagauuccagaucaagggcguggagcugaagagcggcuacaaggacuggauccuguggaucagcuucgccaucagcugcuuccugcugugcguggcccugcugggcuucaucaugugggccugccagaagggcaacaucagaugcaacaucugcaucuga

SEQ ID NO: 168151 - RNA, 1701 nt, Artificial Sequence; identical to SEQ ID NO: 162432
  derived and/or modified CDS sequence (opt4) from hemagglutinin__InfluenzaA__AEX35604

SEQ ID NO: 168152 - RNA, 1701 nt, Artificial Sequence
  derived and/or modified CDS sequence (opt4) from hemagglutinin__InfluenzaA__AEX35615
augaagaccaucaucgcccugagcuacauccugugccugguguucgcccagaagcugcccggcaacgacaacagcaccgccacccugugccugggccaccacgccgugcccaacggcaccaucgugaagaccaucaccaacgaccagaucgaggugaccaacgccaccgagcuggugcagagcagcagcaccggcgagaucugcgacagcccccaccagauccuggacggcgagaacugcacccugaucgacgcccugcugggcgacccccagugcgacggcuuccagaacaagaagugggaccuguucguggagagaagcaaggccuacagcaacugcuaccccuacgacgugcccgacuacgccagccugagaagccugguggccagcagcggcacccuggaguucaacaacgagagcuucaacuggaccggcgugacccagaacggcaccagcagcgccugcaucagaagaagcaacaacagcuucuucagcagacugaacuggcugacccaccugaaguucaaguaccccgcccugaacgugaccaugcccaacaacgagaaguucgacaagcuguacaucuggggcgugcaccaccccggcaccgacaacgaccagaucuuccuguacgcccaggccagcggcagaaucaccgugagcaccaagagaagccagcagaccgugauccccaacaucggcagcagacccagagugagaaacauccccagcagaaucagcaucuacuggaccaucgugaagcccggcgacauccugcugaucaacagcaccggcaaccugaucgcccccagaggcuacuucaagaucagaagcggcaagagcagcaucaugagaagcgacgcccccaucggcaagugcaacagcgagugcaucacccccaacggcagcauccccaacgacaagcccuuccagaacgugaacagaaucaccuacggcgccugccccagauacgugaagcagaacacccugaagcuggccaccggcaugagaaacgugcccgagaagcagaccagaggcaucuucggcgccaucgccggcuucaucgagaacggcugggagggcaugguggacggcugguacggcuucagacaccagaacagcgagggcaucggccaggccgccgaccugaagagcacccaggccgccaucgaccagaucaacggcaagcugaacagacugaucggcaagaccaacgagaaguuccaccagaucgagaaggaguucagcgagguggagggcagaauccaggaccuggagaaguacaucgaggacaccaagaucgaccuguggagcuacaacgccgagcugcugguggcccuggagaaccagcacaccaucgaccugaccgacagcgagaugaacaagcuguucgagaagaccaagaagcagcugagagagaacgccgaggacaugggcaacggcugcuucaagaucuaccacaagugcgacaacgccugcaucggcagcaucagaaacggcaccuacgaccacgacguguacagagacgaggcccugaacaacagauuccagaucaagggcguggagcugaagagcggcuacaaggacuggauccuguggaucagcuucgccaucagcugcuuccugcugugcguggcccugcugggcuucaucaugugggccugccagaagggcaacaucagaugcaacaucugcaucuga

SEQ ID NO: 168153 - RNA, 1701 nt, Artificial Sequence; identical to SEQ ID NO: 162494
  derived and/or modified CDS sequence (opt4) from hemagglutinin__InfluenzaA__AEX35626

SEQ ID NO: 168154 - RNA, 1701 nt, Artificial Sequence
  derived and/or modified CDS sequence (opt4) from hemagglutinin__InfluenzaA__AEX35637
augaagaccaucaucgcccugagcuacauccugugccugguguucgcccagaagcugcccggcaacgacaacagcaccgccacccugugccugggccaccacgccgugcccaacggcaccaucgugaagaccaucaccaacgaccagaucgaggugaccaacgccaccgagcuggugcagagcagcagcaccggcggcaucugcgacagcccccaccagauccuggacggcgagaacugcacccugaucgacgcccugcugggcgacccccagugcgacggcuuccagaacaagaagugggaccuguucguggagagaagcaaggccuacagcaacugcuaccccuacgacgugcccgacuacgccagccugagaagccugguggccagcagcggcacccuggaguucaacaacgagagcuucaacuggaccggcgugacccagaacggcaccagcagcgccugcaagagaggcagcgacaacagcuucuucagcaagcugaacuggcugacccaccugaaguucaaguaccccgcccugaacgugaccaugcccaacaacgagaaguucgacaagcuguacaucuggggcgugcaccaccccggcaccgacaacgaccagaucuuccccuacgcccaggccagcggcagaaucaccgugagcaccaagagaagccagcagaccgugauccccaacaucggcagcagacccagagugagaaacauccccagcagaaucagcaucuacuggaccaucgugaagcccggcgacauccugcugaucaacagcaccggcaaccugaucgcccccagaggcuacuucaagaucagaagcggcaagagcagcaucaugagaagcgacgcccccaucggcaagugcaacagcgagugcaucacccccaacggcagcauccccaacgacaagcccuuccagaacgugaacagaaucaccuacggcgccugccccagauacgugaagcagaacacccugaagcuggccaccggcaugagaaacgugcccgagaagcagaccagaggcaucuucggcgccaucgccggcuucaucgagaacggcugggagggcaugguggacggcugguacggcuucagacaccagaacagcgagggcaucggccaggccgccgaccugaagagcacccaggccgccaucaaccagaucaacggcaagcugaacagacugaucggcaagaccaacgagaaguuccaccagaucgagaaggaguucagcgagguggagggcagaauccaggaccuggagaaguacguggaggacaccaagaucgaccuguggagcuacaacgccgagcugcugguggcccuggagaaccagcacaccaucgaccugaccgacagcgagaugaacaagcuguucgagagaaccaagaagcagcugagagagaacgccgaggacaugggcaacggcugcuucaagaucuaccacaagugcgacaacgccugcaucggcagcaucagaaacggcaccuacgaccacgacguguacagagacgaggcccugaacaacagauuccagaucaagggcguggagcugaagagcggcuacaaggacuggauccuguggaucagcuucgccaucagcugcuuccugcugugcguggcccugcugggcuucaucaugugggccugccagaagggcaacaucagaugcaacaucugcaucuga

SEQ ID NO: 168155 - RNA, 1701 nt, Artificial Sequence; identical to SEQ ID NO: 162494
  derived and/or modified CDS sequence (opt4) from hemagglutinin__InfluenzaA__AEX35648

SEQ ID NO: 168156 - RNA, 1701 nt, Artificial Sequence
  derived and/or modified CDS sequence (opt4) from hemagglutinin__InfluenzaA__AEX36102
augaagaccaucaucgcccugagcuacauccugugccugguguucgcccagaagcugcccggcaacaacaacagcaccgccacccugugccugggccaccacgccgugcccaacggcaccaucgugaagaccaucaccaacgaccagaucgaggugaccaacgccaccgagcuggugcagagcagcagcaccggcgagaucugcgacagcccccaccagauccuggacggcgagaacugcacccugaucgacgcccugcugggcgacccccagugcgacggcuuccagaacaagaagugggaccuguucguggagagaagcaaggccuacagcaacugcuaccccuacgacgugcccgacuacgccagccugagaagccugguggccagcagcggcacccuggaguucaacaacgagagcuucaacuggaccggcgugacccagaacggcaccagcagcgccugcaucagaagaagcaacaacagcuucuucagcagacugaacuggcugacccaccugaaguucaaguaccccgcccugaacgugaccaugcccaacaacgagaaguucgacaagcuguacaucuggggcgugcaccaccccggcaccgacaacgaccagaucuuccuguacgcccaggccagcggcagaaucaccgugagcaccaagagaagccagcagaccgugauccccaacaucggcagcagacccagagugagaaacauccccagcagaaucagcaucuacuggaccaucgugaagcccggcgacauccugcugaucaacagcaccggcaaccugaucgcccccagaggcuacuucaagaucagaagcggcaagagcagcaucaugagaagcgacgcccccaucggcaagugcaacagcgagugcaucacccccaacggcagcauccccaacgacaagcccuuccagaacgugaacagaaucaccuacggcgccugccccagauacgugaagcagaacacccugaagcuggccaccggcaugagaaacgugcccgagaagcagaccagaggcaucuucggcgccaucgccggcuucaucgagaacggcugggagggcaugguggacggcugguacggcuucagacaccagaacagcgagggcaucggccaggccgccgaccugaagagcacccaggccgccaucgaccagaucaacggcaagcugaacagacugaucggcaagaccaacgagaaguuccaccagaucgagaaggaguucagcgagguggagggcagaauccaggaccuggagaaguacguggaggacaccaagaucgaccuguggagcuacaacgccgagcugcugguggcccuggagaaccagcacaccaucgaccugaccgacagcgagaugaacaagcuguucgagaagaccaagaagcagcugagagagaacgccgaggacaugggcaacggcugcuucaagaucuaccacaagugcgacaacgccugcaucggcagcaucagaaacggcaccuacgaccacgacguguacagagacgaggcccugaacaacagauuccagaucaagggcguggagcugaagagcggcuacaaggacuggauccuguggaucagcuucgccaucagcugcuuccugcugugcguggcccugcugggcuucaucaugugggccugccagaagggcaacaucagaugcaacaucugcaucuga

SEQ ID NO: 168157 - RNA, 1701 nt, Artificial Sequence; identical to SEQ ID NO: 161975
  derived and/or modified CDS sequence (opt4) from hemagglutinin__InfluenzaA__AEX36113

SEQ ID NO: 168158 - RNA, 1701 nt, Artificial Sequence; identical to SEQ ID NO: 162494
  derived and/or modified CDS sequence (opt4) from hemagglutinin__InfluenzaA__AEX36124

SEQ ID NO: 168159 - RNA, 1701 nt, Artificial Sequence
  derived and/or modified CDS sequence (opt4) from hemagglutinin__InfluenzaA__AEX36146
augaagaccaucaucgcccugagcuacauccugugccuggugcuggcccagaagcugcccggcgacgacaacagcaccgccacccugugccugggccaccacgccgugcccaacggcaccaucgugaagaccaucaccaacgaccagaucgaggugaccaacgccaccgagcuggugcagagcagcagcaccggcgagaucugcgacagcccccaccagauccuggacggcgagaacugcacccugaucgacgcccugcugggcgacccccagugcgacggcuuccagaacaagaagugggaccuguucguggagagaagcaaggccuacagcaacugcuaccccuacgacgugcccgacuacgccagccugagaagccugguggccagcagcggcacccuggaguucaacaacgagagcuucaacuggaccggcgugacccagaacggcaccagcagcgccugcaucagaagaagcaacaacagcuucuucagcagacugaacuggcugacccaccugaaguucaaguaccccgcccugaacgugaccaugcccaacaacgagcaguucgacaagcuguacaucuggggcgugcaccaccccggcaccgacaacgaccagaucuuccuguacgcccaggccagcggcagaaucaccgugagcaccaagagaagccagcagaccgugauccccaacaucggcagcagacccagagugagaaacauccccagcagaaucagcaucuacuggaccaucgugaagcccggcgacauccugcugaucaacagcaccggcaaccugaucgcccccagaggcuacuucaagaucagaagcggcaagagcagcaucaugagaagcgacgcccccaucggcaagugcaacagcgagugcaucacccccaacggcagcauccccaacgacaagcccuuccagaacgugaacagaaucaccuacggcgccugccccagauacgugaagcagaacacccugaagcuggccaccggcaugagaaacgugcccgagaagcagaccagaggcaucuucggcgccaucgccggcuucaucgagaacggcugggagggcaugguggacggcugguacggcuucagacaccagaacagcgagggcagaggccaggccgccgaccugaagagcacccaggccgccaucgaccagaucaacggcaagcugaacagacugaucggcaagaccaacgagaaguuccaccagaucgagaaggaguucagcgagguggagggcagaauccaggaccuggagaaguacguggaggacaccaagaucgaccuguggagcuacaacgccgagcugcugguggcccuggagaaccagcacaccaucgaccugaccgacagcgagaugaacaagcuguucgagaagaccaagaagcagcugagagagaacgccgaggacaugggcaacggcugcuucaagaucuaccacaagugcgacaacgccugcaucggcagcaucagaaacggcaccuacgaccacgacguguacagagacgaggcccugaacaacagauuccagaucaagggcguggagcugaagagcggcuacaaggacuggauccuguggaucagcuucgccaucagcugcuuccugcugugcguggcccugcugggcuucaucaugugggccugccagaagggcaacaucagaugcaacaucugcaucuga

SEQ ID NO: 168160 - RNA, 1701 nt, Artificial Sequence
  derived and/or modified CDS sequence (opt4) from hemagglutinin__InfluenzaA__AEX36168
augaagaccaucaucgcccugagcuacauccugugccugguguucgcccagaagcugcccggcaucgacaacagcaccgccacccugugccugggccaccacgccgugcccaacggcaccaucgugaagaccaucaccaacgaccagaucgaggugaccaacgccaccgagcuggugcagagcagcagcaccggcggcaucugcgacagcccccaccagauccuggacggcgagaacugcacccugaucgacgcccugcugggcgacccccagugcgacggcuuccagaacaagaagugggaccuguucguggagagaagcaaggccuacagcaacugcuaccccuacgacgugcccgacuacgccagccugagaagccugguggccagcagcggcacccuggaguucaacaacgagagcuucaacugggccggcgugacccagaacggcaccagcagcgccugcaagagaggcagcgacaacagcuucuucagcagacugaacuggcugacccaccugaaguucaaguaccccgcccugaacgugaccaugcccaacaacgaggaguucgacaagcuguacaucuggggcgugcaccaccccggcaccgacaacgaccagaucuuccuguacgcccaggccagcggcagaaucaccgugagcaccaagagaagccagcagaccgugauccccaacaucggcagcagacccagagugagaaacauccccagcagaaucagcaucuacuggaccaucgugaagcccggcgacauccugcugaucaacagcaccggcaaccugaucgcccccagaggcuacuucaagaucagaagcggcaagagcagcaucaugagaagcgacgcccccaucggcaagugcaacagcgagugcaucacccccaacggcagcauccccaacgacaagcccuuccagaacgugaacagaaucaccuacggcgccugccccagauacgugaagcagaacacccugaagcuggccaccggcaugagaaacgugcccgagaagcagaccagaggcaucuucggcgccaucgccggcuucaucgagaacggcugggagggcaugguggacggcugguacggcuucagacaccagaacagcgagggcaucggccaggccgccgaccugaagagcacccaggccgccaucgaccagaucaacggcaagcugaacaagcugaucggcaagaccaacgagaaguuccaccagaucgagaaggaguucagcgagguggagggcagaauccaggaccuggagaaguacguggaggacaccaagaucgaccuguggagcuacaacgccgagcugcugguggcccuggagaaccagcacaccaucgaccugaccgacagcgagaugaacaagcuguucgagaagaccaagaagcagcugagagagaacgccgaggacaugggcaacggcugcuucaagaucuaccacaagugcgacaacgccugcaucggcagcaucagaaacggcaccuacgaccacgacguguacagagacgaggcccugaacaacagauucaagaucaagggcguggagcugaagagcggcuacaaggacuggauccuguggaucagcuucgccaucagcugcuuccugcugugcguggcccugcugggcuucaucaugugggccugccagaagggcaacaucaagugcaacaucugcaucuga

SEQ ID NO: 168161 - RNA, 1701 nt, Artificial Sequence; identical to SEQ ID NO: 162494
  derived and/or modified CDS sequence (opt4) from hemagglutinin__InfluenzaA__AEX36179

SEQ ID NO: 168162 - RNA, 1701 nt, Artificial Sequence; identical to SEQ ID NO: 168043
  derived and/or modified CDS sequence (opt4) from hemagglutinin__InfluenzaA__AEX36190

SEQ ID NO: 168163 - RNA, 1701 nt, Artificial Sequence; identical to SEQ ID NO: 168038
  derived and/or modified CDS sequence (opt4) from hemagglutinin__InfluenzaA__AEX36201

SEQ ID NO: 168164 - RNA, 1701 nt, Artificial Sequence
  derived and/or modified CDS sequence (opt4) from hemagglutinin__InfluenzaA__AEX36212
augaagaccaucaucgcccugagcuacauccugugccugguguucgcccagaagcugcccggcaucgacaacagcaccgccacccugugccugggccaccacgccgugcccaacggcaccaucgugaagaccaucaccaacgaccagaucgaggugaccaacgccaccgagcuggugcagaacagcagcaccggcggcaucugcgacagcccccaccagauccuggacggcgagaacugcacccugaucgacgcccugcugggcgacccccagugcgacggcuuccagaacaagaagugggaccuguucguggagagaagcaaggccuacagcaacugcuaccccuacgacgugcccgacuacgccagccugagaagccugguggccagcagcggcacccuggaguucaacaacgagagcuucaacuggaccggcgugacccagaacggcaccagcagcgccugcaagagaggcagcaacaacagcuucuucagcagacugaacuggcugacccacagcaaguucaaguaccccgcccugaacgugaccaugcccaacaacgaggaguucgacaagcuguacaucuggggcgugcaccaccccggcaccgacaacgaccagaucuuccuguacgcccaggccagcggcagaaucaccgugagcaccaagaucagccagcagaccgugauccccaacaucggcagcagacccagagugagaaacauccccagcagaaucagcaucuacuggaccaucgugaagcccggcgacauccugcugaucaacagcaccggcaaccugaucgcccccagaggcuacuucaagaucagaagcggcaagagcagcaucaugagaagcgacgcccccaucggcaagugcaacagcgagugcaucacccccaacggcagcauccccaacgacaagcccuuccagaacgugaacagaaucaccuacggcgccugccccagauacgugaagcagaacacccugaagcuggccaccggcaugagaaacgugcccgagaagcagaccagaggcaucuucggcgccaucgccggcuucaucgagaacggcugggagggcaugguggacggcugguacggcuucagacaccagaacagcgagggcaucggccaggccgccgaccugaagagcacccaggccgccaucgaccagaucaacggcaagcugaacagacugaucggcaagaccaacgagaaguuccaccagaucgagaaggaguucagcgagguggagggcagaauccaggaccuggagaaguacguggaggacaccaagaucgaccuguggagcuacaacgccgagcugcugguggcccuggagaaccagcacaccaucgaccugaccgacagcgagaugaacaagcuguucgagaagaccaagaagcagcugagagagaacgccgaggacaugggcaacggcugcuucaagaucuaccacaagugcgacaacgccugcaucggcagcaucagaaacggcaccuacgaccacgacguguacagagacgaggcccugaacaacagauuccagaucaagggcguggagcugaagagcggcuacaaggacuggauccuguggaucagcuucgccaucagcugcuuccugcugugcguggcccugcugggcuucaucaugugggccugccagaagggcaacaucagaugcaacaucugcaucuga

SEQ ID NO: 168165 - RNA, 1701 nt, Artificial Sequence; identical to SEQ ID NO: 168038
  derived and/or modified CDS sequence (opt4) from hemagglutinin__InfluenzaA__AEX36223

SEQ ID NO: 168166 - RNA, 1701 nt, Artificial Sequence
  derived and/or modified CDS sequence (opt4) from hemagglutinin__InfluenzaA__AEX36234
augaagaccaucaucgcccugagcuacauccugugccugguguucgcccagaagcugcccggcaacgacaacagcaccgccacccugugccugggccaccacgccgugcccaacggcaccaucgugaagaccaucaccaacgaccagaucgaggugaccaacgccaccgagcuggugcagagcagcagcaccggcggcaucugcgacagcccccaccagauccuggacggcgagaacugcacccugaucgacgcccugcugggcgacccccagugcgacggcuuccagaacaagaagugggaccuguucguggagagaagcaaggccuacagcaacugcuaccccuacgacgugcccgacuacgccagccugagaagccugguggccagcagcggcacccuggaguucaacaacgagagcuucaacuggaccggcgugacccagaacggcaccagcagcgccugcaagagaggcagcgacaacagcuucuucagcaagcugaacuggcugacccaccugaaguucaaguaccccgcccugaacgugaccaugcccaacaacgagaaguucgacaagcuguacaucuggggcgugcaccaccccggcaccgacaacgaccagaucuuccuguacgcccaggccagcggcagaaucaccgugagcaccaagagaagccagcagaccgugauccccaacaucggcagcagacccagagugagaaacauccccagcagaaucagcaucuacuggaccaucgugaagcccggcgacauccugcugaucaacagcaccggcaaccugaucgcccccagaggcuacuucaagaucagaagcggcaagagcagcaucaugagaagcgacgcccccaucggcaagugcaacagcgagugcaucacccccaacggcagcauccccaacgacaagcccuuccagaacgugaacagaaucaccuacggcgccugccccagauacgugaagcagaacacccugaagcuggccaccggcaugagaaacgugcccgagaagcagaccagaggcaucuucggcgccaucgccggcuucaucgagaacggcugggagggcaugguggacggcugguacggcuucagacaccagaacagcgagggcaucggccaggccgccgaccugaagagcacccaggccgccaucaaccagaucaacggcaagcugaacagacugaucggcaagaccaacgagaaguuccaccagaucgagaaggaguucagcgagguggagggcagaauccaggaccuggagaaguacguggaggacaccaagaucgaccuguggagcuacaacgccgagcugcugguggcccuggagaaccagcacaccaucgaccugaccgacagcgagaugaacaagcuguucgagagaaccaagaagcagcugagagagaacgccgaggacaugggcaacggcugccugaagaucuaccacaagugcgacaacgccugcaucggcagcaucagaaacggcaccuacgaccacgacguguacagagacgaggcccugaacaacagauuccagaucaagggcguggagcugaagagcggcuacaaggacuggauccuguggaucagcuucgccaucagcugcuuccugcugugcguggcccugcugggcuucaucaugugggccugccagaagggcaacaucagaugcaacaucugcaucuga

SEQ ID NO: 168167 - RNA, 1701 nt, Artificial Sequence
  derived and/or modified CDS sequence (opt4) from hemagglutinin__InfluenzaA__AEX36245
augaagaccaucaucgcccugagcuacauccugugccugguguucgcccagaagcugcccggcaucgacaacagcaccgccacccugugccugggccaccacgccgugcccaacggcaccaucgugaagaccaucaccaacgaccagaucgaggugaccaacgccaccgagcuggugcagaacagcagcaccggcggcaucugcgacagcccccaccagauccuggacggcgagaacugcacccugaucgacgcccugcugggcgacccccagugcgacggcuuccagaacaagaagugggaccuguucguggagagaagcaagaccuacagcaacugcuaccccuacgacgugcccgacuacgccagccugagaagccugguggccagcagcggcacccuggaguucaacaacgagagcuucaacuggaccggcgugacccagaacggcaccagcagcgccugcaagagaggcagcaacaacagcuucuucagcagacugaacuggcugacccacagcaaguucaaguaccccgcccugaacgugaccaugcccaacaacgaggaguucgacaagcuguacaucuggggcgugcaccaccccggcaccgacaacgaccagaucuuccuguacgcccaggccagcggcagaaucaccgugagcaccaagagaagccagcagaccgugauccccaacaucggcagcagacccagagugagaaacauccccagcagaaucagcaucuacuggaccaucgugaagcccggcgacauccugcugaucaacagcaccggcaaccugaucgcccccagaggcuacuucaagaucagaagcggcaagagcagcaucaugagaagcgacgcccccaucggcaagugcaacagcgagugcaucacccccaacggcagcauccccaacgacaagcccuuccagaacgugaacagaaucaccuacggcgccugccccagauacgugaagcagaacacccugaagcuggccaccggcaugagaaacgugcccgagaagcagaccagaggcaucuucggcgccaucgccggcuucaucgagaacggcugggagggcaugguggacggcugguacggcuucagacaccagaacagcgagggcaucggccaggccgccgaccugaagagcacccaggccgccaucgaccagaucaacggcaagcugaacagacugaucggcaagaccaacgagaaguuccaccagaucgagaaggaguucagcgagguggagggcagaauccaggaccuggagaaguacguggaggacaccaagaucgaccuguggagcuacaacgccgagcugcugguggcccuggagaaccagcacaccaucgaccugaccgacagcgagaugaacaagcuguucgagaagaccaagaagcagcugagagagaacgccgaggacaugggcaacggcugcuucaagaucuaccacaagugcgacaacgccugcaucggcagcaucagaaacggcaccuacgaccacgacguguacagagacgaggcccugaacaacagauuccagaucaagggcguggagcugaagagcggcuacaaggacuggauccuguggaucagcuucgccaucagcugcuuccugcugugcguggcccugcugggcuucaucaugugggccugccagaagggcaacaucagaugcaacaucugcaucuga

SEQ ID NO: 168168 - RNA, 1701 nt, Artificial Sequence
  derived and/or modified CDS sequence (opt4) from hemagglutinin__InfluenzaA__AEX36256
augaagaccaucaucgcccugagcuacauccugugccugguguucacccagaagcugcccggcaacgacaacagcaccgccacccugugccugggccaccacgccgugcccaacggcaccaucgugaagaccaucaccaacgaccagaucgaggugaccaacgccaccgagcuggugcagagcagcagcaccggcgagaucugcgacagcccccaccagauccuggacggcgagaacugcacccugaucgacgcccugcugggcgacccccagugcgacggcuuccagaacaagaagugggaccuguucguggagagaagcaaggccuacagcaacugcuaccccuacgacgugcccgacuacgccagccugagaagccugguggccagcagcggcacccuggaguucaacaacgagagcuucaacuggaccggcgugacccagaacggcaccagcagcgccugcaucagaaagagcaacaacagcuucuucagcagacugaacuggcugacccaccugaaguucaaguaccccgcccugaacgugaccaugcccaacaacgagcaguucgacaagcuguacaucuggggcgugcaccaccccggcaccgacaacgaccagaucuuccuguacgcccaggccagcggcagaaucaccgugagcaccaagagaagccagcagaccgugauccccaacaucggcagcagacccagagugagaaacauccccagcagaaucagcaucuacuggaccaucgugaagcccggcgacauccugcugaucaacagcaccggcaaccugaucgcccccagaggcuacuucaagaucagaagcggcaagagcagcaucaugagaagcgacgcccccaucggcaagugcaacagcgagugcaucacccccaacggcagcauccccaacgacaagcccuuccagaacgugaacagaaucaccuacggcgccugccccagauacgugaagcagaacacccugaagcuggccaccggcaugagaaacgugcccgagaagcagaccagaggcaucuucggcgccaucgccggcuucaucgagaacggcugggagggcaugguggacggcugguacggcuucagacaccagaacagcgagggcagaggccaggccgccgaccugaagagcacccaggccgccaucgaccagaucaacggcaagcugaacagacugaucggcaagaccaacgagaaguuccaccagaucgagaaggaguucagcgagguggagggcagaauccaggaccuggagaaguacguggaggacaccaagaucgaccuguggagcuacaacgccgagcugcugguggcccuggagaaccagcacaccaucgaccugaccgacagcgagaugaacaagcuguucgagaagaccaagaagcagcugagagagaacgccgaggacaugggcaacggcugcuucaagaucuaccacaagugcgacaacgccugcaucggcagcaucagaaacggcaccuacgaccacgacguguacagagacgaggcccugaacaacagauuccagaucaagggcguggagcugaagagcggcuacaaggacuggauccuguggaucagcuucgccaucagcugcuuccugcugugcguggcccugcugggcuucaucaugugggccugccagaagggcaacaucagaugcaacaucugcaucuga

SEQ ID NO: 168169 - RNA, 1701 nt, Artificial Sequence; identical to SEQ ID NO: 168038
  derived and/or modified CDS sequence (opt4) from hemagglutinin__InfluenzaA__AEX36267

SEQ ID NO: 168170 - RNA, 1701 nt, Artificial Sequence
  derived and/or modified CDS sequence (opt4) from hemagglutinin__InfluenzaA__AEX36289
augaagaccaucaucgcccugagcuacauccugugccugguguucgcccagaagcugcccggcaucgacaacagcaccgccacccugugccugggccaccacgccgugcccaacggcaccaucgugaagaccaucaccaacgaccagaucgaggugaccaacgccaccgagcuggugcagaacagcagcaccggcggcaucugcgacagcccccaccagauccuggacggcgagaacugcacccugaucgacgcccugcugggcgacccccagugcgacggcuuccagaacaagaagugggaccuguucguggagagaagcaaggccuacagcaacugcuaccccuacgacgugcccgacuacgccagccugagaagccugguggccagcagcggcacccuggaguucaacaacgagagcuucaacuggaccggcgugacccagaacggcaccagcagcgccugcaagagaggcagcaacaacagcuucuucagcagacugaacuggcugacccacagcaaguucaaguaccccgcccugaacgugaccaugcccaacaacgaggaguucgacaagcuguacaucuggggcgugcaccaccccggcaccgacaacgaccagaucuuccuguacgcccaggccagcggcagaaucaccgugagcaccaagaucagccagcagaccgugauccccaacaucggcagcagacccagagugagaaacauccccagcagaaucagcaucuacuggaccaucgugaagcccggcgacauccugcugaucaacagcaccggcaaccugaucgcccccagaggcuacuucaagaucagaagcggcaagagcagcaucaugagaagcgacgcccccaucggcaagugcaacagcgagugcaucacccccaacggcagcauccccaacgacaagcccuuccagaacgugaacagaaucaccuacggcgccugccccagauacgugaagcagaacacccugaagcuggccaccggcaugagaaacgugcccgagaagcagaccagaggcaucuucggcgccaucgccggcuucaucgagaacggcugggagggcaugguggacggcugguacggcuacagacaccagaacagcgagggcaucggccaggccgccgaccugaagagcacccaggccgccaucgaccagaucaacggcaagcugaacagacugaucggcaagaccaacgagaaguuccaccagaucgagaaggaguucagcgagguggagggcagaauccaggaccuggagaaguacguggaggacaccaagaucgaccuguggagcuacaacgccgagcugcugguggcccuggagaaccagcacaccaucgaccugaccgacagcgagaugaacaagcuguucgagaagaccaagaagcagcugagagagaacgccgaggacaugggcaacggcugcuucaagaucuaccacaagugcgacaacgccugcaucggcagcaucagaaacggcaccuacgaccacgacguguacagagacgaggcccugaacaacagauuccagaucaagggcguggagcugaagcugggcuacaaggacuggauccuguggaucagcuucgccaucagcugcuuccugcugugcguggcccugcugggcuucaucaugugggccugccagaagggcaacaucagaugcaacaucugcaucuga

SEQ ID NO: 168171 - RNA, 1701 nt, Artificial Sequence
  derived and/or modified CDS sequence (opt4) from hemagglutinin__InfluenzaA__AEX36300
augaagaccaucaucgcccugagcuacauccugugccugguguucgcccagaagcugcccggcaucgacaacagcaccgccacccugugccugggccaccacgccgugcccaacggcaccaucgugaagaccaucaccaacgaccagaucgaggugaccaacgccaccgagcuggugcagaacagcagcaccggcggcaucugcgacagcccccaccagauccuggacggcgagaacugcacccugaucgacgcccugcugggcgacccccagugcgacggcuuccagaacaagaagugggaccuguucguggagagaagcaaggccuacagcaacugcuaccccuacgacgugcccgacuacgccagccugagaagccugguggccagcagcggcacccuggaguucagcaacgagagcuucaacuggaccggcgugacccagaacggcaccagcagcgccugcaagagaggcagcaacaacagcuucuucagcaagcugaacuggcugacccacagcaaguucaaguaccccgcccugaacgugaccaugcccaacaacgaggaguucgacaagcuguacaucuggggcgugcaccaccccggcaccgacaacgaccagaucuuccuguacgcccaggccagcggcagaaucaccgugagcaccaagagaagccagcagaccgugauccccaacaucggcagcagacccagagugagaaacauccccagcagaaucagcaucuacuggaccaucgugaagcccggcgacauccugcugaucaacagcaccggcaaccugaucgcccccagaggcuacuucaagaucagaagcggcaagagcagcaucaugagaagcgacgcccccaucggcaagugcaacagcgagugcaucacccccaacggcagcauccccaacgacaagcccuuccagaacgugaacagaaucaccuacggcgccugccccagauacgugaagcagaacacccugaagcuggccaccggcaugagaaacgugcccgagaagcagaccagaggcaucuucggcgccaucgccggcuucaucgagaacggcugggagggcaugguggacggcugguacggcuucagacaccagaacagcgagggcaucggccaggccgccgaccugaagagcacccaggccgccaucgaccagaucaacggcaagcugaacagacugaucggcaagaccaacgagaaguuccaccagaucgagaaggaguucagcgagguggagggcagaauccaggaccuggagaaguacguggaggacaccaagaucgaccuguggagcuacaacgccgagcugcugguggcccuggagaaccagcacaccaucgaccugaccgacagcgagaugaacaagcuguucgagaagaccaagaagcagcugagagagaacgccgaggacaugggcaacggcugcuucaagaucuaccacaagugcgacaacgccugcaucggcagcaucagaaacggcaccuacgaccacgacguguacagagacgaggcccugaacaacagauuccagaucaagggcguggagcugaagagcggcuacaaggacuggauccuguggaucagcuucgccaucagcugcuuccugcugugcguggcccugcugggcuucaucaugugggccugccagaagggcaacaucagaugcaacaucugcaucuga

SEQ ID NO: 168172 - RNA, 1701 nt, Artificial Sequence
  derived and/or modified CDS sequence (opt4) from hemagglutinin__InfluenzaA__AEX36311
augaagaccaucaucgcccugagcuacauccugugccugguguucgcccagaagcugcccggcaucgacaacagcaccgccacccugugccugggccaccacgccgugcccaacggcaccaucgugaagaccaucaccaacgaccagaucgaggugaccaacgccaccgagcuggugcagagcagcagcaccggcggcaucugcgacagcccccaccagauccuggacggcgagaacugcacccugaucgacgcccugcugggcgacccccagugcgacggcuuccagaacaagaagugggaccuguucguggagagaagcaaggccuacagcaacugcuaccccuacgacgugcccgacuacgccagccugagaagccugguggccagcagcggcacccuggaguucaacaacgagagcuucaacugggccggcgugacccagaacggcaccagcagcgccugcaagagaggcagcaacaacagcuucuucagcagacugaacuggcugacccaccugaaguucaaguaccccgcccugaacgugaccaugcccaacaacgaggaguucgacaagcuguacaucuggggcgugcaccaccccggcaccgacaacgaccagaucuuccuguacgcccaggccagcggcagaaucaccgugagcaccaagagaagccagcagaccgugauccccaacaucggcagcagacccagagugagaaacauccccagcagaaucagcaucuacuggaccaucgugaagcccggcgacauccugcugaucaacagcaccggcaaccugaucgcccccagaggcuacuucaagaucagaagcggcaagagcagcaucaugagaagcgacgcccccaucggcaagugcaacagcgagugcaucacccccaacggcagcauccccaacgacaagcccuuccagaacgugaacagaaucaccuacggcgccugccccagauacgugaagcagaacacccugaagcuggccaccggcaugagaaacgugcccgagaagcagaccagaggcaucuucggcgccaucgccggcuucaucgagaacggcugggagggcaugguggacggcugguacggcuucagacaccagaacagcgagggcaucggccaggccgccgaccugaagagcacccaggccgccaucgaccagaucaacggcaagcugaacagacugaucggcaagaccaacgagaaguuccaccagaucgagaaggaguucagcgagguggagggcagaauccaggaccuggagaaguacguggaggacaccaagaucgaccuguggagcuacaacgccgagcugcugguggcccuggagaaccagcacaccaucgaccugaccgacagcgagaugaacaagcuguucgagaagaccaagaagcagcugagagagaacgccgaggacaugggcaacggcugcuucaagaucuaccacaagugcgacaacgccugcaucggcagcaucagaaacggcaccuacgaccacgacguguacagagacgaggcccugaacaacagauuccagaucaagggcguggagcugaagagcggcuacaaggacuggauccuguggaucagcuucgccaucagcugcuuccugcugugcguggcccugcugggcuucaucaugugggccugccagaagggcaacaucagaugcaacaucugcaucuga

SEQ ID NO: 168173 - RNA, 1701 nt, Artificial Sequence
  derived and/or modified CDS sequence (opt4) from hemagglutinin__InfluenzaA__AEX36322
augaagaccaucaucgcccugagcuacauccugugccugguguucgcccagaagcugcccggcaucgacaacagcaccgccacccugugccugggccaccacgccgugcccaacggcaccaucgugaagaccaucaccaacgaccagaucgaggugaccaacgccaccgagcuggugcagaacagcagcaccggcggcaucugcgacagcccccaccagauccuggacggcgagaacugcacccugaucgacgcccugcugggcgacccccagugcgacggcuuccagaacaagaagugggaccuguucguggagagaagcaaggccuacagcaacugcuaccccuacgacgugcccgacuacgccagccugagaagccugguggccagcagcggcacccuggaguucaacaacgagagcuucaacuggaccggcgugacccagaacggcaccagcagcgccugcaagagaggcagcaacaacagcuucuucagcagacugaacuggcugacccacagcaaguucaaguaccccgcccugaacgugaccaugcccaacaacgaggaguucgacaagcuguacaucuggggcgugcaccaccccggcaccgacaacgaccagaucuuccccuacgcccaggccagcggcagaaucaccgugagcaccaagaucagccagcagaccgugauccccaacaucggcagcagacccagagugagaaacauccccagcagaaucagcaucuacuggaccaucgugaagcccggcgacauccugcugaucaacagcaccggcaaccugaucgcccccagaggcuacuucaagaucagaagcggcaagagcagcaucaugagaagcgacgcccccaucggcaagugcaacagcgagugcaucacccccaacggcagcauccccaacgacaagcccuuccagaacgugaacagaaucaccuacggcgccugccccagauacgugaagcagaacacccugaagcuggccaccggcaugagaaacgugcccgagaagcagaccagaggcaucuucggcgccaucgccggcuucaucgagaacggcugggagggcaugguggacggcugguacggcuucagacaccagaacagcgagggcaucggccaggccgccgaccugaagagcacccaggccgccaucgaccagaucaacggcaagcugaacagacugaucggcaagaccaacgagaaguuccaccagaucgagaaggaguucagcgagguggagggcagaauccaggaccuggagaaguacguggaggacaccaagaucgaccuguggagcuacaacgccgagcugcugguggcccuggagaaccagcacaccaucgaccugaccgacagcgagaugaacaagcuguucgagaagaccaagaagcagcugagagagaacgccgaggacaugggcaacggcugcuucaagaucuaccacaagugcgacaacgccugcaucggcagcaucagaaacggcaccuacgaccacgacguguacagagacgaggcccugaacaacagauuccagaucaagggcguggagcugaagagcggcuacaaggacuggauccuguggaucagcuucgccaucagcugcuuccugcugugcaucgcccugcugggcuucaucaugugggccugccagaagggcaacaucagaugcaacaucugcaucuga

SEQ ID NO: 168174 - RNA, 1701 nt, Artificial Sequence
  derived and/or modified CDS sequence (opt4) from hemagglutinin__InfluenzaA__AEX36333
augaagaccaucaucgcccugagcuacauccugugccugguguucgcccagaagcugcccggcaucgacaacagcaccgccacccugugccugggccaccacgccgugcccaacggcaccaucgugaagaccaucaccaacgaccagaucgaggugaccaacgccaccgagcuggugcagaacagcagcaccggcggcaucugcgacagcccccaccagauccuggacggcgagaacugcacccugaucgacgcccugcugggcgacccccagugcgacggcuuccagaacaagaagugggaccuguucguggagagaagcaaggccuacagcaacugcuaccccuacgacgugcccgacuacgccagccugagaagccugguggccagcagcggcacccuggaguucaacaacgagagcuucaacuggaccggcgugacccagaacggcaccagcagcgccugcaagagaggcagcaacaacagcuucuucagcagacugaacuggcugacccacagcaaguucaaguaccccgcccugaacgugaccaugcccaacaacgaggaguucgacaagcuguacaucuggggcgugcaccaccccggcaccgacaacgaccagaucuuccuguacgcccaggccagcggcagaaucaccgugagcaccaagagaagccagcagaccgugauccccaacaucggcagcagacccagagugagaaacauccccagcagaaucagcaucuacuggaccaucgugaagcccggcgacauccugcugaucaacagcaccggcaaccugaucgcccccagaggcuacuucaagaucagaagcggcaagagcagcaucaugagaagcgacgcccccaucggcaagugcaacagcgagugcaucacccccaacggcagcauccccaacgacaagcccuuccagaacgugaacagaaucaccuacggcgccugccccagauacgugaagcagaacacccugaagcuggccaccggcaugagaaacgugcccgagaagcagaccagaggcaucuucggcgccaucgccggcuucaucgagaacggcugggagggcaugguggacggcugguacggcuucagacaccagaacagcgagggcaucggccaggccgccgaccugaagagcacccaggccgccaucgaccagaucaacggcaagcugaacagacugaucggcaagaccaacgagaaguuccaccagaucgagaaggaguucagcgagguggagggcagaauccaggaccuggagaaguacguggaggacaccaagaucgaccuguggagcuacaacgccgagcugcugguggcccuggagaaccagcacaccaucgaccugaccgacagcgagaugaacaagcuguucgagaagaccaagaagcagcugagagagaacgccgaggacaugggcaacggcugcuucaagaucuaccacaagugcgacaacgccugcaucggcagcaucagaaacggcaccuacgaccacgacgccuacagagacgaggcccugaacaacagauuccagaucaagggcguggagcugaagagcggcuacaaggacuggauccuguggaucagcuucgccaucagcugcuuccugcugugcguggcccugcugggcuucaucaugugggccugccagaagggcaacaucagaugcaacaucugcaucuga

SEQ ID NO: 168175 - RNA, 1701 nt, Artificial Sequence
  derived and/or modified CDS sequence (opt4) from hemagglutinin__InfluenzaA__AEX36344
augaagaccaucaucgcccugagcuacauccugugccugguguucgcccagaagcugcccggcaucgacaacagcaccgccacccugugccugggccaccacgccgugcccaacggcaccaucgugaagaccaucaccaacgaccagaucgaggugaccaacgccaccgagcuggugcagagcagcagcaccggcggcaucugcgacagcccccaccagauccuggacggcgagaacugcacccugaucgacgcccugcugggcgacccccagugcgacggcuuccagaacaagaagugggaccuguucguggagagaagcaacgccuacagcaacugcuaccccuacgacgugcccgacuacgccagccugagaagccugguggccagcagcggcacccuggaguucaacaacgagagcuucaacugggccggcgugacccagaacggcaccagcagcgccugcaagagaggcagcaacaacagcuucuucagcagacugaacuggcugacccaccugaaguucaaguaccccgcccugaacgugaccaugcccaacaacgaggaguucgacaagcuguacaucuggggcgugcaccaccccggcaccgacaacgaccagaucuuccuguacgcccaggccagcggcagaaucaccgugagcaccaagagaagccagcagaccgugauccccaacaucggcagcagacccagagugagaaacauccccagcagaaucagcaucuacuggaccaucgugaagcccggcgacauccugcugaucaacagcaccggcaaccugaucgcccccagaggcuacuucaagaucagaagcggcaagagcagcaucaugagaagcgacgcccccaucggcaagugcaacagcgagugcaucacccccaacggcagcauccccaacgacaagcccuuccagaacgugaacagaaucaccuacggcgccugccccagauacgugaagcagaacacccugaagcuggccaccggcaugagaaacgugcccgagaagcagaccagaggcaucuucggcgccaucgccggcuucaucgagaacggcugggagggcaugguggacggcugguacggcuucagacaccagaacagcgagggcaucggccaggccgccgaccugaagagcacccaggccgccaucgaccagaucaacggcaagcugaacagacugaucggcaagaccaacgagaaguuccaccagaucgagaaggaguucagcgagguggagggcagaauccaggaccuggagaaguacguggaggacaccaagaucgaccuguggagcuacaacgccgagcugcugguggcccuggagaaccagcacaccaucgaccugaccgacagcgagaugaacaagcuguucgagaagaccaagaagcagcugagagagaacgccgaggacaugggcaacggcugcuucaagaucuaccacaagugcgacaacgccugcaucgagagcaucagaaacggcaccuacgaccacgacguguacagagacgaggcccugaacaacagauuccagaucaagggcguggagcugaagagcggcuacaaggacuggauccuguggaucagcuucgccaucagcugcuuccugcugugcguggcccugcugggcuucaucaugugggccugccagaagggcaacaucagaugcaacaucugcaucuga

SEQ ID NO: 168176 - RNA, 1701 nt, Artificial Sequence
  derived and/or modified CDS sequence (opt4) from hemagglutinin__InfluenzaA__AEX36366
augaagaccaucaucgcccugagcuacauccugugccugguguucgcccagaagcugagcggcaacgacaacagcaccgccacccugugccugggccaccacgccgugcccaacggcaccaucgugaagaccaucaccaacgaccagaucgaggugaccaacgccaccgagcuggugcagagcagcagcaccggcgagaucugcgacagcccccaccagauccuggacggcgagaacugcacccugaucgacgcccugcugggcgacccccagugcgacggcuuccagaacaagaagugggaccuguucguggagagaagcaaggccuacagcaacugcuaccccuacgacgugcccgacuacgccagccugagaagccugguggccagcagcggcacccuggaguucaacaacgagagcuucaacuggaccggcgugacccagaacggcaccagcagcgccugcaucagaagaagcaacaacagcuucuucagcagacugaacuggcugacccaccugaaguucaaguaccccgcccugaacgugaccaugcccaacaacgagaaguucgacaagcuguacaucuggggcgugcaccaccccggcaccgacaacgaccagaucuuccuguacgcccaggccagcggcagaaucaccgugagcaccaagagaagccagcagaccgugauccccaacaucggcagcagacccagagugagaaacauccccagcagaaucagcaucuacuggaccaucgugaagcccggcgacauccugcugaucaacagcaccggcaaccugaucgcccccagaggcuacuucaagaucagaagcggcaagagcagcaucaugagaagcgacgcccccaucggcaagugcaacagcgagugcaucacccccaacggcagcauccccaacgacaagcccuuccagaacgugaacagaaucaccuacggcgccugccccagauacgugaagcagaacacccugaagcuggccaccggcaugagaaacgugcccgagaagcagaccagaggcaucuucggcgccaucgccggcuucaucgagaacggcugggagggcaugguggacggcugguacggcuucagacaccagaacagcgagggcaucggccaggccgccgaccugaagagcacccaggccgccaucgaccagaucaacggcaagcugaacagacugaucggcaagaccaacgagaaguuccaccagaucgagaaggaguucagcgagguggagggcagaauccaggaccuggagaaguacguggaggacaccaagaucgaccuguggagcuacaacgccgagcugcugguggcccuggagaaccagcacaccaucgaccugaccgacagcgagaugaacaagcuguucgagaagaccaagaagcagcugagagagaacgccgaggacaugggcaacggcugcuucaagaucuaccacaagugcgacaacgccugcaucggcagcaucagaaacggcaccuacgaccacgacguguacagagacgaggcccugaacaacagauuccagaucaagggcguggagcugaagagcggcuacaaggacuggauccuguggaucagcuucgccaucagcugcuuccugcugugcguggcccugcugggcuucaucaugugggccugccagaagggcaacaucagaugcaacaucugcaucuga

SEQ ID NO: 168177 - RNA, 1701 nt, Artificial Sequence; identical to SEQ ID NO: 161988
  derived and/or modified CDS sequence (opt4) from hemagglutinin__InfluenzaA__AEX36377

SEQ ID NO: 168178 - RNA, 1701 nt, Artificial Sequence
  derived and/or modified CDS sequence (opt4) from hemagglutinin__InfluenzaA__AEX36388
augaagaccaucaucgcccugagcuacauccugugccugguguucgcccagaagcugcccggcaacgacaacagcaccgccacccugugccugggccaccacgccgugcccaacggcaccaucgugaagaccaucaccaacgaccagaucgaggugaccaacgccaccgagcuggugcagagcagcagcaccggcgagaucugcgacagcccccaccagauccuggacggcgagaacugcacccugaucgacgcccugcugggcgacccccagugcgacggcuuccagaacaagaagugggaccuguucguggagagaagcaaggccuacagcaacugcuaccccuacgacgugcccgacuacgccagccugagaagccugguggccagcagcggcacccuggaguucaacaacgagagcuucaacuggaccggcgugacccagaacggcaccagcagcgccugcaucagaagaagcaacaacagcuucuucagcagacugaacuggcugacccaccugaaguucaaguaccccgcccugaacgugaccaugcccaacaacgagaaguucgacaagcuguacaucuggggcgugcaccaccccggcaccgacaacgaccagaucuuccuguacgcccaggccagcggcagaaucaccgugagcaccaagagaagccagcagaccgugauccccaacaucggcagcagacccagagugagaaacauccccagcagaaucagcaucuacuggaccaucgugaagcccggcgacauccugcugaucaacagcaccggcaaccugaucgcccccagaggcuacuucaagaucagaagcggcaagagcagcaucaugagaagcgacgcccccaucggcaagugcaacagcgagugcaucacccccaacggcagcauccccaacgacaagcccuuccagaacgugaacagaaucaccuacggcgccugccccagauacgugaagcagaacacccugaagcuggccaccggcaugagaaacgugcccgagaagcagaccagaggcaucuucggcgccaucgccggcuucaucgagaacggcugggagggcaugauggacggcugguacggcuucagacaccagaacagcgagggcaucggccaggccgccgaccugaagagcacccaggccgccaucgaccagaucaacggcaagcugaacagacugaucggcaagaccaacgagaaguuccaccagaucgagaaggaguucagcgagguggagggcagaauccaggaccuggagaaguacguggaggacaccaagaucgaccuguggagcuacaacgccgagcugcugguggcccuggagaaccagcacaccaucgaccugaccgacagcgagaugaacaagcuguucgagaagaccaagaagcagcugagagagaacgccgaggacaugggcaacggcugcuucaagaucuaccacaagugcgacaacgccugcaucggcagcaucagaaacggcaccuacgaccacgacguguacagagacgaggcccugaacaacagauuccagaucaagggcguggagcugaagagcggcuacaaggacuggauccuguggaucagcuucgccaucagcugcuuccugcugugcguggcccugcugggcuucaucaugugggccugccagaagggcaacaucagaugcaacaucugcaucuga

SEQ ID NO: 168179 - RNA, 1701 nt, Artificial Sequence
  derived and/or modified CDS sequence (opt4) from hemagglutinin__InfluenzaA__AEX36399
augaagaccaucaucgcccugagcuacauccugugccugguguucgcccagaagcugcccggcaacgacaacagcaccgccacccugugccugggccaccacgccgugcccaacggcaccaucgugaagaccaucaccaacgaccagaccgaggugaccaacgccaccgagcuggugcagagcagcagcaccggcgagaucugcgacagcccccaccagauccuggacggcgagaacugcacccugaucgacgcccugcugggcgacccccagugcgacggcuuccagaacaagaagugggaccuguucguggagagaagcaaggccuacagcaacugcuaccccuacgacgugcccgacuacgccagccugagaagccugguggccagcagcggcacccuggaguucaacaacgagagcuucaacuggaccggcgugacccagaacggcaccagcagcgccugcaucagaagaagcaacaacagcuucuucagcagacugaacuggcugacccaccugaaguucaaguaccccgcccugaacgugaccaugcccaacaacgagaaguucgacaagcuguacaucuggggcgugcaccaccccggcaccgacaacgaccagaucuuccuguacgcccaggccagcggcagaaucaccgugagcaccaagagaagccagcagaccgugauccccaacaucggcagcagacccagagugagaaacauccccagcagaaucagcaucuacuggaccaucgugaagcccggcgacauccugcugaucaacagcaccggcaaccugaucgcccccagaggcuacuucaagaucagaagcggcaagagcagcaucaugagaagcgacgcccccaucggcaagugcaacagcgagugcaucacccccaacggcagcauccccaacgacaagcccuuccagaacgugaacagaaucaccuacggcgccugccccagauacgugaagcagaacacccugaagcuggccaccggcaugagaaacgugcccgagaagcagaccagaggcaucuucggcgccaucgccggcuucaucgagaacggcugggagggcaugguggacggcugguacggcuucagacaccagaacagcgagggcaucggccaggccgccgaccugaagagcacccaggccgccaucgaccagaucaacggcaagcugaacagacugaucggcaagaccaacgagaaguuccaccagaucgagaaggaguucagcgagguggagggcagaauccaggaccuggagaaguacguggaggacaccaagaucgaccuguggagcuacaacgccgagcugcugguggcccuggagaaccagcacaccaucgaccugaccgacagcgagaugaacaagcuguucgagaagaccaagaagcagcugagagagaacgccgaggacaugggcaacggcugcuucaagaucuaccacaagugcgacaacgccugcaucggcagcaucagaaacggcaccuacgaccacgacguguacagagacgaggcccugaacaacagauuccagaucaagggcguggagcugaagagcggcuacaaggacuggauccuguggaucagcuucgccaucagcugcuuccugcugugcguggcccugcugggcuucaucaugugggccugccagaagggcaacaucagaugcaacaucugcaucuga

SEQ ID NO: 168180 - RNA, 1701 nt, Artificial Sequence
  derived and/or modified CDS sequence (opt4) from hemagglutinin__InfluenzaA__AEX36410
augaagaccaucaucgcccugagcuacauccugugccugguguucgcccagaagcugcccggcaacgacaacagcaccgccacccugugccugggccaccacgccgugcccaacggcaccaucgugaagaccaucaccaacgaccagaucgaggugaccaacgccaccgagcuggugcagaacagcagcaccggcgagaucugcgacagcccccaccagauccuggacggcgagaacugcacccugaucgacgcccugcugggcgacccccagugcgacggcuuccagaacaagaagugggaccuguucguggagagaagcaaggccuacagcaacugcuaccccuacgacgugcccgacuacgccagccugagaagccugguggccagcagcggcacccuggaguucaacaacgagagcuucaacuggaccggcgugacccagaacggcaccagcagcgccugcaucagaagaagcaacaacagcuucuucagcagacugaacuggcugacccaccugaaguucaaguaccccgcccugaacgugaccaugcccaacaacgagaaguucgacaagcuguacaucuggggcgugcaccaccccggcaccgacaacgaccagaucuuccuguacgcccaggccagcggcagaaucaccgugagcaccaagagaagccagcagaccgugauccccaacaucggcagcagacccagagugagaaacauccccagcagaaucagcaucuacuggaccaucgugaagcccggcgacauccugcugaucaacagcaccggcaaccugaucgcccccagaggcuacuucaagaucagaagcggcaagagcagcaucaugagaagcgacgcccccaucggcaagugcaacagcgagugcaucacccccaacggcagcauccccaacgacaagcccuuccagaacgugaacagaaucaccuacggcgccugccccagauacgugaagcagaacacccugaagcuggccaccggcaugagaaacgugcccgagaagcagaccagaggcaucuucggcgccaucgccggcuucaucgagaacggcugggagggcaugguggacggcugguacggcuucagacaccagaacagcgagggcaucggccaggccgccgaccugaagagcacccaggccgccaucgaccagaucaacggcaagcugaacagacugaucggcaagaccaacgagaaguuccaccagaucgagaaggaguucagcgagguggagggcagaauccaggaccuggagaaguacguggaggacaccaagaucgaccuguggagcuacaacgccgagcugcugguggcccuggagaaccagcacaccaucgaccugaccgacagcgagaugaacaagcuguucgagaagaccaagaagcagcugagagagaacgccgaggacaugggcaacggcugcuucaagaucuaccacaagugcgacaacgccugcaucggcagcaucagaaacggcaccuacgaccacgacguguacagagacgaggcccugaacaacagauuccagaucaagggcguggagcugaagagcggcuacaaggacuggauccuguggaucagcuucgccaucagcugcuuccugcugugcguggcccugcugggcuucaucaugugggccugccagaagggcaacaucagaugcaacaucugcaucuga

SEQ ID NO: 168181 - RNA, 1701 nt, Artificial Sequence; identical to SEQ ID NO: 162494
  derived and/or modified CDS sequence (opt4) from hemagglutinin__InfluenzaA__AEX36421

SEQ ID NO: 168182 - RNA, 1701 nt, Artificial Sequence
  derived and/or modified CDS sequence (opt4) from hemagglutinin__InfluenzaA__AEX36432
augaagaccaucaucgcccugagcuacauccugugccugguguucgcccagaagcugcccggcaacgacaacagcaccgccacccugugccugggccaccacgccgugcccaacggcaccaucgugaagaccaucaccaacgaccagaucgaggugaccaacgccaccgagcuggugcagagcagcagcaccggcgagaucugcgacagcccccaccaggugcuggacggcgagaacugcacccugaucgacgcccugcugggcgacccccagugcgacggcuuccagaacaagaagugggaccuguucguggagagaagcaaggccuacagcaacugcuaccccuacgacgugcccgacuacgccagccugagaagccugguggccagcagcggcacccuggaguucaacaacgagagcuucaacuggaccggcgugacccagaacggcaccagcagcgccugcaucagaagaagcaacaacagcuucuucagcagacugaacuggcugacccaccugaaguucaaguaccccgcccugaacgugaccaugcccaacaacgagcaguucgacaagcuguacaucuggggcgugcaccaccccggcaccgacaacgaccagaucuuccuguacgcccaggccagcggcagaaucaccgugagcaccaagagaagccagcagaccgugauccccaacaucggcagcagacccagagugagaaacauccccagcagaaucagcaucuacuggaccaucgugaagcccggcgacauccugcugaucaacagcaccggcaaccugaucgcccccagaggcuacuucaagaucagaagcggcaagagcagcaucaugagaagcgacgcccccaucggcaagugcaacagcgagugcaucacccccaacggcagcauccccaacgacaagcccuuccagaacgugaacagaaucaccuacggcgccugccccagauacgugaagcagaacacccugaagcuggccaccggcaugagaaacgugcccgagaagcagaccagaggcaucuucggcgccaucgccggcuucaucgagaacggcugggagggcaugguggacggcugguacggcuucagacaccagaacagcgagggcagaggccaggccgccgaccugaagagcacccaggccgccaucgaccagaucaacggcaagcugaacagacugaucggcaagaccaacgagaaguuccaccagaucgagaaggaguucagcgagguggagggcagaauccaggaccuggagaaguacguggaggacaccaagaucgaccuguggagcuacaacgccgagcugcugguggcccuggagaaccagcacaccaucgaccugaccgacagcgagaugaacaagcuguucgagaagaccaagaagcagcugagagagaacgccgaggacaugggcaacggcugcuucaagaucuaccacaagugcgacaacgccugcaucggcagcaucagaaacggcaccuacgaccacgacguguacagagacgaggcccugaacaacagauuccagaucaagggcguggagcugaagagcggcuacaaggacuggauccuguggaucagcuucgccaucagcugcuuccugcugugcguggcccugcugggcuucaucaugugggccugccagaagggcaacaucagaugcaacaucugcaucuga

SEQ ID NO: 168183 - RNA, 1701 nt, Artificial Sequence
  derived and/or modified CDS sequence (opt4) from hemagglutinin__InfluenzaA__AEX36443
augaagaccaucaucgcccugagcuacauccugugccugguguucgcccagaagcugcccggcaacgacaacagcaccgccacccugugccugggccaccacgccgugcccaacggcaccaucgugaagaccaucaccaacgaccagaucgaggugaccaacgccaccgagcuggugcagagcagcagcaccggcgagaucugcaacagcccccaccagauccuggacggcgagaacugcacccugaucgacgcccugcugggcgacccccagugcgacggcuuccagaacaagaagugggaccuguucguggagagaagcaaggccuacagcaacugcuaccccuacgacgugcccgacuacgccagccugagaagccugguggccagcagcggcacccuggaguucaacaacgagagcuucaacuggaccggcgugacccagaacggcaccagcagcgccugcaucagaagaagcaacaacagcuucuucagcagacugaacuggcugacccaccugaaguucaaguaccccgcccugaacgugaccaugcccaacaacgaggaguucgacaagcuguacaucuggggcgugcaccaccccggcaccgacaacgaccagaucuuccuguacgcccaggccagcggcagaaucaccgugagcaccaagagaagccagcagaccgugauccccaacaucggcagcagacccagagugagaaacauccccagcagaaucagcaucuacuggaccaucgugaagcccggcgacauccugcugaucaacagcaccggcaaccugaucgcccccagaggcuacuucaagaucagaagcggcaagagcagcaucaugagaagcgacgcccccaucggcaagugcaacagcgagugcaucacccccaacggcagcauccccaacgacaagcccuuccagaacgugaacagaaucaccuacggcgccugccccagauacgugaagcagaacacccugaagcuggccaccggcaugagaaacgugcccgagaagcagaccagaggcaucuucggcgccaucgccggcuucaucgagaacggcugggagggcaugguggacggcugguacggcuucagacaccagaacagcgagggcaucggccaggccgccgaccugaagagcacccaggccgccaucgaccagaucaacggcaagcugaacagacugaucggcaagaccaacgagaaguuccaccagaucgagaaggaguucagcgagguggagggcagaauccaggaccuggagaaguacguggaggacaccaagaucgaccuguggagcuacaacgccgagcugcugguggcccuggagaaccagcacaccaucgaccugaccgacagcgagaugaacaagcuguucgagaagaccaagaagcagcugagagagaacgccgaggacaugggcaacggcugcuucaagaucuaccacaagugcgacaacgccugcaucggcagcaucagaaacggcaccuacgaccacgacguguacagagacgaggcccugaacaacagauuccagaucaagggcguggagcugaagagcggcuacaaggacuggauccuguggaucagcuucgccaucagcugcuuccugcugugcguggcccugcugggcuucaucaugugggccugccagaagggcaacaucagaugcaacaucugcaucuga

SEQ ID NO: 168184 - RNA, 1701 nt, Artificial Sequence
  derived and/or modified CDS sequence (opt4) from hemagglutinin__InfluenzaA__AEX36454
augaagaccaucaucgcccugagcuacauccugugccugguguucgcccagaagcugcccggcaacgacaacagcaccgccacccugugccugggccaccacgccgugcccaacggcaccaucgugaagaccaucaccaacgaccagaucgaggugaccaacgccaccgagcuggugcagagcagcagcaccggcgagaucugcaacagcccccaccagauccuggacggcgagaacugcacccugaucgacgcccugcugggcgacccccagugcgacggcuuccagaacaagaagugggaccuguucguggagagaagcaaggccuacagcaacugcuaccccuacgacgugcccgacuacgccagccugagaagccugguggccagcagcggcacccuggaguucaacaacgagagcuucaacuggaccggcgugacccagaacggcaccagcagcgccugcaucagaagaagcaacaacagcuucuucagcagacugaacuggcugacccaccugaaguucaaguaccccgcccugaacgugaccaugcccaacaacgaggaguucgacaagcuguacaucuggggcgugcaccaccccggcaccgacaacgaccagaucuuccuguacgcccaggccagcggcagaaucaccgugagcaccaagagaagccagcagaccgugauccccaacaucggcagcagacccagagugagaaacauccccagcagaaucagcaucuacuggaccaucgugaagcccggcgacauccugcugaucaacagcaccggcaaccugaucgcccccagaggcuacuucaagaucagaagcggcaagagcagcaucaugagaagcgacgcccccaucggcaagugcaacagcgagugcaucacccccaacggcagcauccccaacgacaagcccuuccagaacgugaacagaaucaccuacggcgccugccccagauacgugaagcagaacacccugaagcuggccaccggcaugagaaacgugcccgagaagcagaccagaggcaucuucggcgccaucgccggcuucaucgagaacggcugggagggcaugguggacggcugguacggcuucagacaccagaacagcgagggcaucggccaggccgccgaccugaagagcacccaggccgccaucgaccagaucaacggcaagcugaacagacugaucggcaagaccaacgagaaguuccaccagaucgagaaggaguucagcgagguggagggcagaauccaggaccuggagaaguacguggaggacaccaagaucgaccuguggagcuacaacgccgagcugcugguggcccuggagaaccagcacaccaucgaccugaccgacagcgagaugaacaagcuguucgagaagaccaagaagcagcugagagagaacgccgaggacaugggcaacggcugcuucaagaucuaccacaagugcgacaacgccugcaucggcagcaucagaaacggcaccuacgaccacgacguguacagagacgaggcccugaacaacagauuccagaucaagggcguggagcugaagagcggcuacaaggacuggauccuguggaucagcuucgccaucagcugcuuccugcugugcguggugcugcugggcuucaucaugugggccugccagaagggcaacaucagaugcaacaucugcaucuga

SEQ ID NO: 168185 - RNA, 1701 nt, Artificial Sequence; identical to SEQ ID NO: 161789
  derived and/or modified CDS sequence (opt4) from hemagglutinin__InfluenzaA__AEX36465

SEQ ID NO: 168186 - RNA, 1701 nt, Artificial Sequence
  derived and/or modified CDS sequence (opt4) from hemagglutinin__InfluenzaA__AEX36476
augaagaccaucaucgcccugagcuacauccugugccugguguucgcccagaagcugcccggcaucgacaacagcaccgccacccugugccugggccaccacgccgugcccaacggcaccaucgugaagaccaucaccaacgaccagaucgaggugaccaacgccaccgagcuggugcagagcagcagcaccggcggcaucugcgacagcccccaccagauccuggacggcgagaacugcacccugaucgacgcccugcugggcgacccccagugcgacggcuuccagaacaagaagugggaccuguucguggagagaagcaaggccuacagcaacugcuaccccuacgacgugcccgacuacgccagccugagaagccugguggccagcagcggcacccuggaguucaacaacgagagcuucaacuggaccggcgugacccagaacggcaccagcagcgccugcaagagaggcagcaacaacagcuucuucagcagacugaacuggcugacccacagcaaguucaaguaccccgcccugaacgugaccaugcccaacaacgaggaguucgacaagcuguacaucuggggcgugcaccaccccggcaccgacaacgaccagaucuuccccuacgcccaggccagcggcagaaucaccgugagcaccaagagaagccagcagaccgugauccccaacaucggcagcagacccagaaucagaaacauccccagcagaaucagcaucuacuggaccaucgugaagcccggcgacauccugcugaucaacagcaccggcaaccugaucgcccccagaggcuacuucaagaucagaagcggcaagagcagcaucaugagaagcgacgcccccaucggcaagugcgacagcgagugcaucacccccaacggcagcauccccaacgacaagcccuuccagaacgugaacagaaucaccuacggcgccugccccagauacgugaagcagaacacccugaagcuggccaccggcaugagaaacgugcccgagaagcagaccagaggcaucuucggcgccaucgccggcuucaucgagaacggcugggagggcaugguggacggcugguacggcuucagacaccagaacagcgagggcaucggccaggccgccgaccugaagagcacccaggccgccaucgaccagaucaacggcaagcugaacagacugaucggcaagaccaacgagaaguuccaccagaucgagaaggaguucagcgagguggagggcagaauccaggaccuggagaaguacguggaggacaccaagaucgaccuguggagcuacaacgccgagcugcugguggcccuggagaaccagcacaccaucgaccugaccgacagcgagaugaacaagcuguucgagaagaccaagaagcagcugagagagaacgccgaggacaugggcaacggcugcuucaagaucuaccacaagugcgacaacgccugcaucggcagcaucagaaacggcaccuacgaccacgacguguacagagacgaggcccugaacaacagauuccagaucaagggcguggagcugaagagcggcuacaaggacuggauccuguggaucagcuucgccaucagcugcuuccugcugugcguggcccugcugggcuucaucaugugggccugccagaagggcaacaucagaugcaacaucugcaucuga

SEQ ID NO: 168187 - RNA, 1701 nt, Artificial Sequence
  derived and/or modified CDS sequence (opt4) from hemagglutinin__InfluenzaA__AEX36487
augaagaccaucaucgcccugagcuacauccugugccugguguucgcccagaagcugcccggcaucgacaacagcaccgccacccugugccugggccaccacgccgugcccaacggcaccaucgugaagaccaucaccaacgaccagaucgaggugaccaacgccaccgagcuggugcagagcagcagcaccggcggcaucugcgacagcccccaccagauccuggacggcgagaacugcacccugaucgacgcccugcugggcgacccccagugcgacggcuuccagaacaagaagugggaccuguucguggagagaagcaaggccuacagcaacugcuaccccuacgacgugcccgacuacgccagccugagaagccugguggccagcagcggcacccuggaguucaacaacgagagcuucaacuggaccggcgugacccagaacggcaccagcagcgccugcaagagaggcagcaacaacagcuucuucagcagacugaacuggcugacccacagcaaguucaaguaccccgcccugaacgugaccaugcccaacaacgaggaguucgacaagcuguacaucuggggcgugcugcaccccggcaccgacaacgaccagaucuuccuguacgcccaggccagcggcagaaucaccgugagcaccaagagaagccagcagaccgugauccccaacaucggcagcagacccagagugagaaacauccccagcagaaucagcaucuacuggaccaucgugaagcccggcgacauccugcugaucaacagcaccggcaaccugaucgcccccagaggcuacuucaagaucagaagcggcaagagcagcaucaugagaagcgacgcccccaucggcaagugcaacagcgagugcaucacccccaacggcagcauccccaacgacaagcccuuccagaacgugaacagaaucaccuacggcgccugccccagauacgugaagcagaacacccugaagcuggccaccggcaugagaaacgugcccgagaagcagaccagaggcaucuucggcgccaucgccggcuucaucgagaacggcugggagggcaugguggacggcugguacggcuucagacaccagaacagcgagggcaucggccaggccgccgaccugaagagcacccaggccgccaucgaccagaucaacggcaagcugaacagacugaucggcaagaccaacgagaaguuccaccagaucgagaaggaguucagcgagguggagggcagaauccaggaccuggagaaguacguggaggacaccaagaucgaccuguggagcuacaacgccgagcugcugguggcccuggagaaccagcacaccaucgaccugaccgacagcgagaugaacaagcuguucgagaagaccaagaagcagcugagagagaacgccgaggacaugggcaacggcugcuucaagaucuaccacaagugcgacaacgccugcaucggcagcaucagaaacggcaccuacgaccacgacguguacagagacgaggcccugaacaacagauuccagaucaagggcguggagcugaagagcggcuacaaggacuggauccuguggaucagcuucgccaucagcugcuuccugcugugcguggcccugcugggcuucaucaugugggccugccagaagggcaacaucagaugcaacaucugcaucuga

SEQ ID NO: 168188 - RNA, 1701 nt, Artificial Sequence; identical to SEQ ID NO: 168038
  derived and/or modified CDS sequence (opt4) from hemagglutinin__InfluenzaA__AEX36498

SEQ ID NO: 168189 - RNA, 1701 nt, Artificial Sequence
  derived and/or modified CDS sequence (opt4) from hemagglutinin__InfluenzaA__AEX36509
augaagaccaucaucgcccugagcuacauccugugccugguguucgcccagaagcugcccggcaucgacaacagcaccgccacccugugccugggccaccacgccgugcccaacggcaccaucgugaagaccaucaccaacgaccagaucgaggugaccaacgccaccgagcuggugcagaacagcagcaccggcggcaucugcgacagcccccaccagauccuggacggcgagaacugcacccugaucgacgcccugcugggcgacccccagugcgacggcuuccagaacaagaagugggaccuguucguggagagaagcaaggccuacagcaacugcuaccccuacgacgugcccgacuacgccagccugagaagccugguggccagcagcggcacccuggaguucaacaacgagagcuucaacuggaccggcgugacccagaacggcaccagcagcgccugcaagagaggcagcaacaacagcuucuucagcagacugaacuggcugacccacagcaaguucaaguaccccgcccugaacgugaccaugcccaacaacgaggaguucgacaagcuguacaucuggggcgugcaccaccccggcaccgacaacgaccagaucuuccccuacgcccaggccagcggcagaaucaccgugagcaccaagagaagccagcagaccgugauccccaacaucggcagcagacccagagugagaaacauccccagcagaaucagcaucuacuggaccaucgugaagcccggcgacauccugcugaucaacagcaccggcaaccugaucgcccccagaggcuacuucaagaucagaagcggcaagagcagcaucaugagaagcgacgcccccaucggcaagugcaacagcgagugcaucacccccaacggcagcauccccaacgacaagcccuuccagaacgugaacagaaucaccuacggcgccugccccagauacgugaagcagaacacccugaagcuggccaccggcaugagaaacgugcccgagaagcagaccagaggcaucuucggcgccaucgccggcuucaucgagaacggcugggagggcaugguggacggcugguacggcuucagacaccagaacagcgagggcaucggccaggccgccgaccugaagagcacccaggccgccaucgaccagaucaacggcaagcugaacagacugaucggcaagaccaacgagaaguuccaccagaucgagaaggaguucagcgagguggagggcagaauccaggaccuggagaaguacguggaggacaccaagaucgaccuguggagcuacaacgccgagcugcugguggcccuggagaaccagcacaccaucgaccugaccgacagcgagaugaacaagcuguucgagaagaccaagaagcagcugagagagaacgccgaggacaugggcaacggcugcuucaagaucuaccacaagugcgacaacgccugcaucggcagcaucagaaacggcaccuacgaccacgacguguacagagacgaggcccugaacaacagauuccagaucaagggcguggagcugaagagcggcuacaaggacuggauccuguggaucagcuucgccaucagcugcuuccugcugugcguggcccugcugggcuucaucaugugggccugccagaagggcaacaucagaugcaacaucugcaucuga

SEQ ID NO: 168190 - RNA, 1701 nt, Artificial Sequence
  derived and/or modified CDS sequence (opt4) from hemagglutinin__InfluenzaA__AEX36520
augaagaccaucaucgcccugagcuacauccugugccugguguucgcccagaagcugcccggcaacgacaacagcaccgccacccugugccugggccaccacgccgugcccaacggcaccaucgugaagaccaucaccaacgaccagaucgaggugaccaacgccaccgagcuggugcagagcagcagcaccggcgagaucugcgacagcccccaccagauccuggacggcgagaacugcacccugaucgacgcccugcugggcgacccccagugcgacggcuuccagaacaagaagugggaccuguucguggagagaagcaaggccuacagcaacugcuaccccuacgacgugcccgacuacgccagccugagaagccugguggccagcagcggcacccuggaguucaacaacgagagcuucaacuggaccggcgugacccagaacggcaccagcagcgccugcaucagaagaagcaacaacagcuucuucagcagacugaacuggcugacccaccugaaguucaaguaccccgcccugaacgugaccaugcccaacaacgagcaguucgacaagcuguacaucuggggcgugcaccaccccggcaccgacaacgaccagaucuuccuguacgcccaggccagcggcagaaucaccgugagcaccaagagaagccagcagaccgugauccccaacaucggcagcagacccagagugagaaacauccccagcagaaucagcaucuacuggaccaucgugaagcccggcgacauccugcugaucaacagcaccggcaaccugaucgcccccagaggcuacuucaagaucagaagcggcaagagcagcaucaugagaagcgacgcccccaucggcaagugcaacagcgagugcaucacccccaacggcagcauccccaacgacaagcccuuccagaacgugaacagaaucaccuacggcgccugccccagauacgugaagcagaacacccugaagcuggccaccggcaugagaaacgugcccgagaagcagaccagaggcaucuucggcgccaucgccggcuucaucgagaacggcugggagggcaugguggacggcugguacggcuucagacaccagaacagcgagggcagaggccaggccgccgaccugaagagcacccaggccgccaucgaccagaucaacggcaagcugaacagacugaucggcaagaccaacgagaaguuccaccagaucgagaaggaguucagcgagguggagggcagaauccaggaccuggagaaguacguggaggacaccaagaucgaccuguggagcuacaacgccgagcugcugguggcccuggagaaccagcacaccaucgaccugaccgacagcgagaugaacaagcuguucgagaagaccaagaagcagcugagagagaacgccgaggacaugggcaacggcugcuucaagaucuaccacaagugcgacaacgccugcaucggcagcaucagaaacggcaccuacgaccacaacguguacagagacgaggcccugaacaacagauuccagaucaagggcguggagcugaagagcggcuacaaggacuggauccuguggaucagcuucgccaucagcugcuuccugcugugcguggcccugcugggcuucaucaugugggccugccagaagggcaacaucagaugcaacaucugcaucuga

SEQ ID NO: 168191 - RNA, 1701 nt, Artificial Sequence
  derived and/or modified CDS sequence (opt4) from hemagglutinin__InfluenzaA__AEX36531
augaagaccaucaucgcccugagcuacauccugugccugguguucgcccagaagcugcccggcaacgacaacagcaccgccacccugugccugggccaccacgccgugcccaacggcaccaucgugaagaccaucaccaacgaccagaucgaggugaccaacgccaccgagcuggugcagagcagcagcaccggcgagaucugcgacagcccccaccagauccuggacggcgagaacugcacccugaucgacgcccugcugggcgacccccagugcgacggcuuccagaacaagaagugggaccuguucguggagagaagcaaggccuacagcaacugcuaccccuacgacgugcccgacuacgccagccugagaagccugguggccagcagcggcacccuggaguucaacaacgagagcuucaacuggaccggcgugacccagaacggcaccagcagcgccugcaucagaagaagcaacaacagcuucuucagcagacugaacuggcugacccaccugaaguucaaguaccccgcccugaacgugaccaugcccaacaacgagcaguucgacaagcuguacaucuggggcgugcaccaccccggcaccgacaacgaccagaucuuccuguacgcccaggccagcggcagaaucaccgugagcaccaagagaagccagcagaccgugauccccaacaucggcagcagacccagagugagaaacauccccagcagaaucagcaucuacuggaccaucgugaagcccggcgacauccugcugaucaacagcaccggcaaccugaucgcccccagaggcuacuucaagaucagaagcggcaagagcagcaucaugagaagcgacgcccccaucggcaagugcaacagcgagugcaucacccccaacggcagcauccccaacgacaagcccuuccagaacgugaacagaaucaccuacggcgccugccccagauacgugaagcagaacacccugaagcuggccaccggcaugagaaacgugcccgagaagcagaccagaggcaucuucggcgccaucgccggcuucaucgagaacggcugggagggcaugguggacggcugguacggcuucagacaccagaacagcgagggcagaggccaggccgccgaccugaagagcacccaggccgccaucgaccagaucaacggcaagcugaacagacugaucggcaagaccaacgagaaguuccaccagaucgagaaggaguucagcgagguggagggcagaauccaggaccuggacaaguacguggaggacaccaagaucgaccuguggagcuacaacgccgagcugcugguggcccuggagaaccagcacaccaucgaccugaccgacagcgagaugaacaagcuguucgagaagaccaagaagcagcugagagagaacgccgaggacaugggcaacggcugcuucaagaucuaccacaagugcgacaacgccugcaucggcagcaucagaaacggcaccuacgaccacgacguguacagagacgaggcccugaacaacagauuccagaucaagggcguggagcugaagagcggcuacaaggacuggauccuguggaucagcuucgccaucagcugcuuccugcugugcguggcccugcugggcuucaucaugugggccugccagaagggcaacaucagaugcaacaucugcaucuga

SEQ ID NO: 168192 - RNA, 1701 nt, Artificial Sequence
  derived and/or modified CDS sequence (opt4) from hemagglutinin__InfluenzaA__AEX36542
augaagaccaucaucgcccugagcuacauccugugccugguguucgcccagaagcugcccggcaacgacaacagcaccgccacccugugccugggccaccacgccgugcccaacggcaccaucgugaagaccaucaccaacgaccagaucgaggugaccaacgccaccgagcuggugcagaacagcagcaccggcgagaucugcgacagcccccaccagauccuggacggcgagaacugcacccugaucgacgcccugcugggcgacccccagugcgacggcuuccagaacaagaagugggaccuguucguggagagaagcaaggccuacagcaacugcuaccccuacgacgugcccgacuacgccagccugagaagccugguggccagcagcggcacccuggaguucaacaacgagagcuucaacuggaccggcgugacccagaacggcaccagcagcgccugcaucagaagaagcaacaacagcuucuucagcagacugaacuggcugacccaccugaaguucaaguaccccgcccugaacgugaccaugcccaacaacgagcaguucgacaagcuguacaucuggggcgugcaccaccccggcaccgacaacgaccagaucuuccuguacgcccaggccagcggcagaaucaccgugagcaccaagagaagccagcagaccgugauccccaacaucggcagcagacccagagugagaaacauccccagcagaaucagcaucuacuggaccaucgugaagcccggcgacauccugcugaucaacagcaccggcaaccugaucgcccccagaggcuacuucaagaucagaagcggcaagagcagcaucaugagaagcgacgcccccaucggcaagugcaacagcgagugcaucacccccaacggcagcauccccaacgacaagcccuuccagaacgugaacagaaucaccuacggcgccugccccagauacgugaagcagaacacccugaagcuggccaccggcaugagaaacgugcccgagaagcagaccagaggcaucuucggcgccaucgccggcuucaucgagaacggcugggagggcaugguggacggcugguacggcuucagacaccagaacagcgagggcagaggccaggccgccgaccugaagagcacccaggccgccaucgaccagaucaacggcaagcugaacagacugaucggcaagaccaacgagaaguuccaccagaucgagaaggaguucagcgagguggagggcagaauccaggaccuggagaaguacguggaggacaccaagaucgaccuguggagcuacaacgccgagcugcugguggcccuggagaaccagcacaccaucgaccugaccgacagcgagaugaacaagcuguucgagaagaccaagaagcagcugagagagaacgccgaggacaugggcaacggcugcuucaagaucuaccacaagugcgacaacgccugcaucggcagcaucagaaacggcaccuacgaccacgacguguacagagacgaggcccugaacaacagauuccagaucaagggcguggagcugaagagcggcuacaaggacuggauccuguggaucagcuucgccaucagcugcuuccugcugugcguggcccugcugggcuucaucaugugggccugccagaagggcaacaucagaugcaacaucugcaucuga

SEQ ID NO: 168193 - RNA, 1701 nt, Artificial Sequence; identical to SEQ ID NO: 168192
  derived and/or modified CDS sequence (opt4) from hemagglutinin__InfluenzaA__AEX36553

SEQ ID NO: 168194 - RNA, 1701 nt, Artificial Sequence; identical to SEQ ID NO: 168192
  derived and/or modified CDS sequence (opt4) from hemagglutinin__InfluenzaA__AEX36564

SEQ ID NO: 168195 - RNA, 1701 nt, Artificial Sequence
  derived and/or modified CDS sequence (opt4) from hemagglutinin__InfluenzaA__AEX36575
augaagaccaucaucgcccugagcuacauccugugccugguguucgcccagaagcugcccggcaacggcaacagcaccgccacccugugccugggccaccacgccgugcccaacggcaccaucgugaagaccaucaccaacgaccagaucgaggugaccaacgccaccgagcuggugcagagcagcagcaccggcgagaucugcgacagcccccaccagauccuggacggcgagaacugcacccugaucgacgcccugcugggcgacccccagugcgacggcuuccagaacaagaagugggaccuguucguggagagaagcaaggccuacagcaacugcuaccccuacgacgugcccgacuacgccagccugagaagccugguggccagcagcggcacccuggaguucaacaacgagagcuucaacuggaccggcgugacccagaacggcaccagcagcgccugcaucagaagaagcaacaacagcuucuucagcagacugaacuggcugacccaccugaaguucaaguaccccgcccugaacgugaccaugcccaacaacgagcaguucgacaagcuguacaucuggggcgugcaccaccccggcaccgacaacgaccagaucuuccuguacgcccaggccagcggcagaaucaccgugagcaccaagagaagccagcagaccgugauccccaacaucggcagcagacccagagugagaaacauccccagcagaaucagcaucuacuggaccaucgugaagcccggcgacauccugcugaucaacagcaccggcaaccugaucgcccccagaggcuacuucaagaucagaagcggcaagagcagcaucaugagaagcgacgcccccaucggcaagugcaacagcgagugcaucacccccaacggcagcauccccaacgacaagcccuuccagaacgugaacagaaucaccuacggcgccugccccagauacgugaagcagaacacccugaagcuggccaccggcaugagaaacgugcccgagaagcagaccagaggcaucuucggcgccaucgccggcuucaucgagaacggcugggagggcaugguggacggcugguacggcuucagacaccagaacagcgagggcagaggccaggccgccgaccugaagagcacccaggccgccaucgaccagaucaacggcaagcugaacagacugaucggcaagaccaacgagaaguuccaccagaucgagaaggaguucagcgagguggagggcagaauccaggaccuggagaaguacguggaggacaccaagaucgacaucuggagcuacaacgccgagcugcugguggcccuggagaaccagcacaccaucgaccugaccgacagcgagaugaacaagcuguucgagaagaccaagaagcagcugagagagaacgccgaggacaugggcaacggcugcuucaagaucuaccacaagugcgacaacgccugcaucggcagcaucagaaacggcaccuacgaccacgacguguacagagacgaggcccugaacaacagauuccagaucaagggcguggagcugaagagcggcuacaaggacuggauccuguggaucagcuucgccaucagcugcuuccugcugugcguggcccugcugggcuucaucaugugggccugccagaagggcaacaucagaugcaacaucugcaucuga

SEQ ID NO: 168196 - RNA, 1701 nt, Artificial Sequence
  derived and/or modified CDS sequence (opt4) from hemagglutinin__InfluenzaA__AEX36586
augaagaccaucaucgcccugagcuacauccugugccugguguucgcccagaagcugcccggcaacgacaacaacaccgccacccugugccugggccaccacgccgugcccaacggcaccaucgugaagaccaucaccaacgaccagaucgaggugaccaacgccaccgagcuggugcagagcagcagcaccggcgagaucugcgacagcccccaccagauccuggacggcgagaacugcacccugaucgacgcccugcugggcgacccccagugcgacggcuuccagaacaagaagugggaccuguucguggagagaagcaaggccuacagcaacugcuaccccuacgacgugcccgacuacgccagccugagaagccugguggccagcagcggcacccuggaguucaacaacgagagcuucaacuggaccggcgugacccagaacggcaccagcagcgccugcaucagaagaagcaacaacagcuucuucagcagacugaacuggcugacccaccugaaguucaaguaccccgcccugaacgugaccaugcccaacaacgagcaguucgacaagcuguacaucuggggcgugcaccaccccggcaccgacaacgaccagaucuuccuguacgcccaggccagcggcagaaucaccgugagcaccaagagaagccagcagaccgugauccccaacaucggcagcagacccagagugagaaacauccccagcagaaucagcaucuacuggaccaucgugaagcccggcgacauccugcugaucaacagcaccggcaaccugaucgcccccagaggcuacuucaagaucagaagcggcaagagcagcaucaugagaagcgacgcccccaucggcaagugcaacagcgagugcaucacccccaacggcagcauccccaacgacaagcccuuccagaacgugaacagaaucaccuacggcgccugccccagauacgugaagcagaacacccugaagcuggccaccggcaugagaaacgugcccgagaagcagaccagaggcaucuucggcgccaucgccggcuucaucgagaacggcugggagggcaugguggacggcugguacggcuucagacaccagaacagcgagggcagaggccaggccgccgaccugaagagcacccaggccgccaucgaccagaucaacggcaagcugaacagacugaucggcaagaccaacgagaaguuccaccagaucgagaaggaguucagcgagguggagggcagaauccaggaccuggagaaguacguggaggacaccaagaucgaccuguggagcuacaacgccgagcugcugguggcccuggagaaccagcacaccaucgaccugaccgacagcgagaugaacaagcuguucgagaagaccaagaagcagcugagagagaacgccgaggacaugggcaacggcugcuucaagaucuaccacaagugcgacaacgccugcaucggcagcaucagaaacggcaccuacgaccacgacguguacagagacgaggcccugaacaacagauuccagaucaagggcguggagcugaagagcggcuacaaggacuggauccuguggaucagcuucgccaucagcugcuuccugcugugcguggcccugcugggcuucaucaugugggccugccagaagggcaacaucagaugcaacaucugcaucuga

SEQ ID NO: 168197 - RNA, 1701 nt, Artificial Sequence
  derived and/or modified CDS sequence (opt4) from hemagglutinin__InfluenzaA__AEX36597
augaagaccaucaucgcccugagcuacauccugugccugguguucgcccagaagcugcccggcaacgacaacagcauggccacccugugccugggccaccacgccgugcccaacggcaccaucgugaagaccaucaccaacgaccagaucgaggugaccaacgccaccgagcuggugcagagcagcagcaccggcgagaucugcgacagcccccaccagauccuggacggcgagaacugcacccugaucgacgcccugcugggcgacccccagugcgacggcuuccagaacaagaagugggaccuguucguggagagaagcaaggccuacagcaacugcuaccccuacgacgugcccgacuacgccagccugagaagccugguggccagcagcggcacccuggaguucaacaacgagagcuucaacuggaccggcgugacccagaacggcaccagcagcgccugcaucagaagaagcaacaacagcuucuucagcagacugaacuggcugacccaccugaaguucaaguaccccgcccugaacgugaccaugcccaacaacgagcaguucgacaagcuguacaucuggggcgugcaccaccccggcaccgacaacgaccagaucuuccuguacgcccaggccagcggcagaaucaccgugagcaccaagagaagccagcagaccgugauccccaacaucggcagcagacccagagugagaaacauccccagcagaaucagcaucuacuggaccaucgugaagcccggcgacauccugcugaucaacagcaccggcaaccugaucgcccccagaggcuacuucaagaucagaagcggcaagagcagcaucaugagaagcgacgcccccaucggcaagugcaacagcgagugcaucacccccaacggcagcauccccaacgacaagcccuuccagaacgugaacagaaucaccuacggcgccugccccagauacgugaagcagaacacccugaagcuggccaccggcaugagaaacgugcccgagaagcagaccagaggcaucuucggcgccaucgccggcuucaucgagaacggcugggagggcaugguggacggcugguacggcuucagacaccagaacagcgagggcagaggccaggccgccgaccugaagagcacccaggccgccaucgaccagaucaacggcaagcugaacagacugaucggcaagaccaacgagaaguuccaccagaucgagaaggaguucagcgagguggagggcagaauccaggaccuggagaaguacguggaggacaccaagguggaccuguggagcuacaacgccgagcugcugguggcccuggagaaccagcacaccaucgaccugaccgacagcgagaugaacaagcuguucgagaagaccaagaagcagcugagagagaacgccgaggacaugggcaacggcugcuucaagaucuaccacaagugcgacaacgccugcaucggcagcaucagaaacggcaccuacgaccacgacguguacagagacgaggcccugaacaacagauuccagaucaagggcguggagcugaagagcggcuacaaggacuggauccuguggaucagcuucgccaucagcugcuuccugcugugcguggcccugcugggcuucaucaugugggccugccagaagggcaacaucagaugcaacaucugcaucuga

SEQ ID NO: 168198 - RNA, 1701 nt, Artificial Sequence
  derived and/or modified CDS sequence (opt4) from hemagglutinin__InfluenzaA__AEX36608
augaagaccaucaucgcccugagcuacauccugugccugguguucgcccagaagcugcccggcaacgacaacagcaccgccacccugugccugggccaccacgccgugcccaacggcaccaucgugaagaccaucaccaacgaccagaucgaggugaccaacgccaccgagcuggugcagagcagcagcaccggcggcaucugcgacagcccccaccagauccuggacggcgagaacugcacccugaucgacgcccugcugggcgacccccagugcgacggcuuccagaacaagaagugggaccuguucguggagagaagcaaggccuacagcaacugcuaccccuacgacgugcccgacuacgccagccugagaagccugguggccagcagcggcacccuggaguucaacaacgagaacuucaacuggaccggcgugacccagaacggcaccagcagcgccugcaagagaagaagcaacaacagcuucuucagcagacugaacuggcugacccaccugaaguucaaguaccccgcccugaacgugaccaugcccaacaacgagaaguucgacaagcuguacaucuggggcgugcaccaccccggcaccgacaacgaccagaucuuccuguacgcccaggccagcggcagaaucaccgugagcaccaagagaagccagcagaccgugauccccaacaucggcagcagacccagagugagaaacauccccagcagaaucagcaucuacuggaccaucgugaagcccggcgacauccugcugaucaacagcaccggcaaccugaucgcccccagaggcuacuucaagaucagaagcggcaagagcagcaucaugagaagcgacgcccccaucggcaagugcaacagcgagugcaucacccccaacggcagcauccccaacgacaagcccuuccagaacgugaacagaaucaccuacggcgccugccccagauacgugaagcagaacacccugaagcuggccaccggcaugagaaacgugcccgagaagcagaccagaggcaucuucggcgccaucgccggcuucaucgagaacggcugggagggcaugguggacggcugguacggcuucagacaccagaacagcgagggcaucggccaggccgccgaccugaagagcacccaggccgccaucaaccagaucaacggcaagcugaacagacugaucggcaagaccaacgagaaguuccaccagaucgagaaggaguucagcgagguggagggcagaauccaggaccuggagaaguacguggaggacaccaagaucgaccuguggagcuacaacgccgagcugcugguggcccuggagaaccagcacaccaucgaccugaccgacagcgagaugaacaagcuguucgagagaaccaagaagcagcugagagagaacgccgaggacaugggcaacggcugcuucaagaucuaccacaagugcgacaacgccugcaucggcagcaucagaaacggcaccuacgaccacgacguguacagagacgaggcccugaacaagagauuccagaucaagggcguggagcugaagagcggcuacaaggacuggauccuguggaucagcuucgccaucagcugcuuccugcugugcguggcccugcugggcuucaucaugugggccugccagaagggcaacaucagaugcaacaucugcaucuga

SEQ ID NO: 168199 - RNA, 1701 nt, Artificial Sequence; identical to SEQ ID NO: 168021
  derived and/or modified CDS sequence (opt4) from hemagglutinin__InfluenzaA__AEX36619

SEQ ID NO: 168200 - RNA, 1701 nt, Artificial Sequence
  derived and/or modified CDS sequence (opt4) from hemagglutinin__InfluenzaA__AEX63617
auggaggccaagcuguucgugcuguucugcgccuucaccgcccugaaggccgacaccaucugcgugggcuaccacgccaacaacagcaccgacaccguggacaccauccuggagaagaacgugaccgugacccacagcgugaaccugcuggagaacagccacaacggcaagcugugcagccugaacggcaagaucccccugcagcugggcaacugcaacguggccggcuggauccugggcaaccccaagugcgaccugcugcugaccgccaacagcuggagcuacaucaucgagaccagcaacagcaagaacggcgccugcuaccccggcgaguucgccgacuacgaggagcugaaggagcagcugagcaccgugagcagcuucgagagauucgagaucuuccccaaggccaccagcuggcccaaccacgacaccaccagaggcaccaccguggccugcagccacagcggcgccaacagcuucuacagaaaccugcuguggaucgugaagaagggcaacagcuaccccaagcugagcaagagcuacaccaacaacaagggcaaggaggugcuggugaucuggggcgugcaccacccccccaccgacagcgugcagcagacccuguaccagaacaaccacaccuacgugagcgugggcagcagcaaguacuacaagagauucacccccgagaucguggccagacccaaggugagagagcaggccggcagaaugaacuacuacuggacccugcuggaccagggcgacaccaucaccuucgaggccaccggcaaccugaucgcccccuggcacgccuucgcccugaagaagggcagcagcagcggcaucaugagaagcgacgcccaggugcacaacugcaccaccaagugccagaccccccacggcgcccugaagggcaaccugcccuuccagaacgugcaccccgugaccaucggcgagugccccaaguacgugaagagcacccagcugagaauggccaccggccugagaaacauccccagcauccagagcagaggccuguucggcgccaucgccggcuucaucgagggcggcuggaccggcaugguggacggcugguacggcuaccaccacagaaacgagcagggcagcggcuacgccgccgaccagaagagcacccagaucgccaucgacggcaucagcaacaaggugaacagcgugaucgagaagaugaacauccaguucaccagcgugggcaaggaguucaacagccuggagaagagaauggagaaccugaacaagaagguggacgacggcuuccuggacguguggaccuacaacgccgagcugcugauccugcuggagaacgagagaacccuggacuuccacgaccugaacgugaagaaccuguacgagaaggugaagagccagcugagaaacaacgccaaggagaucggcaacggcugcuucgaguucuaccacaagugcgacaacgagugcauggagagcgugaagaacggcaccuacaacuaccugaaguacagcgaggagagcaagcugaacagagaggagaucgacggcgugaagcuggagagcaugggcauccaccagauccuggccaucuacagcaccguggccagcagccuggugcugcuggugagccugggcgccaucagcuucuggaugugcagcaacggcagccugcagugcagagugugcaucuga

SEQ ID NO: 168201 - RNA, 1698 nt, Artificial Sequence; identical to SEQ ID NO: 163338
  derived and/or modified CDS sequence (opt4) from hemagglutinin__InfluenzaA__AEX92873

SEQ ID NO: 168202 - RNA, 1701 nt, Artificial Sequence; identical to SEQ ID NO: 163893
  derived and/or modified CDS sequence (opt4) from hemagglutinin__InfluenzaA__AEY69088

SEQ ID NO: 168203 - RNA, 1701 nt, Artificial Sequence; identical to SEQ ID NO: 163490
  derived and/or modified CDS sequence (opt4) from hemagglutinin__InfluenzaA__AEY69098

SEQ ID NO: 168204 - RNA, 1701 nt, Artificial Sequence; identical to SEQ ID NO: 163471
  derived and/or modified CDS sequence (opt4) from hemagglutinin__InfluenzaA__AEY69120

SEQ ID NO: 168205 - RNA, 1701 nt, Artificial Sequence; identical to SEQ ID NO: 163673
  derived and/or modified CDS sequence (opt4) from hemagglutinin__InfluenzaA__AEY69131

SEQ ID NO: 168206 - RNA, 1701 nt, Artificial Sequence; identical to SEQ ID NO: 167048
  derived and/or modified CDS sequence (opt4) from hemagglutinin__InfluenzaA__AEY69153

SEQ ID NO: 168207 - RNA, 1701 nt, Artificial Sequence; identical to SEQ ID NO: 163673
  derived and/or modified CDS sequence (opt4) from hemagglutinin__InfluenzaA__AEY69164

SEQ ID NO: 168208 - RNA, 1701 nt, Artificial Sequence; identical to SEQ ID NO: 163673
  derived and/or modified CDS sequence (opt4) from hemagglutinin__InfluenzaA__AEY69175

SEQ ID NO: 168209 - RNA, 1701 nt, Artificial Sequence; identical to SEQ ID NO: 163673
  derived and/or modified CDS sequence (opt4) from hemagglutinin__InfluenzaA__AEY69186

SEQ ID NO: 168210 - RNA, 1701 nt, Artificial Sequence; identical to SEQ ID NO: 163673
  derived and/or modified CDS sequence (opt4) from hemagglutinin__InfluenzaA__AEY69197

SEQ ID NO: 168211 - RNA, 1701 nt, Artificial Sequence; identical to SEQ ID NO: 163673
  derived and/or modified CDS sequence (opt4) from hemagglutinin__InfluenzaA__AEY69208

SEQ ID NO: 168212 - RNA, 1701 nt, Artificial Sequence; identical to SEQ ID NO: 163673
  derived and/or modified CDS sequence (opt4) from hemagglutinin__InfluenzaA__AEY69219

SEQ ID NO: 168213 - RNA, 1701 nt, Artificial Sequence; identical to SEQ ID NO: 163471
  derived and/or modified CDS sequence (opt4) from hemagglutinin__InfluenzaA__AEY69258

SEQ ID NO: 168214 - RNA, 1701 nt, Artificial Sequence; identical to SEQ ID NO: 163673
  derived and/or modified CDS sequence (opt4) from hemagglutinin__InfluenzaA__AEY69269

SEQ ID NO: 168215 - RNA, 1701 nt, Artificial Sequence; identical to SEQ ID NO: 163471
  derived and/or modified CDS sequence (opt4) from hemagglutinin__InfluenzaA__AEY69291

SEQ ID NO: 168216 - RNA, 1701 nt, Artificial Sequence; identical to SEQ ID NO: 163471
  derived and/or modified CDS sequence (opt4) from hemagglutinin__InfluenzaA__AEY69302

SEQ ID NO: 168217 - RNA, 1701 nt, Artificial Sequence; identical to SEQ ID NO: 163471
  derived and/or modified CDS sequence (opt4) from hemagglutinin__InfluenzaA__AEY69313

SEQ ID NO: 168218 - RNA, 1701 nt, Artificial Sequence; identical to SEQ ID NO: 163471
  derived and/or modified CDS sequence (opt4) from hemagglutinin__InfluenzaA__AEY69785

SEQ ID NO: 168219 - RNA, 1701 nt, Artificial Sequence
  derived and/or modified CDS sequence (opt4) from hemagglutinin__InfluenzaA__AEY69807
augaagaccaucaucgcccugagcuacauccugugccugguguucgcccagaagcugcccggcaacgacaacagcaccgccacccugugccugggccaccacgccgugcccaacggcaccaucgugaagaccaucaccaacgaccagaucgaggugaccaacgccaccgagcuggugcagagcagcagcaccggcgagaucugcgacagcccccaccagauccuggacggcaagaacugcacccugaucgacgcccugcugggcgacccccagugcgacggccugcagaacaagaagugggaccuguucguggagagaagcaaggccuacagcaacugcuaccccuacgacgugcccgacuacgccagccugagaagccugguggccagcagcggcacccuggaguucaacaacgagagcuucaacuggaccggcgugacccagaacggcaccagcagcgccugcaucagaagaagcaagaacagcuucuucagcagacugaacuggcugacccaccugaacuucaaguaccccgcccugaacgugaccaugcccaacaacgagcaguucgacaagcuguacaucuggggcgugcaccaccccggcaccgacaaggaccagaucuuccuguacgcccaggccagcggcagaaucaccgugagcaccaagagaagccagcagaccgccauccccaacaucggcagcagacccagagugagaaacauccccagcagaaucagcaucuacuggaccaucgugaagcccggcgacauccugcugaucaacagcaccggcaaccugaucgcccccagaggcuacuucaagcugagaagcggcaagagcagcaucaugagaagcgacgcccccaucggcaagugcaacagcgagugcaucacccccaacggcagcauccccaacgacaagcccuuccagaacgugaacagaaucaccuacggcgccugccccagauacgugaagcagaacacccugaagcuggccaccggcaugagaaacgugcccgagaagcagaccagaggcaucuucggcgccaucgccggcuucaucgagaacggcugggagggcaugguggacggcugguacggcuucagacaccagaacagcgagggcagaggccaggccgccgaccugaagagcacccaggccgccaucgaccagaucaacggcaagcugaacagacugaucggcaagaccaacgagaaguuccaccagaucgagaaggaguucagcgagguggagggcagaauccaggaccuggagaaguacguggaggacaccaagaucgaccuguggagcuacaacgccgagcugcugguggcccuggagaaccagcacaccaucgaccugaccgacagcgagaugaacaagcuguucgagaagaccaagaagcagcugagagagaacgccgaggacaugggcaacggcugcuucaagaucuaccacaagugcgacaacgccugcaucggcagcaucagaaacggcaccuacgaccacgacguguacagagacgaggcccugaacaacagauuccagaucaagggcguggagcugaagagcggcuacaaggacuggauccuguggaucagcuucgccaucagcugcuuccugcugugcguggcccugcugggcuucaucaugugggccugccagaagggcaacaucagaugcaacaucugcaucuga

SEQ ID NO: 168220 - RNA, 1701 nt, Artificial Sequence; identical to SEQ ID NO: 163673
  derived and/or modified CDS sequence (opt4) from hemagglutinin__InfluenzaA__AEY69818

SEQ ID NO: 168221 - RNA, 1701 nt, Artificial Sequence; identical to SEQ ID NO: 163673
  derived and/or modified CDS sequence (opt4) from hemagglutinin__InfluenzaA__AEY69829

SEQ ID NO: 168222 - RNA, 1701 nt, Artificial Sequence; identical to SEQ ID NO: 163673
  derived and/or modified CDS sequence (opt4) from hemagglutinin__InfluenzaA__AEY69840

SEQ ID NO: 168223 - RNA, 1701 nt, Artificial Sequence; identical to SEQ ID NO: 163673
  derived and/or modified CDS sequence (opt4) from hemagglutinin__InfluenzaA__AEY69851

SEQ ID NO: 168224 - RNA, 1701 nt, Artificial Sequence; identical to SEQ ID NO: 163673
  derived and/or modified CDS sequence (opt4) from hemagglutinin__InfluenzaA__AEY69873

SEQ ID NO: 168225 - RNA, 1701 nt, Artificial Sequence; identical to SEQ ID NO: 163673
  derived and/or modified CDS sequence (opt4) from hemagglutinin__InfluenzaA__AEY69884

SEQ ID NO: 168226 - RNA, 1701 nt, Artificial Sequence; identical to SEQ ID NO: 163673
  derived and/or modified CDS sequence (opt4) from hemagglutinin__InfluenzaA__AEY69895

SEQ ID NO: 168227 - RNA, 1701 nt, Artificial Sequence; identical to SEQ ID NO: 167048
  derived and/or modified CDS sequence (opt4) from hemagglutinin__InfluenzaA__AEY69906

SEQ ID NO: 168228 - RNA, 1701 nt, Artificial Sequence; identical to SEQ ID NO: 163673
  derived and/or modified CDS sequence (opt4) from hemagglutinin__InfluenzaA__AEY69917

SEQ ID NO: 168229 - RNA, 1701 nt, Artificial Sequence
  derived and/or modified CDS sequence (opt4) from hemagglutinin__InfluenzaA__AEY69939
augaagaccaucaucgcccugagcuacauccugugccugguguucgcccagaagauccccggcaacgacaacagcaccgccacccugugccugggccaccacgccgugcccaacggcaccaucgugaagaccaucaccaacgaccagaucgaggugaccaacgccaccgagcuggugcagagcagcagcaccggcgagaucugcgacagcccccaccagauccuggacggcaagaacugcacccugaucgacgcccugcugggcgacccccagugcgacggcuuccagaacaagaagugggaccuguucguggagagaagcaaggccuacagcaacugcuaccccuacgacgugcccgacuacgccagccugagaagccugguggccagcagcggcacccuggaguucaacaacgagagcuucaacuggaccggcgugacccagaacggcaccagcagcgccugcaucagaagaagcaagaacagcuucuucagcagacugaacuggcugacccaccugaacuucaaguaccccgcccugaacgugaccaugcccaacaacgagcaguucgacaagcuguacaucuggggcgugcaccaccccggcaccgacaaggaccagaucuuccuguacgcccaggccagcggcagaaucaccgugagcaccaagagaagccagcagaccgccauccccaacaucggcagcagacccagagugagaaacauccccagcagaaucagcaucuacuggaccaucgugaagcccggcgacauccugcugaucaacagcaccggcaaccugaucgcccccagaggcuacuucaagaucagaagcggcaagagcagcaucaugagaagcgacgcccccaucggcaagugcaacagcggcugcaucacccccaacggcagcauccccaacgacaagcccuuccagaacgugaacagaaucaccuacggcgugugccccagauacgugaagcagaacacccugaagcuggccaccggcaugagaaacgugcccgagaagcagaccagaggcaucuucggcgccaucgccggcuucaucgagaacggcugggagggcaugguggacggcugguacggcuucagacaccagaacagcgagggcagaggccaggccgccgaccugaagagcacccaggccgccaucgaccagaucaacggcaagcugaacagacugaucggcaagaccaacgagaaguuccaccagaucgagaaggaguucagcgagguggagggcagaauccaggaccuggagaaguacguggaggacaccaagaucgaccuguggagcuacaacgccgagcugcugguggcccuggagaaccagcacaccaucgaccugaccgacagcgagaugaacaagcuguucgagaagaccaagaagcagcugagagagaacgccgaggacaugggcaacggcugcuucaagaucuaccacaagugcgacaacgccugcaucggcagcaucagaaacggcaccuacgaccacgacguguacagagacgaggcccugaacaacagauuccagaucaagggcguggagcugaagagcggcuacaaggacugguuccuguggaucagcuucgccaucagcugcuuccugcugugcguggcccugcugggcuucaucaugugggccugccagaagggcaacaucagaugcaacaucugcaucuga

SEQ ID NO: 168230 - RNA, 1701 nt, Artificial Sequence; identical to SEQ ID NO: 168229
  derived and/or modified CDS sequence (opt4) from hemagglutinin__InfluenzaA__AEY69950

SEQ ID NO: 168231 - RNA, 1701 nt, Artificial Sequence; identical to SEQ ID NO: 168229
  derived and/or modified CDS sequence (opt4) from hemagglutinin__InfluenzaA__AEY69961

SEQ ID NO: 168232 - RNA, 1701 nt, Artificial Sequence
  derived and/or modified CDS sequence (opt4) from hemagglutinin__InfluenzaA__AEY69994
augaagaccaucaucgcccugagcuacauccugugccugguguucgcccagaagauccccggcaacgacaacagcaccgccacccugugccugggccaccacgccgugcccaacggcaccaucgugaagaccaucaccaacgaccagaucgaggugaccaacgccaccgagcuggugcagagcagcagcaccggcgagaucugcgacagcccccaccagauccuggacggcaagaacugcacccugaucgacgcccugcugggcgacccccagugcgacggcuuccagaacaagaagugggaccuguucguggagagaagcaaggccuacagcaacugcuaccccuacgacgugcccgacuacgccagccugagaagccugguggccagcagcggcacccuggaguucaacaacgagagcuucaacuggaccggcgugacccagaacggcaccagcagcgccugcaucagaagaagcaagaacagcuucuucagcagacugaacuggcugacccaccugaacuucaaguaccccgcccugaacgugaccaugcccaacaacgagcaguucgacaagcuguacaucuggggcgugcaccaccccggcaccgacaaggaccagaucuuccuguacgcccaggccagcggcagaaucaccgugagcaccaagagaagccagcagaccgccauccccaacaucggcagcagacccagagugagaaacauccccagcagaaucagcaucuacuggaccaucgugaagcccggcgacauccugcugaucaacagcaccggcaaccugaucgcccccagaggcuacuucaagaucagaagcggcaagagcagcaucaugagaagcgacgcccccaucggcaagugcaacagcggcugcaucacccccaacggcagcauccccaacgacaagcccuuccagaacgugaacagaaucaccuacggcgccugccccagauacgugaagcagaacacccugaagcuggccaccggcaugagaaacgugcccgagaagcagaccagaggcaucuucggcgccaucgccggcuucaucgagaacggcugggagggcaugguggacggcugguacggcuucagacaccagaacagcgagggcagaggccaggccgccgaccugaagagcacccaggccgccaucgaccagaucaacggcaagcugaacagacugaucggcaagaccaacgagaaguuccaccagaucgagaaggaguucagcgagguggagggcagaauccaggaccuggagaaguacguggaggacaccaagaucgaccuguggagcuacaacgccgagcugcugguggcccuggagaaccagcacaccaucgaccugaccgacagcgagaugaacaagcuguucgagaagaccaagaagcagcugagagagaacgccgaggacaugggcaacggcugcuucaagaucuaccacaagugcgacaacgccugcaucggcagcaucagaaacggcaccuacgaccacgacguguacagagacgaggcccugaacaacagauuccagaucaagggcguggagcugaagagcggcuacaaggacugguuccuguggaucagcuucgccaucagcugcuuccugcugugcguggcccugcugggcuucaucaugugggccugccagaagggcaacaucagaugcaacaucugcaucuga

SEQ ID NO: 168233 - RNA, 1701 nt, Artificial Sequence; identical to SEQ ID NO: 168232
  derived and/or modified CDS sequence (opt4) from hemagglutinin__InfluenzaA__AEY70005

SEQ ID NO: 168234 - RNA, 1701 nt, Artificial Sequence; identical to SEQ ID NO: 163673
  derived and/or modified CDS sequence (opt4) from hemagglutinin__InfluenzaA__AEY70016

SEQ ID NO: 168235 - RNA, 1701 nt, Artificial Sequence
  derived and/or modified CDS sequence (opt4) from hemagglutinin__InfluenzaA__AEY70256
augaagaccaucaucgcccugagcuacauccugugccugguguucgcccagaagcugcccggcaacgacaacagcaccgccacccugugccugggccaccacgccgugcccaacggcaccaucgugaagaccaucaccaacgaccagaucgaggugaccaacgccaccgagcuggugcagagcagcagcaccggcgagaucugcgacagcccccaccagauccuggacggcaagaacugcacccugaucgacgcccugcugggcgacccccagugcgacggcuuccagaacaagaagugggaccuguucguggagagaagcaaggccuacggcaacugcuaccccuacgacgugcccgacuacgccagccugagaagccugguggccagcagcggcacccuggaguucaacaacgagagcuucaacuggaccggcgugacccagaacggcaccagcagcgccugcaucagaagaagcaagaacagcuucuucagcagacugaacuggcugacccaccugaacuucaaguaccccgcccugaacgugaccaugcccaacaacgagcaguucgacaagcuguacaucuggggcgugcaccaccccggcaccgacaaggaccagaucuuccuguacgcccaggccagcggcagaaucaccgugagcaccaagagaagccagcagaccgccauccccaacaucggcagcagacccagagugagaaacauccccagcagaaucagcaucuacuggaccaucgugaagcccggcgacaugcugcugaucaacagcaccggcaaccugaucgcccccagaggcuacuucaagaucagaagcggcaagagcagcaucaugagaagcgacgcccccaucggcaagugcaacagcgagugcaucacccccaacggcagcauccccaacgacaagcccuuccagaacgugaacagaaucaccuacggcgccugccccagauacgugaagcagaacacccugaagcuggccaccggcaugagaaacgugcccgagaagcagaccagaggcaucuucggcgccaucgccggcuucaucgagaacggcugggagggcaugguggacggcugguacggcuucagacaccagaacagcgagggcagaggccaggccgccgaccugaagagcacccaggccgccaucgaccagaucaacggcaagcugaacagacugaucggcaagaccaacgagaaguuccaccagaucgagaaggaguucagcgagguggagggcagaauccaggaccuggagaaguacguggaggacaccaagaucgaccuguggagcuacaacgccgagcugcugguggcccuggagaaccagcacaccaucgaccugaccgacagcgagaugaacaagcuguucgagaagaccaagaagcagcugagagagaacgccgaggacaugggcaacggcugcuucaagaucuaccacaagugcgacaacgccugcaucggcagcaucagaaacggcaccuacgaccacgacguguacagagacgaggcccugaacaacagauuccagaucaagggcguggagcugaagagcggcuacaaggacuggauccuguggaucagcuucgccaucagcugcuuccugcugugcguggcccugcugggcuucaucaugugggccugccagaagggcaacaucagaugcaacaucugcaucuga

SEQ ID NO: 168236 - RNA, 1701 nt, Artificial Sequence; identical to SEQ ID NO: 163673
  derived and/or modified CDS sequence (opt4) from hemagglutinin__InfluenzaA__AEY70267

SEQ ID NO: 168237 - RNA, 1701 nt, Artificial Sequence; identical to SEQ ID NO: 163673
  derived and/or modified CDS sequence (opt4) from hemagglutinin__InfluenzaA__AEY70278

SEQ ID NO: 168238 - RNA, 1701 nt, Artificial Sequence; identical to SEQ ID NO: 163471
  derived and/or modified CDS sequence (opt4) from hemagglutinin__InfluenzaA__AEY70289

SEQ ID NO: 168239 - RNA, 1701 nt, Artificial Sequence; identical to SEQ ID NO: 163673
  derived and/or modified CDS sequence (opt4) from hemagglutinin__InfluenzaA__AEY70300

SEQ ID NO: 168240 - RNA, 1701 nt, Artificial Sequence; identical to SEQ ID NO: 163673
  derived and/or modified CDS sequence (opt4) from hemagglutinin__InfluenzaA__AEY70311

SEQ ID NO: 168241 - RNA, 1701 nt, Artificial Sequence; identical to SEQ ID NO: 163673
  derived and/or modified CDS sequence (opt4) from hemagglutinin__InfluenzaA__AEY70333

SEQ ID NO: 168242 - RNA, 1701 nt, Artificial Sequence; identical to SEQ ID NO: 168232
  derived and/or modified CDS sequence (opt4) from hemagglutinin__InfluenzaA__AEY70344

SEQ ID NO: 168243 - RNA, 1701 nt, Artificial Sequence; identical to SEQ ID NO: 165284
  derived and/or modified CDS sequence (opt4) from hemagglutinin__InfluenzaA__AEY70355

SEQ ID NO: 168244 - RNA, 1701 nt, Artificial Sequence; identical to SEQ ID NO: 163471
  derived and/or modified CDS sequence (opt4) from hemagglutinin__InfluenzaA__AEY70365

SEQ ID NO: 168245 - RNA, 1701 nt, Artificial Sequence; identical to SEQ ID NO: 163673
  derived and/or modified CDS sequence (opt4) from hemagglutinin__InfluenzaA__AEY70376

SEQ ID NO: 168246 - RNA, 1701 nt, Artificial Sequence
  derived and/or modified CDS sequence (opt4) from hemagglutinin__InfluenzaA__AFB18656
augaaggccauccugguggugcugcuguacaccuucgccaccgccaacgccgacacccugugcaucggcuaccacgccaacaacagcaccgacaccguggacaccgugcuggagaagaacgugaccgugacccacagcgugaaccugcuggaggacaagcacaacggcaagcugugcaagcugagaggcguggccccccugcaccugggcaagugcaacaucgccggcuggauccugggcaaccccgagugcgagacccugagcaccgccagcagcuggagcuacaucguggagaccagcagcagcgacaacggcaccugcuaccccggcgacuucaucgacuacgaggagcugagagagcagcugagcagcgugagcagcuucgagagauucgagaucuuccccaagaccagcagcuggcccaaccacgacagcaacaagggcgugaccgccgccugcccccacgccggcgccaagggcuucuacaagaaccugaucuggcuggugaagaagggcaacagcuaccccaagcugagcaagagcuacaucaacgacaagggcaaggaggugcuggugcuguggggcauccaccaccccagcaccaccgccgaccagcagagccuguaccagaacgccgacaccuacguguucgugggcaccagcagauacagcaagaaguucaagcccgagaucgccaucagacccaaggugagagaccaggagggcagaaugaacuacuacuggacccugguggagcccggcgacaagaucaccuucgaggccaccggcaaccugguggugcccagauacgccuucgccauggagagagacgccggcagcggcaucaucaucagcgacacccccgugcacgacugcaacaccaccugccagacccccaagggcgccaucaacaccagccugcccuuccagaacauccaccccaucaccaucggcaagugccccaaguacgugaagagcaccaagcugagacuggccaccggccugagaaacgugcccagcauccagagcagaggccuguucggcgccaucgccggcuucaucgagggcggcuggaccggcaugguggacggcugguacggcuaccaccaccagaacgagcagggcagcggcuacgccgccgaccugaagagcacccagaacgccaucgacaagaucaccaacaaggugaacagcgugaucgagaagaugaacacccaguucaccgccgugggcaaggaguucaaccaccuggagaagagaaucgagaaccugaacaagaagguggacgacggcuuccuggacaucuggaccuacaacgccgagcugcuggugcugcuggagaacgagagaacccuggacuaccacgacagcaacgugaagaaccuguacgagaaggugagaaaccagcugaagaacaacgccaaggagaucggcaacggcugcuucgaguucuaccacaagugcgacaacaccugcauggagagcgugaagaacggcaccuacgacuaccccaaguacagcgaggaggccaagcugaacagagaggagaucgacggcgugaagcuggagagcaccagaaucuaccagauccuggccaucuacagcaccgccgccagcagccuggugcugguggugagccugggcgccaucagcuucuggaugugcagcaacggcagccugcagugcagaaucugcaucuga

SEQ ID NO: 168247 - RNA, 1701 nt, Artificial Sequence; identical to SEQ ID NO: 167110
  derived and/or modified CDS sequence (opt4) from hemagglutinin__InfluenzaA__AFB40597

SEQ ID NO: 168248 - RNA, 1701 nt, Artificial Sequence; identical to SEQ ID NO: 167110
  derived and/or modified CDS sequence (opt4) from hemagglutinin__InfluenzaA__AFB40598

SEQ ID NO: 168249 - RNA, 1701 nt, Artificial Sequence
  derived and/or modified CDS sequence (opt4) from hemagglutinin__InfluenzaA__AFB40599
augaaggccauccugguggugcugcuguacaccuucgccaccgccaacgccgacacccugugcaucggcuaccacgccaacaacagcaccgacaccguggacaccgugcuggagaagaacgugaccgugacccacagcgugaaccugcuggaggacaagcacaacggcaagcugugcaagcugagaggcguggccccccugcaccugggcaagugcaacaucgccggcuggauccugggcaaccccgagugcgagagccugagcaccgccagcagcuggagcuacaucguggagaccagcagcagcgacaacggcaccugcuaccccggcgacuucaucgacuacgaggagcugagagagcagcugagcagcgugagcagcuucgagagauucgagaucuuccccaagaccagcagcuggcccaaccacgaccugaacaagggcgugaccgccgccugcccccacgccggcgccaagagcuucuacaagaaccugaucuggcuggugaagaagggcaacagcuaccccaagcugagcaagagcuacaucaacgacaagggcaaggaggugcuggugcuguggggcauccaccaccccagcaccagcgccgaccagcagagccuguaccagaacgccgacgccuacguguucgugggcaccagcagauacagcaagaaguucaagcccgagaucgccaucagacccaaggugagagaccaggagggcagaaugaacuacuacuggacccugguggagcccggcgacaagaucaccuucgaggccaccggcaaccugguggugcccagauacgccuucgccauggagagaaacgccggcagcggcaucaucaucagcgacacccccgugcacgacugcaacaccaccugccagacccccaagggcgccaucaacaccagccugcccuuccagaacauccaccccaucaccaucggcaagugccccaaguacgugaagagcaccaagcugagacuggccaccggccugagaaacgugcccagcauccagagcagaggccuguucggcgccaucgccggcuucaucgagggcggcuggaccggcaugguggacggcugguacggcuaccaccaccagaacgagcagggcagcggcuacgccgccgaccugaagagcacccagaacgccaucgacaagaucaccaacaaggugaacagcgugaucgagaagaugaacacccaguucaccgccgugggcaaggaguucaaccaccuggagaagagaaucgagaaccugaacaagaagguggacgacggcuuccuggacaucuggaccuacaacgccgagcugcuggugcugcuggagaacgagagaacccuggacuaccacgacagcaacgugaagaaccuguacgagaaggugagaagccagcugaagaacaacgccaaggagaucggcaacggcugcuucgaguucuaccacaagugcgacaacaccugcauggagagcgugaagaacggcaccuacgacuaccccaaguacagcgaggaggccaagcugaacagagaggagaucgacggcgugaagcuggagagcaccagaaucuaccagauccuggccaucuacagcaccguggccagcagccuggugcugguggugagccugggcgccaucagcuucuggaugugcagcaacggcagccugcagugcagaaucugcaucuga

SEQ ID NO: 168250 - RNA, 1701 nt, Artificial Sequence; identical to SEQ ID NO: 163893
  derived and/or modified CDS sequence (opt4) from hemagglutinin__InfluenzaA__AFB40600

SEQ ID NO: 168251 - RNA, 1701 nt, Artificial Sequence
  derived and/or modified CDS sequence (opt4) from hemagglutinin__InfluenzaA__AFB40601
augaaggccauccugguggugcugcuguacaccuucgccaccgccaacgccgacacccugugcaucggcuaccacgccaacaacagcaccgacaccguggacaccgugcuggagaagaacgugaccgugacccacagcgugaaccugcuggaggacaagcacaacggcaagcugugcaagcugagaggcguggccccccugcaccugggcaagugcaacaucgccggcuggauccugggcaaccccgagugcgagagccugagcaccgccagcagcuggagcuacaucguggagaccagcagcagcgacaacggcaccugcuaccccggcgacuucaucgacuacgaggagcugagagagcagcugagcagcgugagcagcuucgagagauucgagaucuuccccgagaccagcagcuggcccaaccacgacagcaacaagggcgugaccgccgccugcccccacgccggcgccaagagcuucuacaagaaccugaucuggcuggugaagaagggcaacagcuaccccaagcugagcaagagcuacaucaacgacaagggcaaggaggugcuggugcuguggggcauccaccaccccagcaccagcgccgaccagcagagccuguaccagaacgccgacgccuacguguucgugggcaccagcagauacagcaagaaguucaagcccgagaucgccaucagacccaaggugagaggccaggagggcagaaugaacuacuacuggacccugguggagcccggcgacaagaucaccuucgaggccaccggcaaccugguggugcccagauacgccuucgccauggagagaaacgccggcagcggcaucaucaucagcgacacccccgugcacgacugcaacaccaccugccagacccccaagggcgccaucaacaccagccugcccuuccagaacauccaccccaucaccaucggcaagugccccaaguacgugaagagcaccaagcugagacuggccaccggccugagaaacgugcccagcauccagagcagaggccuguucggcgccaucgccggcuucaucgagggcggcuggaccggcaugguggacggcugguacggcuaccaccaccagaacgagcagggcagcggcuacgccgccgaccugaagagcacccagaacgccaucgacgagaucaccaacaaggugaacagcgugaucgagaagaugaacacccaguucaccgccgugggcaaggaguucaaccaccuggagaagagaaucgagaaccugaacaagaagguggacgacggcuuccuggacaucuggaccuacaacgccgagcugcuggugcugcuggagaacgagagaacccuggacuaccacgacagcaacgugaagaaccuguacgagaaggugagaagccagcugaagaacaacgccaaggagaucggcaacggcugcuucgaguucuaccacaagugcgacaacaccugcauggagagcgugaagaacggcaccuacgacuaccccaaguacagcgaggaggccaagcugaacagagaggagaucgacggcgugaagcuggagagcaccagaaucuaccagauccuggccaucuacagcaccguggccagcagccuggugcugguggugagccugggcgccaucagcuucuggaugugcagcaacggcagccugcagugcagaaucugcaucuga

SEQ ID NO: 168252 - RNA, 1701 nt, Artificial Sequence; identical to SEQ ID NO: 162729
  derived and/or modified CDS sequence (opt4) from hemagglutinin__InfluenzaA__AFB40602

SEQ ID NO: 168253 - RNA, 1701 nt, Artificial Sequence; identical to SEQ ID NO: 163893
  derived and/or modified CDS sequence (opt4) from hemagglutinin__InfluenzaA__AFB40603

SEQ ID NO: 168254 - RNA, 1701 nt, Artificial Sequence
  derived and/or modified CDS sequence (opt4) from hemagglutinin__InfluenzaA__AFB40604
augaaggccauccugguggugcugcuguacaccuucgccaccgccaacgccgacacccugugcaucggcuaccacgccaacaacagcaccgacaccguggacaccgugcuggagaagaacgugaccgugacccacagcgugaaccugcuggaggacaagcacaacggcaagcugugcaagcugagaggcguggccccccugcaccugggcaagugcaacaucgccggcuggauccugggcaaccccgagugcgagagccugagcaccgccagcagcuggagcuacaucguggagaccagcagcagcgacaacggcaccugcuaccccggcgacuucaucgacuacgaggagcugagagagcagcugagcagcgugagcagcuucgagagauucgagaucuuccccaagaccagcagcuggcccaaccacgacagcaacaagggcgugaccgccgccugcccccacgccggcgccaagagcuucuacaagaaccugaucuggcuggugaaggagggcaacagcuaccccaagcugagcaagagcuacaucaacgacaagggcaaggaggugcuggugcuguggggcauccaccacccccccaccaccgccgaccagcagagccuguaccagaacgccgacaccuacguguucgugggcaccagcagauacagcaagaaguucaagcccgagaucgccaucagacccaaggugagagaccaggagggcagaaugaacuacuacuggacccugguggagcccggcgacaagaucaccuucgaggccaccggcaaccugguggugcccagauacgccuucgccauggagagaaacgccggcagcggcaucaucaucagcgacacccccgugcacgacugcaacaccaccugccagacccccaagggcgccaucaacaccagccugcccuuccagaacauccaccccaucaccaucggcaagugccccaaguacgugaagagcaccaagcugagacuggccaccggccugagaaacgugcccagcauccagagcagaggccuguucggcgccaucgccggcuucaucgagggcggcuggaccggcaugguggacggcugguacggcuaccaccaccagaacgagcagggcagcggcuacgccgccgaccugaagagcacccagaacgccaucgacaagaucaccaacaaggugaacagcgugaucgagaagaugaacacccaguucaccgccguggacaaggaguucaaccaccuggagaagagaaucggcaaccugaacaagaagguggacgacggcuuccuggacaucuggaccuacaacgccgagcugcuggugcugcuggagaacgagagaacccuggacuaccacgacagcaacgugaagaaccuguacgagaaggugagaaaccagcugaagaacaacgccaaggagaucggcaacggcugcuucgaguucuaccacaagugcgacaacaccugcauggagagcgugaagaacggcaccuacgacuaccccaaguacagcgaggaggccaagcugaacagagaggagaucgacggcgugaagcuggagagcaccagaaucuaccagauccuggccaucuacagcaccguggccagcagccuggugcugguggugagccugggcgccaucagcuucuggaugugcagcaacggcagccugcagugcagaaucugcaucuga

SEQ ID NO: 168255 - RNA, 1701 nt, Artificial Sequence; identical to SEQ ID NO: 162729
  derived and/or modified CDS sequence (opt4) from hemagglutinin__InfluenzaA__AFB70138

SEQ ID NO: 168256 - RNA, 1701 nt, Artificial Sequence
  derived and/or modified CDS sequence (opt4) from hemagglutinin__InfluenzaA__AFB70145
augaaggccauccugguggugcugcuguacaccuucgccaccgccaacgccgacacccugugcaucggcuaccacgccaacaacagcaccgacaccguggacaccgugcuggagaagaacgugaccgugacccacagcgugaaccugcuggaggacaagcacaacggcaagcugugcaagcugagaggcguggccccccugcaccugggcaagugcaacaucgccggcuggauccugggcaaccccgagugcgagagccugagcaccgccagcagcuggagcuacaucguggagaccagcagcagcgacaacggcaccugcuaccccggcgacuucaucgacuacgaggagcugagagagcagcugagcagcgugagcagcuucgagagauucgagaucuuccccaagaccagcagcuggcccaaccacgacagcaacaagggcaucaccgccgccugcccccacgccggcgccaagagcuucuacaagaaccugaucuggcuggugaagaagggcaacagcuaccccaagcugagcaagagcuacaucaacgacaagggcaaggaggugcuggugcuguggggcauccaccaccccagcaccagcgccgaccagcagagccuguaccagaacgccgacgccuacguguucgugggcaccagcagauacagcaagaaguucaagcccgagaucgccaucagacccaaggugagagaccaggagggcagaaugaacuacuacuggacccugguggagcccggcgacaagaucaccuucgaggccaccggcaaccugguggugcccagauacgccuucgccauggagagaaacgccggcagcggcaucaucaucagcgacacccccgugcacgacugcaacaccaccugccagacccccaagggcgccaucaacaccagccugcccuuccagaacauccaccccaucaccaucggcaagugccccaaguacgugaagagcaccaagcugagacuggccaccggccugagaaacgugcccagcauccagagcagaggccuguucggcgccaucgccggcuucaucgagggcggcuggaccggcaugguggacggcugguacggcuaccaccaccagaacgagcagggcagcggcuacgccgccgaccugaagagcacccagaacgccaucgacgagaucaccaacaaggugaacagcgugaucgagaagaugaacacccaguucaccgccgugggcaaggaguucaaccaccuggagaagagaaucgagaaccugaacaagaagguggacgacggcuuccuggacaucuggaccuacaacgccgagcugcuggugcugcuggagaacgagagaacccuggacuaccacgacagcaacgugaagaaccuguacgagaaggugagaagccagcugaagaacaacgccaaggagaucggcaacggcugcuucgaguucuaccacaagugcgacaacaccugcauggagagcgugaagaacggcaccuacgacuaccccaaguacagcgaggaggccaagcugaacagagaggagaucgacggcgugaagcuggagagcaccagaaucuaccagauccuggccaucuacagcaccguggccagcagccuggugcugguggugagccugggcgccaucagcuucuggaugugcagcaacggcagccugcagugcagaaucugcaucuga

SEQ ID NO: 168257 - RNA, 1701 nt, Artificial Sequence
  derived and/or modified CDS sequence (opt4) from hemagglutinin__InfluenzaA__AFB70154
augaaggccauccugguggugcugcuguacaccuucgccaccgccaacgccgacacccugugcaucggcuaccacgccaacaacagcaccgacaccguggacaccgugcuggagaagaacgugaccgugacccacagcgugaaccugcuggaggacaagcacaacgagaagcugugcaagcugagaggcguggccccccugcaccugggcaagugcaacaucgccggcuggauccugggcaaccccgagugcgagagccugagcaccgccagcagcuggagcuacaucguggagaccagcagcagcgacaacggcaccugcuaccccggcgacuucaucgacuacgaggagcugagagagcagcugagcagcgugagcagcuucgagagauucgagaucuuccccaagaccagcagcuggcccaaccacgacagcaacaagggcgugaccgccgccugcccccacgccggcgccaagagcuucuacaagaaccugaucuggcuggugaagaagggcaacagcuaccccaagcugagcaagagcuacaucaacgacaagggcaaggaggugcuggugcuguggggcauccaccaccccagcaccagcgccgaccagcagagccuguaccagaacgccgacgccuacguguucgugggcaccagcagauacagcaagaaguucaagcccgagaucgccaucagacccaaggugagagaccaggagggcagaaugaacuacuacuggacccugguggagcccggcgacaagaucaccuucgaggccaccggcaaccugguggugcccagauacgccuucgccauggagagaaacgccggcagcggcaucaucaucagcgacacccccgugcacgacugcaacaccaccugccagacccccaagggcgccaucaacaccagccugcccuuccagaacauccaccccaucaccaucggcaagugccccaaguacgugaagagcaccaagcugagacuggccaccggccugagaaacgugcccagcauccagagcagaggccuguucggcgccaucgccggcuucaucgagggcggcuggaccggcaugguggacggcugguacggcuaccaccaccagaacgagcagggcagcggcuacgccgccgaccugaagagcacccagaacgccaucgacgagaucaccaacaaggugaacagcgugaucgagaagaugaacacccaguucaccgccgugggcaaggaguucaaccaccuggagaagagaaucgagaaccugaacaagaagguggacgacggcuuccuggacaucuggaccuacaacgccgagcugcuggugcugcuggagaacgagagaacccuggacuaccacgacagcaacgugaagaaccuguacgagaaggugagaagccagcugaagaacaacgccaaggagaucggcaacggcugcuucgaguucuaccacaagugcgacaacaccugcauggagagcgugaagaacggcaccuacgacuaccccaaguacagcgaggaggccaagcugaacagagaggagaucgacggcgugaagcuggagagcaccagaaucuaccagauccuggccaucuacagcaccguggccagcagccuggugcugguggugagccugggcgccaucagcuucuggaugugcagcaacggcagccugcagugcagaaucugcaucuga

SEQ ID NO: 168258 - RNA, 1701 nt, Artificial Sequence; identical to SEQ ID NO: 162729
  derived and/or modified CDS sequence (opt4) from hemagglutinin__InfluenzaA__AFB70156

SEQ ID NO: 168259 - RNA, 1701 nt, Artificial Sequence; identical to SEQ ID NO: 162729
  derived and/or modified CDS sequence (opt4) from hemagglutinin__InfluenzaA__AFB70158

SEQ ID NO: 168260 - RNA, 1701 nt, Artificial Sequence; identical to SEQ ID NO: 168256
  derived and/or modified CDS sequence (opt4) from hemagglutinin__InfluenzaA__AFB70160

SEQ ID NO: 168261 - RNA, 1701 nt, Artificial Sequence; identical to SEQ ID NO: 163923
  derived and/or modified CDS sequence (opt4) from hemagglutinin__InfluenzaA__AFB70162

SEQ ID NO: 168262 - RNA, 1701 nt, Artificial Sequence
  derived and/or modified CDS sequence (opt4) from hemagglutinin__InfluenzaA__AFB70167
augaaggccauccugguggugcugcuguacaccuucgccaccgccaacgccgacacccugugcaucggcuaccacgccaacaacagcaccgacaccguggacaccgugcuggagaagaacgugaccgugacccacagcgugaaccugcuggaggacaagcacaacggcaagcugugcaagcugagaggcguggccccccugcaccugggcaagugcaacaucgccggcuggauccugggcaaccccgagugcgagagccugagcaccgccagcagcuggagcuacaucguggagaccagcagcagcgacaacggcaccugcuaccccggcgacuucaucgacuacgaggagcugagagagcagcugagcagcgugagcagcuucgagagauucgagaucuuccccaagaccagcagcuggcccaaccacgacagcaacaagggcgugaccgccgccugcccccacgccggcgccaagagcuucuacaagaaccugaucuggcuggugaagaagggcaacagcuaccccaagcugagcaagagcuacaucaacgacaagggcaaggaggugcuggugcuguggggcauccaccaccccagcaccagcgccgaccagcagagccuguaccagaacgccgacgccuacguguucgugggcaccagcagauacagcaagaaguucaagcccgagaucgccaugagacccaaggugagagaccaggagggcagaaugaacuacuacuggacccugguggagcccggcgacaagaucaccuucgaggccaccggcaaccugguggugcccagauacgccuucgccauggagagaaacgccggcagcggcaucaucaucagcgacacccccgugcacgacugcaacaccaccugccagacccccaagggcgccaucaacaccagccugcccuuccagaacauccaccccaucaccaucggcaagugccccaaguacgugaagagcaccaagcugagacuggccaccggccugagaaacgugcccagcauccagagcagaggccuguucggcgccaucgccggcuucaucgagggcggcuggaccggcaugguggacggcugguacggcuaccaccaccagaacgagcagggcagcggcuacgccgccgaccugaagagcacccagaacgccaucgacgagaucaccaacaaggugaacagcgugaucgagaagaugaacacccaguucaccgccgugggcaaggaguucaaccaccuggagaagagaaucgagaaccugaacaagaagguggacgacggcuuccuggacaucuggaccuacaacgccgagcugcuggugcugcuggagaacgagagaacccuggacuaccacgacagcaacgugaagaaccuguacgagaaggugagaagccagcugaagaacaacgccaaggagaucggcaacggcugcuucgaguucuaccacaagugcgacaacaccugcauggagagcgugaagaacggcaccuacgacuaccccaaguacagcgaggaggccaagcugaacagagaggagaucgacggcgugaagcuggagagcaccagaaucuaccagauccuggccaucuacagcaccguggccagcagccuggugcugguggugagccugggcgccaucagcuucuggaugugcagcaacggcagccugcagugcagaaucugcaucuga

SEQ ID NO: 168263 - RNA, 1701 nt, Artificial Sequence; identical to SEQ ID NO: 162729
  derived and/or modified CDS sequence (opt4) from hemagglutinin__InfluenzaA__AFB70177

SEQ ID NO: 168264 - RNA, 1701 nt, Artificial Sequence; identical to SEQ ID NO: 163298
  derived and/or modified CDS sequence (opt4) from hemagglutinin__InfluenzaA__AFB70187

SEQ ID NO: 168265 - RNA, 1701 nt, Artificial Sequence; identical to SEQ ID NO: 163923
  derived and/or modified CDS sequence (opt4) from hemagglutinin__InfluenzaA__AFB70197

SEQ ID NO: 168266 - RNA, 1701 nt, Artificial Sequence; identical to SEQ ID NO: 162729
  derived and/or modified CDS sequence (opt4) from hemagglutinin__InfluenzaA__AFB70207

SEQ ID NO: 168267 - RNA, 1701 nt, Artificial Sequence; identical to SEQ ID NO: 162729
  derived and/or modified CDS sequence (opt4) from hemagglutinin__InfluenzaA__AFB70217

SEQ ID NO: 168268 - RNA, 1701 nt, Artificial Sequence; identical to SEQ ID NO: 162729
  derived and/or modified CDS sequence (opt4) from hemagglutinin__InfluenzaA__AFB70227

SEQ ID NO: 168269 - RNA, 1701 nt, Artificial Sequence
  derived and/or modified CDS sequence (opt4) from hemagglutinin__InfluenzaA__AFB70247
augaaggccauccugguggugcugcuguacaccuucgccaccgccaacgccgacacccugugcaucggcuaccacgccaacaacagcaccgacaccguggacaccgugcuggagaagaacgugaccgugacccacagcgugaaccugcuggaggacaagcacaacggcaagcugugcaagcugagaggcguggccccccugcaccugggcaagugcaacaucgccggcuggauccugggcaaccccgagugcgagagccugagcaccgccagcagcuggagcuacaucguggagaccagcagcagcgacaacggcaccugcuaccccggcgacuucaucgacuacgaggagcugagagagcagcugagcagcgugagcagcuucgagagauucgagaucuuccccaagaccagcagcuggcccaaccacgacagcaacaagggcgugaccgccgccugcccccacgccggcgccaagagcuucuacaagaaccugaucuggcuggugaagaagggcaacagcuaccccaagcugagcaagagcuacaucaacgacaagggcaaggaggugcuggugcuguggggcauccaccaccccagcaccagcgccgaccagcagagccuguaccagaacgccgacgccuacguguucgugggcaccagcagauacagcaaggaguucaagcccgagaucgccaucagacccaaggugagagaccaggagggcagaaugaacuacuacuggacccugguggagcccggcgacaagaucaccuucgaggccaccggcaaccugguggugcccagauacgccuucgccauggagagaaacgccggcagcggcaucaucaucagcgacacccccgugcacgacugcaacaccaccugccagacccccaagggcgccaucaacaccagccugcccuuccagaacauccaccccaucaccaucggcaagugccccaaguacgugaagagcaccaagcugagacuggccaccggccugagaaacgugcccagcauccagagcagaggccuguucggcgccaucgccggcuucaucgagggcggcuggaccggcaugguggacggcugguacggcuaccaccaccagaacgagcagggcagcggcuacgccgccgaccugaagagcacccagaacgccaucgacgagaucaccaacaaggugaacagcgugaucgagaagaugaacacccaguucaccgccgugggcaaggaguucaaccaccuggagaagagaaucgagaaccugaacaagaagguggacgacggcuuccuggacaucuggaccuacaacgccgagcugcuggugcugcuggagaacgagagaacccuggacuaccacgacagcaacgugaagaaccuguacgagaaggugagaagccagcugaagaacaacgccaaggagaucggcaacggcugcuucgaguucuaccacaagugcgacaacaccugcauggagagcgugaagaacggcaccuacgacuaccccaaguacagcgaggaggccaagcugaacagagaggagaucgacggcgugaagcuggagagcaccagaaucuaccagauccuggccaucuacagcaccguggccagcagccuggugcugguggugagccugggcgccaucagcuucuggaugugcagcaacggcagccugcagugcagaaucugcaucuga

SEQ ID NO: 168270 - RNA, 1701 nt, Artificial Sequence
  derived and/or modified CDS sequence (opt4) from hemagglutinin__InfluenzaA__AFB70257
augaaggccauccugguggugcugcuguacaccuucgccaccgccaacgccgacacccugugcaucggcuaccacgccaacaacagcaccgacaccguggacaccgugcuggagaagaacgugaccgugacccacagcgugaaccugcuggaggacaagcacaacggcaagcugugcaagcugagaggcguggccccccugcaccugggcaagugcaacaucgccggcuggauccugggcaaccccgagugcgagagccugagcaccgccagcagcuggagcuacaucguggagaccagcagcagcgacaacggcaccugcuaccccggcgacuucguggacuacgaggagcugagagagcagcugagcagcgugagcagcuucgagagauucgagaucuuccccaagaccagcagcuggcccaaccacgacagcaacaagggcgugaccgccgccugcccccacgccggcgccaagagcuucuacaagaaccugaucuggcuggugaagaagggcaacagcuaccccaagcugagcaagagcuacaucaacgacaagggcaaggaggugcuggugcuguggggcauccaccaccccagcaccagcgccgaccagcagagccuguaccagaacgccgacgccuacguguucgugggcaccagcagauacagcaagaaguucaagcccgagaucgccaucagacccaaggugagagaccaggagggcagaaugaacuacuacuggacccugguggagcccggcgacaagaucaccuucgaggccaccggcaaccugguggugcccagauacgccuucgccauggagagaaacgccggcagcggcaucaucaucagcgacacccccgugcacgacugcaacaccaccugccagacccccaagggcgccaucaacaccagccugcccuuccagaacauccaccccaucaccaucggcaagugccccaaguacgugaagagcaccaagcugagacuggccaccggccugagaaacgugcccagcauccagagcagaggccuguucggcgccaucgccggcuucaucgagggcggcuggaccggcaugguggacggcugguacggcuaccaccaccagaacgagcagggcagcggcuacgccgccgaccugaagagcacccagaacgccaucgacgagaucaccaacaaggugaacagcgugaucgagaagaugaacacccaguucaccgccgugggcaaggaguucaaccaccuggagaagagaaucgagaaccugaacaagaagguggacgacggcuuccuggacaucuggaccuacaacgccgagcugcuggugcugcuggagaacgagagaacccuggacuaccacgacagcaacgugaagaaccuguacgagaaggugagaagccagcugaagaacaacgccaaggagaucggcaacggcugcuucgaguucuaccacaagugcgacaacaccugcauggagagcgugaagaacggcaccuacgacuaccccaaguacagcgaggaggccaagcugaacagagaggagaucgacggcgugaagcuggagagcaccagaaucuaccagauccuggccaucuacagcaccguggccagcagccuggugcugguggugagccugggcgccaucagcuucuggaugugcagcaacggcagccugcagugcagaaucugcaucuga

SEQ ID NO: 168271 - RNA, 1701 nt, Artificial Sequence; identical to SEQ ID NO: 167136
  derived and/or modified CDS sequence (opt4) from hemagglutinin__InfluenzaA__AFB70267

SEQ ID NO: 168272 - RNA, 1701 nt, Artificial Sequence; identical to SEQ ID NO: 163199
  derived and/or modified CDS sequence (opt4) from hemagglutinin__InfluenzaA__AFB70277

SEQ ID NO: 168273 - RNA, 1701 nt, Artificial Sequence; identical to SEQ ID NO: 162729
  derived and/or modified CDS sequence (opt4) from hemagglutinin__InfluenzaA__AFB70287

SEQ ID NO: 168274 - RNA, 1701 nt, Artificial Sequence; identical to SEQ ID NO: 162729
  derived and/or modified CDS sequence (opt4) from hemagglutinin__InfluenzaA__AFB70297

SEQ ID NO: 168275 - RNA, 1701 nt, Artificial Sequence; identical to SEQ ID NO: 162729
  derived and/or modified CDS sequence (opt4) from hemagglutinin__InfluenzaA__AFB70307

SEQ ID NO: 168276 - RNA, 1701 nt, Artificial Sequence; identical to SEQ ID NO: 168256
  derived and/or modified CDS sequence (opt4) from hemagglutinin__InfluenzaA__AFB70317

SEQ ID NO: 168277 - RNA, 1701 nt, Artificial Sequence
  derived and/or modified CDS sequence (opt4) from hemagglutinin__InfluenzaA__AFB70327
augaaggccauccugguggugcugcuguacaccuucgccaccgccaacgccgacacccugugcaucggcuaccacgccaacaacagcaccgacaccguggacaccgugcuggagaagaacgugaccgugacccacagcgugaaccugcuggaggacaagcacaacggcaagcugugcaagcugagaggcguggccccccugcaccugggcaagugcaacaucgccggcuggauccugggcaaccccgagugcgagagccugagcaccgccagcagcuggagcuacaucguggagaccagcagcagcgacaacggcaccugcuaccccggcgacuucaucgacuacgaggagcugagagagcagcugagcagcgugagcagcuucgagagauucgagaucuuccccaagaccagcagcuggcccaaccacgacagcaacaagggcgugaccgccgccugcccccacgccggcgccaagagcuucuacaagaaccugaucuggcuggugaagaagggcaacagcuaccccaagcugagcaagagcuacaucaacgacaagggcaaggaggugcuggugcuguggggcauccaccaccccagcaccagcgccgaccagcagagccuguaccagaacgccgacgccuacguguucgugggcaccagcagauacagcaagaaguucaagcccgagaucgccaucagacccaaggugagagaccaggagggcagaaugaacuacuacuggacccugguggagcccggcgacaagaucaccuucgaggccaccggcaaccugguggugcccagauacgccuucgccauggagagaaacgccggcagcggcaucaucaucagcgacacccccgugcacgacugcaacaccaccugccagacccccaagggcgccaucaacaccagccugcccuuccagaacauccaccccaucaccaucggcaagugccccaaguacgugaagagcaccaagcugagacuggccaccggccugagaaacgugcccagcauccagagcagaggccuguucggcgccaucgccggcuucaucgagggcggcuggaccggcaugguggacggcugguacggcuaccaccaccagaacgagcagggcagcggcuacgccgccgaccugaagagcacccagaacgccaucgacgagaucaccaacaaggugaacagcgugaucgagaagaugaacacccaguucaccgccgugggcaaggaguucaaccaccugggcaagagaaucgagaaccugaacaagaagguggacgacggcuuccuggacaucuggaccuacaacgccgagcugcuggugcugcuggagaacgagagaacccuggacuaccacgacagcaacgugaagaaccuguacgagaaggugagaagccagcugaagaacaacgccaaggagaucggcaacggcugcuucgaguucuaccacaagugcgacaacaccugcauggagagcgugaagaacggcaccuacgacuaccccaaguacagcgaggaggccaagcugaacagagaggagaucgacggcgugaagcuggagagcaccagaaucuaccagauccuggccaucuacagcaccguggccagcagccuggugcugguggugagccugggcgccaucagcuucuggaugugcagcaacggcagccugcagugcagaaucugcaucuga

SEQ ID NO: 168278 - RNA, 1701 nt, Artificial Sequence; identical to SEQ ID NO: 162729
  derived and/or modified CDS sequence (opt4) from hemagglutinin__InfluenzaA__AFB70337

SEQ ID NO: 168279 - RNA, 1701 nt, Artificial Sequence; identical to SEQ ID NO: 164699
  derived and/or modified CDS sequence (opt4) from hemagglutinin__InfluenzaA__AFB70347

SEQ ID NO: 168280 - RNA, 1701 nt, Artificial Sequence; identical to SEQ ID NO: 162729
  derived and/or modified CDS sequence (opt4) from hemagglutinin__InfluenzaA__AFB70367

SEQ ID NO: 168281 - RNA, 1701 nt, Artificial Sequence; identical to SEQ ID NO: 162729
  derived and/or modified CDS sequence (opt4) from hemagglutinin__InfluenzaA__AFB70377

SEQ ID NO: 168282 - RNA, 1701 nt, Artificial Sequence; identical to SEQ ID NO: 163298
  derived and/or modified CDS sequence (opt4) from hemagglutinin__InfluenzaA__AFB70387

SEQ ID NO: 168283 - RNA, 1701 nt, Artificial Sequence; identical to SEQ ID NO: 162729
  derived and/or modified CDS sequence (opt4) from hemagglutinin__InfluenzaA__AFB70397

SEQ ID NO: 168284 - RNA, 1701 nt, Artificial Sequence; identical to SEQ ID NO: 162729
  derived and/or modified CDS sequence (opt4) from hemagglutinin__InfluenzaA__AFB70407

SEQ ID NO: 168285 - RNA, 1701 nt, Artificial Sequence
  derived and/or modified CDS sequence (opt4) from hemagglutinin__InfluenzaA__AFB77618
augaaggccauccugguggugcugcuguacaccuucgccaccgccaacgccgacacccugugcaucggcuaccacgccaacaacagcaccgacaccguggacaccgugcuggagaagaacgugaccgugacccacagcgugaaccugcuggaggacaagcacaacggcaagcugugcaagcugagaggcaucgccccccugcaccugggcaagugcaacaucgccggcuggauccugggcaaccccgagugcgagagccugagcaccgccagcagcuggagcuacaucguggagaccagcagcagcgacaacggcaccugcuaccccggcgacuucaucaacuacgaggagcugagagagcagcugagcagcgugagcagcuucgagagauucgagaucuuccccaagaccagcagcuggcccaaccacgacagcaacaagggcgugaccgccgccugcccccacgccggcgccaagagcuucuacaagaaccugaucuggcuggugaagaagggcaacagcuaccccaagcugagcaagagcuacaucaacgacaagggcaaggaggugcuggugcuguggggcauccaccaccccaccaccaccggcgaccagcagagccuguaccagaacgccgacggcuacguguucgugggcaccaccagauacagcaagaaguucaagcccgagaucggcaucagacccaaggugaaggaccaggagggcagaaugaacuacuacuggacccugguggagcccggcgacaagaucaccuucgaggccaccggcaaccugguggugcccagauacgccuucgccauggagagaaacgccggcagcggcaucaucaucagcgacacccccgugcacgacugcaacaccaccugccagacccccaagggcgccaucaacaccagccugcccuuccagaacauccaccccaucaccaucggcaagugccccaaguacgugaagagcaccaagcugagacuggccaccggccugagaaacgugcccagcauccagagcagaggccuguucggcgccaucgccggcuucaucgagggcggcuggaccggcaugguggacggcugguacggcuaccaccaccagaacgagcagggcagcggcuacgccgccgaccugaagagcacccagaacgccaucgacaagaucaccaacaaggugaacagcgugaucgagaagaugaacacccaguucaccgccgugggcaaggaguucaaccaccuggagaagagaaucgagaaccugaacaagaagguggacgacggcuuccuggacaucuggaccuacaacgccgagcugcuggugcugcuggagaacgagagaacccuggacuaccacgacagcaacgugaagaaccuguacgagaaggugagaaaccagcugaagaacaacgccaaggagaucggcaacggcugcuucgaguucuaccacaagugcgacaacaccugcauggagagcgugaagaacggcaccuacgacuaccccaaguacagcgaggaggccaagcugaacagagaggagaucgacggcgugaagcuggagagcaccagaaucuaccagauccuggccaucuacagcaccguggccagcagccuggugaugguggugagccugggcgccaucagcuucuggaugugcagcaacggcagccugcagugcagaaucugcaucuga

SEQ ID NO: 168286 - RNA, 1701 nt, Artificial Sequence; identical to SEQ ID NO: 166927
  derived and/or modified CDS sequence (opt4) from hemagglutinin__InfluenzaA__AFB77619

SEQ ID NO: 168287 - RNA, 1701 nt, Artificial Sequence; identical to SEQ ID NO: 166927
  derived and/or modified CDS sequence (opt4) from hemagglutinin__InfluenzaA__AFB77620

SEQ ID NO: 168288 - RNA, 1701 nt, Artificial Sequence
  derived and/or modified CDS sequence (opt4) from hemagglutinin__InfluenzaA__AFB77621
augaaggccauccugguggugcugcuguacaccuucgccaccgccaacgccgacacccugugcaucggcuaccacgccaacaacagcaccgacaccguggacaccgugcuggagaagaacgugaccgugacccacagcgugaaccugcuggaggacaagcacaacggcaagcugugcaagcugagaggcgugaccccccugcaccugggcaagugcaacaucgccggcuggauccugggcaaccccgagugcgagagccugagcaccgccagcagcuggagcuacaucguggagaccagcagcagcgacaacggcaccugcuaccccggcgacuucaucaacuacgaggagcugagagagcagcugagcagcgugagcagcuucgagagauucgagaucuuccccaagaccagcagcuggcccaaccacgacagcaacaagggcgugaccgccgccugcccccacgccggcgccaagagcuucuacaagaaccugaucuggcuggugaagaagggcaacagcuaccccaagcugagcaagagcuacaucaacgacaagggcaaggaggugcuggugcuguggggcauccaccaccccagcaccaccgccgaccagcagagccuguaccagaacgccgacgccuacguguucgugggcaccagcagauacagcaagaaguucaagcccgagaucgccaucagacccaaggugagagaccaggagggcagaaugaacuacuacuggacccugguggagcccggcgacaagaucaccuucgaggccaccggcaaccugguggugcccagauacgccuucgccauggagagaaacgccggcagcggcaucaucaucagcgacacccccgugcacgacugcaacaccaccugccagacccccaagggcgccaucaacaccagccugcccuuccagaacauccaccccaucaccaucggcaagugccccaaguacgugaagagcaccaagcugagacuggccaccggccugagaaacauccccagcauccagagcagaggccuguucggcgccaucgccggcuucaucgagggcggcuggaccggcaugguggacggcugguacggcuaccaccaccagaacgagcagggcagcggcuacgccgccgaccugaagagcacccagaacgccaucgacaagaucaccaacaaggugaacagcgugaucgagaagaugaacacccaguucaccgccgugggcaaggaguucaaccaccuggagaagagaaucgagaaccugaacaagaagguggacgacggcuuccuggacaucuggaccuacaacgccgagcugcuggugcugcuggagaacgagagaacccuggacuaccacgacagcaacgugaagaaccuguacgagaaggugagaaaccagcugaagaacaacgccaaggagaucggcaacggcugcuucgaguucuaccacaagugcgacaacaccugcauggagagcgugaagaacggcaccuacgacuaccccaaguacagcgaggaggccaagcugaacagagaggagaucgacggcgugaagcuggagagcaccagaaucuaccagauccuggccaucuacagcaccguggccagcagccuggugcugguggugagccugggcgccaucagcuucuggaugugcagcaacggcagccugcagugcagaaucugcaucuga

SEQ ID NO: 168289 - RNA, 1701 nt, Artificial Sequence
  derived and/or modified CDS sequence (opt4) from hemagglutinin__InfluenzaA__AFB77622
augaaggccauccugguggugcugcuguacaccuucgccaccgccaacgccgacacccugugcaucggcuaccacgccaacaacagcaccgacaccguggacaccgugcuggagaagaacgugaccgugacccacagcgugaaccugcuggaggacaagcacaacggcaagcugugcaagcugagaggcguggccccccugcaccugggcaagugcaacaucgccggcuggauccugggcaaccccgagugcgagagccugagcaccgccagcagcuggagcuacaucguggagaccagcagcagcgacaacggcaccugcuaccccggcgacuucaucaacuacgaggagcugagagagcagcugagcagcgugagcagcuucgagagauucgagaucuuccccaagaccagcagcuggcccaaccacgaccccaacaagggcgugaccgccgccugcccccacgccggcgccaagagcuucuacaagaaccugaucuggcuggugaagaagggcaacagcuaccccaagcugagcaagagcuacaucaacgacaagggcaaggaggugcuggugcuguggggcauccaccaccccagcaccaccgccgaccagcagagccuguaccagaacgccgacgccuacguguucgugggcaccagcagauacagcaagaaguucaagcccgagaucgccaucagacccaaggugagagaccaggagggcagaaugaacuacuacuggacccugguggagcccggcgacaagaucaccuucgaggccaccggcaaccugguggugcccagauacgccuucgccauggagagaaacgccggcagcggcaucaucaucagcgacacccccgugcacgacugcaacaccaccugccagacccccaagggcgccaucaacaccagccugcccuuccagaacauccaccccaucaccaucggcaagugccccaaguacgugaagagcaccaagcugagacuggccaccggccugagaaacgugcccagcauccagagcagaggccuguucggcgccaucgccggcuucaucgagggcggcuggaccggcaugguggacggcugguacggcuaccaccaccagaacgagcagggcagcggcuacgccgccgaccugaagagcacccagaacgccaucgacaagaucaccaacaaggugaacagcgugaucgagaagaugaacacccaguucaccgccgugggcaaggaguucaaccaccuggagaagagaaucgagaaccugaacaagaagguggacgacggcuuccuggacaucuggaccuacaacgccgagcugcuggugcugcuggagaacgagagaacccuggacuaccacgacagcaacgugaagaaccuguacgagaaggugagaaaccagcugaagaacaacgccaaggagaucggcaacggcugcuucgaguucuaccacaagugcgacaacaccugcauggagagcgugaagaacggcaccuacgacuaccccaaguacagcgaggaggccaagcugaacagagaggagaucgacggcgugaagcuggagagcaccagaaucuaccagauccuggccaucuacagcaccguggccagcagccuggugcugguggugagccugggcgccaucagcuucuggaugugcagcaacggcagccugcagugcagaaucugcaucuga

SEQ ID NO: 168290 - RNA, 1701 nt, Artificial Sequence; identical to SEQ ID NO: 166927
  derived and/or modified CDS sequence (opt4) from hemagglutinin__InfluenzaA__AFB77623

SEQ ID NO: 168291 - RNA, 1701 nt, Artificial Sequence; identical to SEQ ID NO: 166927
  derived and/or modified CDS sequence (opt4) from hemagglutinin__InfluenzaA__AFB77624

SEQ ID NO: 168292 - RNA, 1701 nt, Artificial Sequence
  derived and/or modified CDS sequence (opt4) from hemagglutinin__InfluenzaA__AFB77625
augaaggccauccugguggugcugcuguacaccuucaccaccgccaacgccgacacccugugcaucggcuaccacgccaacaacagcaccgacaccguggacaccgugcuggagaagaacgugaccgugacccacagcgugaaccugcuggaggacaagcacaacggcaagcugugcaagcugagaggcguggccccccugcaccugggcaagugcaacaucgccggcuggauccugggcaaccccgagugcgagagccugagcaccgccagcagcuggagcuacaucguggagaccagcagcagcgacaacggcaccugcuaccccggcgacuucaucaacuacgaggagcugagagagcagcugagcagcgugagcagcuucgagagauucgagaucuuccccaagaccagcagcuggcccaaccacgacagcaacaagggcgugaccgccgccugcccccacgccggcgccaagagcuucuacaagaaccugaucuggcuggugaagaagggcaacagcuaccccaagcugagcaagagcuacaucaacgacaagggcaaggaggugcuggugcuguggggcauccaccaccccagcaccaccgccgaccagcagagccuguaccagaacgccgacgccuacguguucgugggcaccagcagauacagcaagaaguucaagcccgagaucgccaucagacccaaggugagagaccaggagggcagaaugaacuacuacuggacccugguggagcccggcgacaagaucaccuucgaggccaccggcaaccugguggugcccagauacgccuucgccauggagagaaacgccggcagcggcaucaucaucagcgacacccccgugcacgacugcaacaccaccugccagacccccaagggcgccaucaacaccagccugcccuuccagaacauccaccccaucaccaucggcaagugccccaaguacgugaagagcaccaagcugagacuggccaccggccugagaaacgugcccagcauccagagcagaggccuguucggcgccaucgccggcuucaucgagggcggcuggaccggcaugguggacggcugguacggcuaccaccaccagaacgagcagggcagcggcuacgccgccgaccugaagagcacccagaacgccaucgacaagaucaccaacaaggugaacagcgugaucgagaagaugaacacccaguucaccgccgugggcaaggaguucaaccaccuggagaagagaaucgagaaccugaacaagaagguggacgacggcuuccuggacaucuggaccuacaacgccgagcugcuggugcugcuggagaacgagagaacccuggacuaccacgacagcaacgugaagaaccuguacgagaaggugagaaaccagcugaagaacaacgccaaggagaucggcaacggcugcuucgaguucuaccacaagugcgacaacaccugcauggagagcgugaagaacggcaccuacgacuaccccaaguacagcgaggaggccaagcugaacagagaggagaucgacggcgugaagcuggagagcaccagaaucuaccagauccuggccaucuacagcaccguggccagcagccuggugcugguggugagccugggcgccaucagcuucuggaugugcagcaacggcagccugcagugcagaaucugcaucuga

SEQ ID NO: 168293 - RNA, 1701 nt, Artificial Sequence
  derived and/or modified CDS sequence (opt4) from hemagglutinin__InfluenzaA__AFB77627
augaaggccauccugguggugcugcuguacaccuucgccaccgccaacgccgacacccugugcaucggcuaccacgccaacaacagcaccgacaccguggacaccgugcuggagaagaacgugaccgugacccacagcgugaaccugcuggaggacaagcacaacggcaagcugugcaagcugagaggcguggccccccugcaccugggcaagugcaacaucgccggcuggauccugggcaaccccgagugcgagagccugagcaccgccagcagcuggagcuacaucguggagaccagcagcagcgacaacggcaccugcuaccccggcgacuucaucaacuacgaggagcugagagagcagcugagcagcgugagcagcuucgagagauucgagaucuucagcaagaccagcagcuggcccaaccacgacagcaacaagggcgugaccgccgccugcccccacgccggcgccaagagcuucuacaagaaccugaucuggcuggugaagaagggcaacagcuaccccaagcugagcaagagcuacaucaacgacaagggcaaggaggugcuggugcuguggggcauccaccaccccagcaccaccgccgaccagcagagccuguaccagaacgccgacgccuacguguucgugggcaccagcagauacagcaagaaguucaagcccgagaucgccaucagacccaaggugagagaccaggagggcagaaugaacuacuacuggacccugguggagcccggcgacaagaucaccuucgaggccaccggcaaccugguggugcccagauacgccuucgccauggagagaaacgccggcagcggcaucaucaucagcgacacccccgugcacgacugcaacaccaccugccagacccccaagggcgccaucaacaccagccugcccuuccagaacauccaccccaucaccaucggcaagugccccaaguacgugaagagcaccaagcugagacuggccaccggccugagaaacgugcccagcauccagagcagaggccuguucggcgccaucgccggcuucaucgagggcggcuggaccggcaugguggacggcugguacggcuaccaccaccagaacgagcagggcagcggcuacgccgccgaccugaagagcacccagaacgccaucgacaagaucaccaacaaggugaacagcgugaucgagaagaugaacacccaguucaccgccgugggcaaggaguucaaccaccuggagaagagaaucgagaaccugaacaagaagguggacgacggcuuccuggacaucuggaccuacaacgccgagcugcuggugcugcuggagaacgagagaacccuggacuaccacgacagcaacgugaagaaccuguacgagaaggugagaaaccagcugaagaacaacgccaaggagaucggcaacggcugcuucgaguucuaccacaagugcgacaacaccugcauggagagcgugaagaacggcaccuacgacuaccccaaguacagcgaggaggccaagcugaacagagaggagaucgacggcgugaagcuggagagcaccagaaucuaccagauccuggccaucuacagcaccguggccagcagccuggugcugguggugagccugggcgccaucagcuucuggaugugcagcaacggcagccugcagugcagaaucugcaucuga

SEQ ID NO: 168294 - RNA, 1701 nt, Artificial Sequence; identical to SEQ ID NO: 166927
  derived and/or modified CDS sequence (opt4) from hemagglutinin__InfluenzaA__AFB77628

SEQ ID NO: 168295 - RNA, 1701 nt, Artificial Sequence
  derived and/or modified CDS sequence (opt4) from hemagglutinin__InfluenzaA__AFB77629
augaaggccauccugguggugcugcuguacaccuucaccaccgccaacgccgacacccugugcaucggcuaccacgccaacaacagcaccgacaccguggacaccgugcuggagaagaacgugaccgugacccacagcgugaaccugcuggaggacaagcacaacggcaagcugugcaagcugagaggcguggccccccugcaccugggcaagugcaacaucgccggcuggauccugggcaaccccgagugcgagagccugagcaccgccagcagcuggagcuacaucguggagaccagcagcagcgacaacggcaccugcuaccccggcgacuucaucaacuacgaggagcugagagagcagcugagcagcgugagcagcuucgagagauucgagaucuuccccaagaccagcagcuggcccaaccacgacagcaacaagggcgugaccgccgccugcccccacgccggcgccaagagcuucuacaagaaccugaucuggcuggugaagaagggcaacagcuaccccaagcugagcaagagcuacaucaacgacaagggcaaggaggugcuggugcuguggggcauccaccaccccagcaccaccgccgaccagcagagccuguaccagaacgccgacgccuacguguucgugggcaccagcagauacagcaagaaguucaagcccgagaucgccaucagacccaaggugagagaccaggagggcagaaugaacuacuacuggacccugguggagcccggcgacaagaucaccuucgaggccaccggcaaccugguggugcccagauacgccuucgccauggagagaaacgccggcagcggcaucaucaucagcgacacccccgugcacgacugcaacaccaccugccagacccccaagggcgccaucaacaccagccugcccuuccagaacauccaccccaucaccaucggcaagugccccaaguacgugaagagcaccaagcugagacuggccaccggccugagaaacgugcccagcauccagagcagaggccuguucggcgccaucgccggcuucaucgagggcggcuggaccggcaugguggacggcugguacggcuaccaccaccagaacgagcagggcagcggcuacgccgccgaccugaagagcacccagaacgccaucgacaagaucaccaacaaggugaacagcgugaucgagaagaugaacacccaguucaccgccgugggcaaggaguucaaccaccuggagaagagaaucgagaaccugaacaagaagguggacgacggcuuccuggacaucuggaccuacaacgaggagcugcuggugcugcuggagaacgagagaacccuggacuaccacgacagcaacgugaagaaccuguacgagaaggugagaaaccagcugaagaacaacgccaaggagaucggcaacggcugcuucgaguucuaccacaagugcgacaacaccugcauggagagcgugaagaacggcaccuacgacuaccccaaguacagcgaggaggccaagcugaacagagaggagaucgacggcgugaagcuggagagcaccagaaucuaccagauccuggccaucuacagcaccguggccagcagccuggugcugguggugagccugggcgccaucagcuucuggaugugcagcaacggcagccugcagugcagaaucugcaucuga

SEQ ID NO: 168296 - RNA, 1701 nt, Artificial Sequence
  derived and/or modified CDS sequence (opt4) from hemagglutinin__InfluenzaA__AFB77630
augaaggccauccugguggugcugcuguacaccuucgccaccgccaacgccgacacccugugcaucggcuaccacgccaacaacagcaccgacaccguggacaccgugcuggagaagaacgugaccgugacccacagcgugaaccugcuggaggacaagcacaacggcaagcugugcaagcugagaggcguggccccccugcaccugggcaagugcaacaucgccggcuggauccugggcaaccccgagugcgagagccugagcaccgccagcagcuggagcuacaucguggagaccagcagcagcgacaacggcaccugcuaccccggcgacuucaucaacuacgaggagcugagagagcagcugagcagcgugagcagcuucgagagauucgagaucuuccccaagaccagcagcuggcccaaccacgagagcaacaagggcgugaccgccgccugcccccacgccggcgccaagagcuucuacaagaaccugaucuggcuggugaagaagggcaacagcuaccccaagcugagcaagagcuacaucaacgacaagggcaaggaggugcuggugcuguggggcauccaccaccccagcaccaccgccgaccagcagagccuguaccagaacgccgacgccuacguguucgugggcaccagcagauacagcaagaaguucaagcccgagaucgccaucagacccaaggugagagaccaggagggcagaaugaacuacuacuggacccugguggagcccggcgacaagaucaccuucgaggccaccggcaaccugguggugcccagauacgccuucgccauggagagaaacgccggcagcggcaucaucaucagcgacacccccgugcacgacugcaacaccaccugccagacccccaagggcgccaucaacaccagccugcccuuccagaacauccaccccaucaccaucggcaagugccccaaguacgugaagagcaccaagcugagacuggccaccggccugagaaacgugcccagcauccagagcagaggccuguucggcgccaucgccggcuucaucgagggcggcuggaccggcaugguggacggcugguacggcuaccaccaccagaacgagcagggcagcggcuacgccgccgaccugaagagcacccagaacgccaucgacaagaucaccaacaaggugaacagcgugaucgagaagaugaacacccaguucaccgccgugggcaaggaguucaaccaccuggagaagagaaucgagaaccugaacaagaagguggacgacggcuuccuggacaucuggaccuacaacgccgagcugcuggugcugcuggagaacgagagaacccuggacuaccacgacagcaacgugaagaaccuguacgagaaggugagaaaccagcugaagaacaacgccaaggagaucggcaacggcugcuucgaguucuaccacaagugcgacaacaccugcauggagagcgugaagaacggcaccuacgacuaccccaaguacagcgaggaggccaagcugaacagagaggagaucgacggcgugaagcuggagagcaccagaaucuaccagauccuggccaucuacagcaccguggccagcagccuggugcugguggugagccugggcgccaucagcuucuggaugugcagcaacggcagccugcagugcagaaucugcaucuga

SEQ ID NO: 168297 - RNA, 1701 nt, Artificial Sequence
  derived and/or modified CDS sequence (opt4) from hemagglutinin__InfluenzaA__AFB77631
augaaggccauccugguggugcugcuguacaccuucaccaccgccaacgccgacacccugugcaucggcuaccacgccaacaacagcaccgacaccguggacaccgugcuggagaagaacgugaccgugacccacagcgugaaccugcuggaggacaagcacaacggcaagcugugcaagcugagaggcguggccccccugcaccugggcaagugcaacaucgccggcuggauccugggcaaccccgagugcgagagccugagcaccgccagcagcuggagcuacaucguggagaccagcagcagcgacaacggcaccugcuaccccggcgacuucaucaacuacgaggagcugagagagcagcugagcagcgugagcagcuucgagagauucgagaucuuccccaagaccagcagcuggcccaaccacgacagcaacaagggcgugaccgccgccugcccccacgccggcgccaagagcuucuacaagaaccugaucuggcuggugaagaagggcaacagcuaccccaagcugagcaagagcuacaucaacgacaagggcaaggaggugcuggugcuguggggcauccaccaccccagcaccaccgccgaccagcagagccuguaccagaacgccgacgccuacguguucgugggcaccagcagauacagcaagaaguucaagcccgagaucgccaucagacccaaggugagagaccaggagggcagaaugaacuacuacuggacccugguggagcccggcgacaagaucaccuucgaggccaccggcaaccugguggugcccagauacgccuucgccauggagagaaacgccggcagcggcaucaucaucagcgacacccccgugcacgacugcaacaccaccugccagacccccaagggcgccaucaacaccagccugcccuuccagaacauccaccccaucaccaucggcaagugccccaaguacgugaagagcaccaagcugagacuggccaccggccugagaaacgugcccagcauccagagcagaggccuguucggcgccaucgccggcuucaucgagggcggcuggaccggcaugguggacggcugguacggcuaccaccaccagaacgagcagggcagcggcuacgccgccgaccugaagagcacccagaacgccaucgacaagaucaccaacaaggugaacagcgugaucgagaagaugaacacccaguucaccgccgugggcaaggaguucaaccaccuggagaagagaaucgagaaccugaacaagaagguggacgacggcuuccuggacaucuggaccuacaacgccgagcugcuggugcugcuggagaacgagagaacccuggacuaccacgacagcaacgugaagaaccuguacgagaaggugagaaaccagcugaagaccaacgccaaggagaucggcaacggcugcuucgaguucuaccacaagugcgacaacaccugcauggagagcgugaagaacggcaccuacgacuaccccaaguacagcgaggaggccaagcugaacagagaggagaucgacggcgugaagcuggagagcaccagaaucuaccagauccuggccaucuacagcaccguggccagcagccuggugcugguggugagccugggcgccaucagcuucuggaugugcagcaacggcagccugcagugcagaaucugcaucuga

SEQ ID NO: 168298 - RNA, 1701 nt, Artificial Sequence
  derived and/or modified CDS sequence (opt4) from hemagglutinin__InfluenzaA__AFB77632
augaaggccauccugguggugcugcuguacaccuucgccaccgccaacgccgacacccugugcaucggcuaccacgccaacaacagcaccgacaccguggacaccgugcuggagaagaacgugaccgugacccacagcgugaaccugcuggaggacaagcacaacggcaagcugugcaagcugagaggcguggccccccugcaccugggcaagugcaacaucgccggcuggauccugggcaaccccgagugcgagagccugaccaccgccagcagcuggagcuacaucguggagaccagcagcagcgacaacggcaccugcuaccccggcgacuucaucaacuacgaggagcugagagagcagcugagcagcgugagcagcuucgagagauucgagaucuuccccaagaccagcagcuggcccaaccacgacagcaacaagggcgugaccgccgccugcccccacgccggcgccaagagcuucuacaagaaccugaucuggcuggugaagaagggcaacagcuaccccaagcugagcaagagcuacaucaacgacaagggcaaggaggugcuggugcuguggggcauccaccaccccagcaccaccgccgaccagcagagccuguaccagaacgccgacgccuacguguucgugggcaccagcagauacagcaagaaguucaagcccgagaucgccaucagacccaaggugagagaccaggagggcagaaugaacuacuacuggacccugguggagcccggcgacaagaucaccuucgaggccaccggcaaccugguggugcccagauacgccuucgccauggagagaaacgccggcagcggcaucaucaucagcgacacccccgugcacgacugcaacaccaccugccagacccccaagggcgccaucaacaccagccugcccuuccagaacauccaccccaucaccaucggcaagugccccaaguacgugaagagcaccaagcugagacuggccaccggccugagaaacgugcccagcauccagagcagaggccuguucggcgccaucgccggcuucaucgagggcggcuggaccggcaugguggacggcugguacggcuaccaccaccagaacgagcagggcagcggcuacgccgccgaccugaagagcacccagaacgccaucgacaagaucaccaacaaggugaacagcgugaucgagaagaugaacacccaguucaccgccgugggcaaggaguucaaccaccuggagaagagaaucgagaaccugaacaagaagguggacgacggcuuccuggacaucuggaccuacaacgccgagcugcuggugcugcuggagaacgagagaacccuggacuaccacgacagcaacgugaagaaccuguacgagaaggugagaaaccagcugaagaacaacgccaaggagaucggcaacggcugcuucgaguucuaccacaagugcgacaacaccugcauggagagcgugaagaacggcaccuacgacuaccccaaguacagcgaggaggccaagcugaacagagaggagaucgacggcgugaagcuggagagcaccagaaucuaccagauccuggccaucuacagcaccguggccagcagccuggugcugguggugagccugggcgccaucagcuucuggaugugcagcaacggcagccugcagugcaagaucugcaucuga

SEQ ID NO: 168299 - RNA, 1701 nt, Artificial Sequence
  derived and/or modified CDS sequence (opt4) from hemagglutinin__InfluenzaA__AFB77633
augaaggccauccugguggugcugcuguacaccuucgccaccgccaacgccgacacccugugcaucggcuaccacgccaacaacagcaccgacaccguggacaccgugcuggagaagaacgugaccgugacccacagcgugaaccugcuggaggacaagcacaacggcaagcugugcaagcugagaggcguggccccccugcaccugggcaagugcaacaucgccggcuggauccugggcaaccccgagugcgagagccugagcaccgccagcagcuggagcuacaucguggagaccagcagcagcgacaacggcaccugcuaccccggcgacuucaucaacuacgaggagcugagagagcagcugagcagcgugagcagcuucgagagauucgagaucuuccccaagaccagcagcuggcccaaccacgacagcaacaagggcgugaccgccgccugcagccacgccggcgccaagagcuucuacaagaaccugaucuggcuggugaagaagggcaacagcuaccccaagcugagcaagagcuacaucaacgacaagggcaaggaggugcuggugcuguggggcauccaccaccccagcaccaccgccgaccagcagagccuguaccagaacgccgacgccuacguguucgugggcaccagcagauacagcaagaaguucaagcccgagaucgccaucagacccaaggugagagaccaggagggcagaaugaacuacuacuggacccugguggagcccggcgacaagaucaccuucgaggccaccggcaaccugguggugcccagauacgccuucgccauggagagaaacgccggcagcggcaucaucaucagcgacacccccgugcacgacugcaacaccaccugccagacccccaagggcgccaucaacaccagccugcccuuccagaacauccaccccaucaccaucggcaagugccccaaguacgugaagagcaccaagcugagacuggccaccggccugagaaacgugcccagcauccagagcagaggccuguucggcgccaucgccggcuucaucgagggcggcuggaccggcaugguggacggcugguacggcuaccaccaccagaacgagcagggcagcggcuacgccgccgaccugaagagcacccagaacgccaucgacaagaucaccaacaaggugaacagcgugaucgagaagaugaacacccaguucaccgccgugggcaaggaguucaaccaccuggagaagagaaucgagaaccugaacaagaagguggacgacggcuuccuggacaucuggaccuacaacgccgagcugcuggugcugcuggagaacgagagaacccuggacuaccacgacagcaacgugaagaaccuguacgagaaggugaagaaccagcugaagaacaacgccaaggagaucggcaacggcugcuucgaguucuaccacaagugcgacaacacccccaucaagaacgugaagaacggcaccuacgacuaccccaaguacagcgaggaggccaagcugaacagagaggagaucgacggcgugaagcuggagagcaccagaaucuaccagauccuggccaucuacagcaccguggccagcagccuggugcugguggugagccugggcgccaucagcuucuggaugugcagcaacggcagccugcagugcagaaucugcaucuga

SEQ ID NO: 168300 - RNA, 1701 nt, Artificial Sequence
  derived and/or modified CDS sequence (opt4) from hemagglutinin__InfluenzaA__AFB77634
augaaggccauccugguggugcugcuguacaccuucgccaccgccaacgccgacacccugugcaucggcuaccacgccaacaacagcaccgacaccguggacaccgugcuggagaagaacgugaccgugacccacagcgugaaccugcuggaggacaagcacaacggcaagcugugcaagcugagaggcguggccccccugcaccugggcaagugcaacaucgccggcuggauccugggcaaccccgagugcgagagccugagcaccgccagcagcuggagcuacaucguggagaccagcagcagcgacaacggcaccugcuaccccggcgacuucaucaacuacgaggagcugagagagcagcugagcagcgugagcagcuucgagagauucgagaucuuccccaagaccagcagcuggcccaaccacgacagcaacaagggcgugaccgccgccugcccccacgccggcgccaagagcuucuacaagaaccugaucuggcuggugaagaagggcaacagcuaccccaagcugagcaagagcuacaucaacgacaagggcaaggaggugcuggugcuguggggcauccaccaccccagcaccaccgccgaccagcagagccuguaccagaacgccgacgccuacguguucgugggcaccagcagauacagcaagaaguucaagcccgagaucgccaucagacccaaggugagagaccaggagggcagaaugaacuacuacuggacccugguggagcccggcgagaagaucaccuucgaggccaccggcaaccugguggugcccagauacgccuucgccauggagagaaacgccggcagcggcaucaucaucagcgacacccccgugcacgacugcaacaccaccugccagacccccaagggcgccaucaacaccagccugcccuuccagaacauccaccccaucaccaucggcaagugccccaaguacgugaagagcaccaagcugagacuggccaccggccugagaaacgugcccagcauccagagcagaggccuguucggcgccaucgccggcuucaucgagggcggcuggaccggcaugguggacggcugguacggcuaccaccaccagaacgagcagggcagcggcuacgccgccgaccugaagagcacccagaacgccaucgacaagaucaccaacaaggugaacagcgugaucgagaagaugaacacccaguucaccgccgugggcaaggaguucaaccaccuggagaagagaaucgagaaccugaacaagaagguggacgacggcuuccuggacaucuggaccuacaacgccgagcugcuggugcugcuggagaacgagagaacccuggacuaccacgacagcaacgugaagaaccuguacgagaaggugagaaaccagcugaagaacaacgccaaggagaucggcaacggcugcuucgaguucuaccacaagugcgacaacaccugcauggagagcgugaagaacggcaccuacgacuaccccaaguacagcgaggaggccaagcugaacagagaggagaucgacggcgugaagcuggagagcaccagaaucuaccagauccuggccaucuacagcaccguggccagcagccuggugcugguggugagccugggcgccaucagcuucuggaugugcagcaacggcagccugcagugcagaaucugcaucuga

SEQ ID NO: 168301 - RNA, 1701 nt, Artificial Sequence
  derived and/or modified CDS sequence (opt4) from hemagglutinin__InfluenzaA__AFB77635
augaaggccauccugguggugcugcuguacaccuucgccaccgccaacgccgacacccugugcaucggcuaccacgccaacaacagcaccgacaccguggacaccgugcuggagaagaacgugaccgugacccacagcgugaaccugcuggaggacaagcacaacggcaagcugugcaagcugagaggcguggccccccugcaccugggcaagugcaacaucgccggcuggauccugggcaaccccgagugcgagagccugagcaccgccagccccuggagcuacaucguggagaccagcagcagcgacaacggcaccugcuaccccggcgacuucaucaacuacgaggagcugagagagcagcugagcagcgugagcagcuucgagagauucgagaucuuccccaagaccagcagcuggcccaaccacgacagcaacaagggcgugaccgccgccugcccccacgccggcgccaagagcuucuacaagaaccugaucuggcuggugaagaagggcaacagcuaccccaagcugagcaagagcuacaucaacgacaagggcaaggaggugcuggugcuguggggcauccaccaccccagcaccaccgccgaccagcagagccuguaccagaacgccgacgccuacguguucgugggcaccagcagauacagcaagaaguucaagcccgagaucgccaucagacccaaggugagagaccaggagggcagaaugaacuacuacuggacccugguggagcccggcgacaagaucaccuucgaggccaccggcaaccugguggugcccagauacgccuucgccauggagagaaacgccggcagcggcaucaucaucagcgacacccccgugcacgacugcaacaccaccugccagacccccaagggcgccaucaacaccagccugcccuuccagaacauccaccccaucaccaucggcaagugccccaaguacgugaagagcaccaagcugagacuggccaccggccugagaaacgugcccagcauccagagcagaggccuguucggcgccaucgccggcuucaucgagggcggcuggaccggcaugguggacggcugguacggcuaccaccaccagaacgagcagggcagcggcuacgccgccgaccugaagagcacccagaacgccaucgacaagaucaccaacaaggugaacagcgugaucgagaagaugaacacccaguucaccgccgugggcaaggaguucaaccaccuggagaagagaaucgagaaccugaacaagaagguggacgacggcuuccuggacaucuggaccuacaacgccgagcugcuggugcugcuggagaacgagagaacccuggacuaccacgacagcaacgugaagaaccuguacgagaaggugagaaaccagcugaagaacaacgccaaggagaucggcaacggcugcuucgaguucuaccacaagugcgacaacaccugcauggagagcgugaagaacggcaccuacgacuaccccaaguacagcgaggaggccaagcugaacagagaggagaucgacggcgugaagcuggagagcaccagaaucuaccagauccuggccaucuacagcaccguggccagcagccuggugcugguggugagccugggcgccaucagcuucuggaugugcagcaacggcagccugcagugcagaaucugcaucuga

SEQ ID NO: 168302 - RNA, 1701 nt, Artificial Sequence
  derived and/or modified CDS sequence (opt4) from hemagglutinin__InfluenzaA__AFB77636
augaaggccauccugguggugcugcuguacaccuucgccaccgccaacgccgacacccugugcaucggcuaccacgccaacaacagcaccgacaccguggacaccgugcuggagaagaacgugaccgugacccacagcgugaaccugcuggaggacaagcacaacggcaagcugugcaagcugagaggcguggccccccugcaccugggcaagugcaacaucgccggcuggauccugggcaaccccgagugcgagagccugagcaccgccagcagcuggagcuacaucguggagaccagcagcagcgacaacggcaccugcuaccccggcgacuucaucaacuacgaggagcugagagagcagcugagcagcgugagcagcuucgagagauucgagaucuuccccaagaccagcagcuggcccaaccacgacagcaacaagggcgugaccgccgccugcccccacgccggcgccaagagcuucuacaagaaccugaucuggcuggugaagaagggcaacagcuaccccaagcugagcaagagcuacaucaacgacaagggcaaggaggugcuggugcuguggggcauccaccaccccagcaccaccgccgaccagcagagccuguaccagaacgccgacgccuacguguucgugggcaccagcagauacagcaagaaguucaagcccgagaucgccaucagacccaaggugagagaccaggagggcagaaugaacuacuacuggacccugguggagcccggcgacaagaucaccuucgaggccaccggcaaccugguggugcccagauacgccuucgccauggagagaaaggccggcagcggcaucaucaucagcgacacccccgugcacgacugcaacaccaccugccagacccccaagggcgccaucaacaccagccugcccuuccagaacauccaccccaucaccaucggcaagugccccaaguacgugaagagcaccaagcugagacuggccaccggccugagaaacgugcccagcauccagagcagaggccuguucggcgccaucgccggcuucaucgagggcggcuggaccggcaugguggacggcugguacggcuaccaccaccagaacgagcagggcagcggcuacgccgccgaccugaagagcacccagaacgccaucgacaagaucaccaacaaggugaacagcgugaucgagaagaugaacacccaguucaccgccgugggcaaggaguucaaccaccuggagaagagaaucgagaaccugaacaagaagguggacgacggcuuccuggacaucuggaccuacaacgccgagcugcuggugcugcuggagaacgagagaacccuggacuaccacgacagcaacgugaagaaccuguacgagaaggugagaaaccagcugaagaacaacgccaaggagaucggcaacggcugcuucgaguucuaccacaagugcgacaacaccugcauggagagcgugaagaacggcaccuacgacuaccccaaguacagcgaggaggccaagcugaacagagaggagaucgacggcgugaagcuggagagcaccagaaucuaccagauccuggccaucuacagcaccguggccagcagccuggugaugguggugagccugggcgccaucagcuucuggaugugcagcaacggcagccugcagugcagaaucugcaucuga

SEQ ID NO: 168303 - RNA, 1701 nt, Artificial Sequence
  derived and/or modified CDS sequence (opt4) from hemagglutinin__InfluenzaA__AFB77637
augaaggccauccugguggugcugcuguacaccuucgccaccgccaacgccgacacccugugcaucggcuaccacgccaacaacagcaccgacaccguggacaccgugcuggagaagaacgugaccgugacccacagcgugaaccugcuggaggacaagcacaacggcaagcugugcaagcugagaggcguggccccccugcaccugggcaagugcaacaucgccggcuggauccugggcaaccccgagugcgagagccugagcaccgccagcagcuggagcuacaucguggagaccagcagcagcgacaacggcaccugcuaccccggcgacuucaucaacuacgaggagcugagagagcagcugagcagcgugagcagcuucgagagauucgagaucuuccccaagaccagcagcuggcccaaccacgacagcaacaagggcgugaccgccgccugcccccacgccggcgccaagagcuucuacaagaaccugaucuggcuggugaagaagggcaacagcuaccccaagcugagcaagagcuacaucaacgacaagggcaaggaggugcuggugcuguggggcauccaccaccccagcaccaccgccgaccagcagagccuguaccagaacgccgacgccuacguguucgugggcaccagcagauacagcaagaaguucaagcccgagaucgccaucagacccaagggcagagaccaggagggcagaaugaacuacuacuggacccugguggagcccggcgacaagaucaccuucgaggccaccggcaaccugguggugcccagauacgccuucgccauggagagaaacgccggcagcggcaucaucaucagcgacacccccgugcacgacugcaacaccaccugccagacccccaagggcgccaucaacaccagccugcccuuccagaacauccaccccaucaccaucggcaagugccccaaguacgugaagagcaccaagcugagacuggccaccggccugagaaacgugcccagcauccagagcagaggccuguucggcgccaucgccggcuucaucgagggcggcuggaccggcaugguggacggcugguacggcuaccaccaccagaacgagcagggcagcggcuacgccgccgaccugaagagcacccagaacgccaucgacaagaucaccaacaaggugaacagcgugaucgagaagaugaacacccaguucaccgccgugggcaaggaguucaaccaccuggagaagagaaucgagaaccugaacaagaagguggacgacggcuuccuggacaucuggaccuacaacgccgagcugcuggugcugcuggagaacgagagaacccuggacuaccacgacagcaacgugaagaaccuguacgagaaggugagaaaccagcugaagaacaacgccaaggagaucggcaacggcugcuucgaguucuaccacaagugcgacaacaccugcauggagagcgugaagaacggcaccuacgacuaccccaaguacagcgaggaggccaagcugaacagagaggagaucgacggcgugaagcuggagagcaccagaaucuaccagauccuggccaucuacagcaccguggccagcagccuggugcugguggugagccugggcgccaucagcuucuggaugugcagcaacggcagccugcagugcagaaucugcaucuga

SEQ ID NO: 168304 - RNA, 1701 nt, Artificial Sequence
  derived and/or modified CDS sequence (opt4) from hemagglutinin__InfluenzaA__AFB77638
augaaggccauccugguggugcugcuguacaccuucgccaccgccaacgccgacacccugugcaucggcuaccacgccaacaacagcaccgacaccguggacaccgugcuggagaagaacgugaccgugacccacagcgugaaccugcuggaggacaagcacaacggcaagcugugcaagcugagaggcguggccccccugcaccugggcaagugcaacaucgccggcuggauccugggcaaccccgagugcgagagccugagcaccgccagcagcuggagcuacaucguggagaccagcagcagcgacaacggcaccugcuaccccggcgacuucaucaacuacgaggagcugagagagcagcugagcagcgugagcagcuucgagagauucgagaucuuccccaagaccagcagcuggcccaaccacgacagcaacaagggcgugaccgccgccugcccccacgccggcgccaagagcuucuacaagaaccugaucuggcuggugaagaagggcaacagcuaccccaagcugagcaaguucuacaucaacgacaagggcaaggaggugcuggugcuguggggcauccaccaccccagcaccaccgccgaccagcagagccuguaccagaacgccgacgccuacguguucgugggcaccagcagauacagcaagaaguucaagcccgagaucgccaucagacccaaggugagagaccaggagggcagaaugaacuacuacuggacccugguggagcccggcgacaagaucaccuucgaggccaccggcaaccugguggugcccagauacgccuucgccauggagagaaacgccggcagcggcaucaucaucagcgacacccccgugcacgacugcaacaccaccugccagacccccaagggcgccaucaacaccagccugcccuuccagaacauccaccccaucaccaucggcaagugccccaaguacgugaagagcaccaagcugagacuggccaccggccugagaaacgugcccagcauccagagcagaggccuguucggcgccaucgccggcuucaucgagggcggcuggaccggcaugguggacggcugguacggcuaccaccaccagaacgagcagggcagcggcuacgccgccgaccugaagagcacccagaacgccaucgacaagaucaccaacaaggugaacagcgugaucgagaagaugaacacccaguucaccgccgugggcaaggaguucaaccaccuggagaagagaaucgagaaccugaacaagaagguggacgacggcuuccuggacaucuggaccuacaacgccgagcugcuggugcugcuggagaacgagagaacccuggacuaccacgacagcaacgugaagaaccuguacgagaaggugagaaaccagcugaagaacaacgccaaggagaucggcaacggcugcuucgaguucuaccacaagugcgacaacaccugcauggagagcgugaagaacggcaccuacgacuaccccaaguacagcgaggaggccaagcugaacagagaggagaucgacggcgugaagcuggagagcaccagaaucuaccagauccuggccaucuacagcaccguggccagcagccuggugcugguggugagccugggcgccaucagcuucuggaugugcagcaacggcagccugcagugcagaaucugcaucuga

SEQ ID NO: 168305 - RNA, 1701 nt, Artificial Sequence; identical to SEQ ID NO: 166927
  derived and/or modified CDS sequence (opt4) from hemagglutinin__InfluenzaA__AFB77639

SEQ ID NO: 168306 - RNA, 1701 nt, Artificial Sequence
  derived and/or modified CDS sequence (opt4) from hemagglutinin__InfluenzaA__AFB77640
augaaggccauccugguggugcugcuguacaccuucgccaccgccaacgccgacacccugugcaucggcuaccacgccaacaacagcaccgacaccguggacaccgugcuggagaagaacgugaccgugacccacagcgugaaccugcuggaggacaagcacaacggcaagcugugcaagcugagaggcguggccccccugcaccugggcaagugcaacaucgccggcuggauccugggcaaccccgagugcgagagccugagcaccgccagcagcuggagcuacaucguggagaccagcagcagcgacaacggcaccugcuaccccggcgacuucaucaacuacgaggagcugagagagcagcugagcagcgugagcagcuucgagagauucgagaucuuccccaagaccagcagcuggcccaaccacgacagcaacaagggcgugaccgccgccugcccccacgccggcgccaagagcuucuacaagaaccugaucuggcuggugaagaagggcaacagcuaccccaagcugagcaagagcuacaucaacgacaagggcaaggaggugcuggugcuguggggcauccaccaccccagcaccaccgccgaccagcagggccuguaccagaacgccgacgccuacguguucgugggcaccagcagauacagcaagaaguucaagcccgagaucgccaucagacccaaggugagagaccaggagggcagaaugaacuacuacuggacccugguggagcccggcgacaagaucaccuucgaggccaccggcaaccugguggugcccagauacgccuucgccauggagagaaacgccggcagcggcaucaucaucagcgacacccccgugcacgacugcaacaccaccugccagacccccaagggcgccaucaacaccagccugcccuuccagaacauccaccccaucaccaucggcaagugccccaaguacgugaagagcaccaagcugagacuggccaccggccugagaaacgugcccagcauccagagcagaggccuguucggcgccaucgccggcuucaucgagggcggcuggaccggcaugguggacggcugguacggcuaccaccaccagaacgagcagggcagcggcuacgccgccgaccugaagagcacccagaacgccaucgacaagaucaccaacaaggugaacagcgugaucgagaagaugaacacccaguucaccgccgugggcaaggaguucaaccaccuggagaagagaaucgagaaccugaacaagaagguggacgacggcuuccuggacaucuggaccuacaacgccgagcugcuggugcugcuggagaacgagagaacccuggacuaccacgacagcaacgugaagaaccuguacgagaaggugagaaaccagcugaagaacaacgccaaggagaucggcaacggcugcuucgaguucuaccacaagugcgacaacaccugcauggagagcgugaagaacggcaccuacgacuaccccaaguacagcgaggaggccaagcugaacagagaggagaucgacggcgugaagcuggagagcaccagaaucuaccagauccuggccaucuacagcaccguggccagcagccuggugcugguggugagccugggcgccaucagcuucuggaugugcagcaacggcagccugcagugcagaaucugcaucuga

SEQ ID NO: 168307 - RNA, 1701 nt, Artificial Sequence
  derived and/or modified CDS sequence (opt4) from hemagglutinin__InfluenzaA__AFB77641
augaaggccauccugguggugcugcuguacaccuucgccaccgccaacgccgacacccugugcaucggcuaccacgccaacaacagcaccgacaccguggacaccgugcuggagaagaacgugaccgugacccacagcgugaaccugcuggaggacaagcacaacggcaagcugugcaagcugagaggcguggccccccugcaccugggcaagugcaacaucgccggcuggauccugggcaaccccgagugcgagagccugagcaccgccagcagcuggagcuacaucguggagaccagcagcagcgacaacggcaccugcuaccccggcgacuucaucaacuacgaggagcugagagagcagcugagcagcgugagcagcuucgagagauucgagaucuuccccaagaccagcagcuggcccaaccacgacagcaacaagggcgugaccgccgccugcccccacgccggcgccaagagcuucuacaagaaccugaucuggcuggugaagaagggcaacagcuaccccaagcugagcaagagcuacaucaacgacaagggcaaggaggugcuggugcuguggggcauccaccaccccagcaccaccgccgaccagcagagccuguaccagaacgccgacgccuacguguucgugggcaccagcagauacagcaagaaguucaagcccgagaucgccaucagacccaaggugagagaccaggagggcagaaugaacuacuacuggacccugguggagcccggcgacaagaucaccuucgaggccaccggcaaccugguggugcccagauacgccuucgccauggagagaaacgccggcagcggcaucaucaucagcgacacccccgugcacgacugcaacaccaccugccagacccccaagggcgccaucaacaccagccugcccuuccagaacauccaccccaucaccaucggcaagugccccaaguacgugaagagcaccaagcugagacuggccaccggccugagaaacgugcccagcauccagagcagaggccuguucggcgccaucgccggcuucaucgagggcggcuggaccggcaugguggacggcugguacggcuaccaccaccagaacgagcagggcagcggcuacgccgccgaccugaagagcacccagaacgccaucgacaagaucaccaacaaggugaacagcgugaucgagaagaugaacacccaguucaccgccgugggcaaggaguucaaccaccuggagaagagaaucgagaaccugaacaagaagguggacgacggcuuccuggacaucuggaccuacaacgccgagcugcuggugcugcuggagaacgagagaacccuggacuaccacgacagcaacgugaagaaccuguacgagaaggugagaaaccagcugaagaacaacgccaaggagaucggcaacggcugcuucgaguucuaccacaagugcgacaacaugugcauggagagcgugaagaacggcaccuacgacuaccccaaguacagcgaggaggccaagcugaacagagaggagaucgacggcgugaagcuggagagcaccagaaucuaccagauccuggccaucuacagcaccguggccagcagccuggugcugguggugagccugggcgccaucagcuucuggaugugcagcaacggcagccugcagugcagaaucugcaucuga

SEQ ID NO: 168308 - RNA, 1701 nt, Artificial Sequence; identical to SEQ ID NO: 166927
  derived and/or modified CDS sequence (opt4) from hemagglutinin__InfluenzaA__AFB77642

SEQ ID NO: 168309 - RNA, 1701 nt, Artificial Sequence
  derived and/or modified CDS sequence (opt4) from hemagglutinin__InfluenzaA__AFB77643
augaaggccauccugguggugcugcuguacaccuucgccaccgccaacgccgacacccugugcaucggcuaccacgccaacaacagcaccgacaccguggacaccgugcuggagaagaacgugaccgugacccacagcgugaaccugcuggaggacaagcacaacggcaagcugugcaagcugagaggcguggccccccugcaccugggcaagugcaacaucgccggcuggauccugggcaaccccgagugcgagagccugagcaccgccagcagcuggagcuacaucguggagaccagcagcagcgacaacggcaccugcuaccccggcgacuucaucaacuacgaggagcugagagagcagcugagcagcgugagcagcuucgagagauucgagaucuuccccaagcccagcagcuggcccaaccacgacagcaacaagggcgugaccgccgccugcccccacgccggcgccaagagcuucuacaagaaccugaucuggcuggugaagaagggcaacagcuaccccaagcugagcaagagcuacaucaacgacaagggcaaggaggugcuggugcuguggggcauccaccaccccagcaccaccgccgaccagcagagccuguaccagaacgccgacgccuacguguucgugggcaccagcagauacagcaagaaguucaagcccgagaucgccaucagacccaaggugagagaccaggagggcagaaugaacuacuacuggacccugguggagcccggcgacaagaucaccuucgaggccaccggcaaccugguggugcccagauacgccuucgccauggagagaaacgccggcagcggcaucaucaucagcgacacccccgugcacgacugcaacaccaccugccagacccccaagggcgccaucaacaccagccugcccuuccagaacauccaccccaucaccaucggcaagugccccaaguacgugaagagcaccaagcugagacuggccaccggccugagaaacgugcccagcauccagagcagaggccuguucggcgccaucgccggcuucaucgagggcggcuggaccggcaugguggacggcugguacggcuaccaccaccagaacgagcagggcagcggcuacgccgccgaccugaagagcacccagaacgccaucgacaagaucaccaacaaggugaacagcgugaucgagaagaugaacacccaguucaccgccgugggcaaggaguucaaccaccuggagaagagaaucgagaaccugaacaagaagguggacgacggcuuccuggacaucuggaccuacaacgccgagcugcuggugcugcuggagaacgagagaacccuggacuaccacgacagcaacgugaagaaccuguacgagaaggugagaaaccagcugaagaacaacgccaaggagaucggcaacggcugcuucgaguucuaccacaagugcgacaacaccugcauggagagcgugaagaacggcaccuacgacgacaccaaggacagcgaggaggccaagcugaacagagaggagaucgacggcgugaagcuggagagcaccagaaucuaccagauccuggccaucuacagcaccguggccagcagccuggugcugguggugagccugggcgccaucagcuucuggaugugcagcaacggcagccugcagugcagaaucugcaucuga

SEQ ID NO: 168310 - RNA, 1701 nt, Artificial Sequence
  derived and/or modified CDS sequence (opt4) from hemagglutinin__InfluenzaA__AFB77691
augaagaccaucaucgcccugagcuacauccugugccugguguucgcccagaagcugcccggcaacgacaacagcaccgccacccugugccugggccaccacgccgugcccaacggcaccaucgugaagaccaucaccaacgaccagaucgaggugaccaacgccaccgagcuggugcagaacagcagcaccggcgagaucugcgacagcccccaccagauccuggacggcgagaacugcacccugaucgacgcccugcugggcgacccccagugcgacggcuuccagaacaagaagugggaccuguucguggagagaagcaaggccuacagcaacugcuaccccuacgacgugcccgacuacgccagccugagaagccugguggccagcagcggcacccuggaguucaacaacgagagcuucaacuggaccggcgugacccagaacggcaccagcagcgccugcaucagaagaagcaacaacagcuucuucagcagacugaacuggcugacccaccugaacuucaaguaccccgcccugaacgugaccaugcccaacaacgagcaguucgagaagcuguacaucuggggcgugcaccaccccggcaccgacaaggaccagaucuuccuguacgcccaggccagcggcagaaucaccgugagcaccaagagaagccagcaggccgugauccccaacaucggcagcagacugagagugagaaacauccccagcagaaucagcaucuacuggaccaucgugaagcccggcgacauccugcugaucaacagcaccggcaaccugaacgcccccagaggcuacuucaagaucagaagcggcaagagcagcaucaugagaagcgacgcccccaucggcaagugcaacagcgagugcaucacccccaacggcagcauccccaacgacaagcccuuccagaacgugaacagaaucaccuacggcgccugccccagauacgugaagcagaacacccugaagcuggccaccggcaugagaaacgugcccgagaagcagaccagaggcaucuucggcgccaucgccggcuucaucgagaacggcugggagggcaugguggacggcugguacggcuucagacaccagaacagcgagggcagaggccaggccgccgaccugaagagcacccaggccgccaucgaccagaucaacggcaagcugaacagacugaucggcaagaccaacgagaaguuccaccagaucgagaaggaguucagcgagguggagggcagaauccaggaccuggagaaguacguggaggacaccaagaucgaccuguggagcuacaacgccgagcugcugguggcccuggagaaccagcacaccaucgaccugaccgacagcgagaugaacaagcuguucgagaagaccaagaaccagcugagagagaacgccgaggacaugggcaacggcugcuucaagaucuaccacaagugcgacaacaccugcaucggcagcaucagaaacggcaccuacgaccacgacgccuacagagacgaggcccugaacaacagauuccagaucaagggcguggagcugaagagcggcuacaaggacuggauccuguggaucagcuucgccaucagcugcuuccugcugugcguggcccugcugggcuucaucaugugggccugccagaagggcaacaucagaugcaacaucugcaucuga

SEQ ID NO: 168311 - RNA, 1701 nt, Artificial Sequence
  derived and/or modified CDS sequence (opt4) from hemagglutinin__InfluenzaA__AFB77692
augaagaccaucaucgcccugagcuacauccugugccugguguucgcccagaagcugcccggcaacgacaacagcaccgccacccugugccugggccaccacgccgugcccaacggcaccaucgugaagaccaucaccaacgaccagaucgaggugaccaacgccaccgagcuggugcagaacagcagcaccggcgagaucugcgacagcccccaccagauccuggacggcgagaacugcacccugaucgacgcccugcugggcgacccccagugcgacggcuuccagaacaagaagugggaccuguucguggagagaagcaaggccuacagcaacugcuaccccuacgacgugcccgacuacgccagccugagaagccugguggccagcagcggcacccuggaguucaacaacgagagcuucaacuggaccggcgugacccagaacggcaccagcagcgccugcaucagaagaagcaacaacagcuucuucagcagacugaacuggcugacccaccugaacuucaaguaccccgcccugaacgugaccaugcccaacaacgagcaguucgacaagcuguacaucuggggcgugcaccaccccggcaccgacaaggaccagaucuuccuguacgcccaggccagcggcagaaucaccgugagcaccaagagaagccagcaggccgugauccccaacaccggcagcagacccagagugagaaacauccccagcagaaucagcaucuacuggaccaucgugaagcccggcgacauccugcugaucaacagcaccggcaaccugaucgcccccagaggcuacuucaagaucagaagcggcaagagcagcaucaugagaagcgacgcccccaucggcaagugcaacagcgagugcaucacccccaacggcagcauccccaacgacaagcccuuccagaacgugaacagaaucaccuacggcgccugccccagauacgugaagcagaacacccugaagcuggccaccggcaugagaaacgugcccgagaagcagaccagaggcaucuucggcgccaucgccggcuucaucgagaacggcugggagggcaugguggacggcugguacggcuucagacaccagaacagcgagggcagaggccaggccgccgaccugaagagcacccaggccgccaucgaccagaucaacggcaagcugaacagacugaucggcaagaccaacgagaaguuccaccagaucgagaaggaguucagcgagguggagggcagaauccaggaccuggagaaguacguggaggacaccaagaucgaccuguggagcuacaacgccgagcugcugguggcccuggagaaccagcacaccaucgaccugaccgacagcgagaugaacaagcuguucgagaagaccaagaagcagcugagagagaacgccgaggacaugggcaacggcugcuucaagaucuaccacaagugcgacaacgccugcaucggcagcaucagaaacggcaccuacgaccacgacguguacagagacgaggcccugaacaacagauuccagaucaagggcguggagcugaagagcggcuacaaggacuggauccuguggaucagcuucgccaucagcugcuuccugcugugcguggcccugcugggcuucaucaugugggccugccagaagggcaacaucagaugcaacaucugcaucuga

SEQ ID NO: 168312 - RNA, 1701 nt, Artificial Sequence; identical to SEQ ID NO: 167842
  derived and/or modified CDS sequence (opt4) from hemagglutinin__InfluenzaA__AFB77693

SEQ ID NO: 168313 - RNA, 1701 nt, Artificial Sequence
  derived and/or modified CDS sequence (opt4) from hemagglutinin__InfluenzaA__AFB77694
augaagaccaucaucgcccugagcuacauccugugccugguguucgcccagaagcugcccggcaacgacaacagcaccgccacccugugccugggccaccacgccgugcccaacggcaccaucgugaagaccaucgccaacgaccagaucgaggugaccaacgccaccgagcuggugcagaacagcagcaccggcgagaucugcgacagcccccaccagauccuggacggcgagaacugcacccugaucgacgcccugcugggcgacccccagugcgacgacuuccagaacaagaagugggaccuguucguggagagaagcaaggccuacagcaacugcuaccccuacgacgugcccgacuacgccagccugagaagccugguggccagcagcggcacccuggaguucaacaacgagagcuucaacuggaccggcgugacccagaacggcaccagcagcgccugcaucagaagaagcaacaacagcuucuucagcagacugaacuggcugacccaccugaacuucaaguaccccgcccugaacgugaccaugcccaacaacgagcaguucgacaagcuguacaucuggggcgugcaccaccccggcaccgacaaggaccagaucuuccuguacgcccaggccagcggcagaaucaccgugagcaccaagagaagccagcaggccgugauccccaacaucggcagcagacccagagugagaaacauccccagcagaaucagcaucuacuggaccaucgugaagcccggcgacauccugcugaucaacagcaccggcaaccugaucgcccccagaggcuacuucaagaucagaagcggcaagagcagcaucaugagaagcgacgcccccaucggcaagugcaacagcgagugcaucacccccaacggcagcauccccaacgacaagcccuuccagaacgugaacagaaucaccuacggcgccugccccagauacgugaagcagaacacccugaagcuggccaccggcaugagaaacgugcccgagaagcagaccagaggcaucuucggcgccaucgccggcuucaucgagaacggcugggagggcaugguggacggcugguacggcuucagacaccagaacagcgagggcagaggccaggccgccgaccugaagagcacccaggccgccaucgaccagaucaacggcaagcugaacagacugaucggcaagaccaacgagaaguuccaccagaucgagaaggaguucagcgagguggagggcagaauccaggaccuggagaaguacguggaggacaccaagaucgaccuguggagcuacaacgccgagcugcugguggcccuggagaaccagcacaccaucgaccugaccgacagcgagaugaacaagcuguucgagaagaccaagaagcagcugagagagaacgccgaggacaugggcaacggcugcuucaagaucuaccacaagugcgacaacaccugcaucggcagcaucagaaacggcaccuacgaccacgacguguacagagacgaggcccugaacaacagauuccagaucaagggcguggagcugaagagcggcuacaaggacuggauccuguggaucagcuucgccaucagcugcuuccugcugugcguggcccugcugggcuucaucaugugggccugccagaagggcaacaucagaugcaacaucugcaucuga

SEQ ID NO: 168314 - RNA, 1701 nt, Artificial Sequence
  derived and/or modified CDS sequence (opt4) from hemagglutinin__InfluenzaA__AFB77695
augaagaccaucaucgcccugagcuacauccugugccugguguucgcccagaagcugcccggcaacgacaacagcaccgccacccugugccugggccaccacgccgugcccaacggcaccaucgugaagaccaucaccaacgaccagaucgaggugaccaacgccaccgagcuggugcagaacagcagcaccggcgagaucugcgacagcccccaccagauccuggacggcgagaacugcacccugaucgacgcccugcugggcgacccccagugcgacgacuuccagaacaagaagugggaccuguucguggagagaagcaaggccuacagcaacugcuaccccuacgacgugcccgacuacgccagccugagaagccugguggccagcagcggcacccuggaguucaacaacgagagcuucaacuggaccggcgugacccagaacggcaccagcagcgccugcaucagaagaagcaacaacagcuucuucagcagacugaacuggcugacccaccugaacuucaaguaccccgcccugaacgugaccaugcccaacaacgagcaguucgacaagcuguacaucuggggcgugcaccaccccggcaccgacaaggaccagaucuuccuguacgcccaggccagcggcagaaucaccgugagcaccaagagaagccagcaggccgugauccccaacaucggcagcagacccagagugagaaacauccccagcagaaucagcaucuacuggaccaucgugaagcccggcgacauccugcugaucaacagcaccggcaaccugaucgcccccagaggcuacuucaagaucagaagcggcaagagcagcaucaugagaagcgacgcccccaucggcaagugcaacagcgagugcaucacccccaacggcagcauccccaacgacaagcccuuccagaacgugaacagaaucaccuacggcgccugccccagauacgugaagcagaacacccugaagcuggccaccggcaugagaaacgugcccgagaagcagaccagaggcaucuucggcgccaucgccggcuucaucgagaacggcugggagggcaugguggacggcugguacggcuucagacaccagaacagcgagggcagaggccaggccgccgaccugaagagcacccaggccgccaucgaccagaucaacggcaagcugaacagacugaucggcaagaccaacgagaaguuccaccagaucgagaaggaguucagcgagguggagggcagaauccaggaccuggagaaguacguggaggacaccaagaucgaccuguggagcuacaacgccgagcugcugguggcccuggagaaccagcacaccaucgaccugaccgacagcgagaugaacaagcuguucgagaagaccaagaagcagcugagagagaacgccgaggacaugggcaacggcugcuucaagaucuaccacaagugcgacaacgccugcaucggcagcaucagaaacggcaccuacgaccacgacguguacagagacgaggcccugaacaacagauuccagaucaagggcguggagcugaagagcggcuacaaggacuggauccuguggaucagcuucgccaucagcugcuuccugcugugcguggcccugcugggcuucaucaugugggccugccagaagggcaacaucagaugcaacaucugcaucuga

SEQ ID NO: 168315 - RNA, 1701 nt, Artificial Sequence
  derived and/or modified CDS sequence (opt4) from hemagglutinin__InfluenzaA__AFB78126
augaagaccaucaucgcccugagcuacauccugugccugguguucgcccagaagcugcccggcaacgacaacagcaccgccacccugugccugggccaccacgccgugagcaacggcacccuggugaagaccaucaccaacgaccagaucgaggugaccaacgccaccgagcuggugcagagcagcagcaccggcagaaucugcgacagcccccaccagauccuggacggcgagaacugcacccugaucgacgcccugcugggcgacccccacugcgacggcuuccagaacaaggagugggaccuguucguggagagaagcaaggccuacagcaacugcuaccccuacgacgugcccgacuacgccagccugagaagccugguggccagcagcggcacccuggaguucaacaacgagagcuucaacuggaccggcguggcccaggacggcaccagcagcgccugcaagagaagaagcaacaagagcuucuucagcagacugaacuggcugcaccagcugaaguacaaguaccccgcccugaacgugaccaugcccaacaacgagaaguucgacaagcuguacaucuggggcgugcaccaccccagcaccgacagcgaccagaucagcaucuacgcccaggccagcggcagagugaccgugagcaccaagagaagccagcagaccgugauccccaacaucggcagcagccccugggugagaggcgccagcagcagaaucagcaucuacuggaccaucgugaagcccggcgacauccugcugaucaacagcaccggcaaccugaucgcccccagaggcuacuucaagaucagaagcggcaagagcagcaucaugagaagcgacgcccccaucggcaagugcaacagcgagugcaucacccccaacggcagcauccccaacgacaagcccuuccagaacgugaacagaaucaccuacggcgccugccccagauacgugaagcagaacacccugaagcuggccaccggcaugagaaacgugcccgagaagcagaccagaggcaucuucggcgccaucgccggcuucaucgagaacggcugggagggcaugguggacggcugguacggcuucagacaccagaacagcgagggcaccggccaggccgccgaccugaagagcacccaggccgccaccaaccagaucaacggcaagcugaacagacugaucgagaagaccaacgagaaguuccaccagaucgagaaggaguucagcgagguggagggcagaauccaggaccuggagaaguacguggaggacaccaagaucgaccuguggagcuacaacgccgagcugcugguggcccuggagaaccagcacaccaucgaccugaccgacagcgagaugaacaagcuguucgagagaaccaagaagcagcugagagagaacgccgaggacaugggcaacggcugcuucaagaucuaccacaagugcgacaacgccugcaucggcagcaucagaaacggcaccuacgaccacgacguguacagagacgaggcccugaacaacagauuccagaucaagggcguggagcugaagagcggcuacaaggacuggauccuguggaucagcuucgccaucagcugcuuccugcugugcguggugcugcugggcuucaucaugugggccugccagaagggcaacaucagaugcaacaucugcaucuga

SEQ ID NO: 168316 - RNA, 1701 nt, Artificial Sequence
  derived and/or modified CDS sequence (opt4) from hemagglutinin__InfluenzaA__AFC34056
augaagaccaucaucgcccugagcuacauccugugccugguguucgcccagaagcugcccggcaacgacaacagcaccgccacccugugccugggccaccacgccgugcccaacggcaccaucgugaagaccaucaccaacgaccagaucgaggugaccaacgccaccgagcuggugcagagcagcagcaccggcgagaucugcgacagcccccaccagauccuggacggcgagaacugcacccugaucgacgcccugcugggcgacccccagugcgacggcuuccagaacaagaagugggaccuguucguggagagaagcaaggccuacagcaacugcuaccccuacgacgugcccgacuacgccagccugagaagccugguggccagcagcggcacccuggaguucaacaacgagagcuucaacuggaccggcgugacccagaacggcaccagcagcgccugcaucagaagaagcaacagcagcuucuucagcagacugaacuggcugacccaccugaacuucaaguaccccgcccugaacgugaccaugcccaacaacgagcaguucgacaagcuguacaucuggggcgugcaccaccccggcaccgacaaggaccagaucuuccuguacgcccagagcagcggcagaaucaccgugagcaccaagagaagccagcaggccgugauccccaacaucggcagcagacccagaaucagaaacauccccagcagaaucagcaucuacuggaccaucgugaagcccggcgacauccugcugaucaacagcaccggcaaccugaucgcccccagaggcuacuucaagaucagaagcggcaagagcagcaucaugagaagcgacgcccccaucggcaagugcaacagcgagugcaucacccccaacggcagcauccccaacgacaagcccuuccagaacgugaacagaaucaccuacggcgccugccccagauacgugaagcagagaacccugaagcuggccaccggcaugagaaacgugcccgagaagcagaccagaggcaucuucggcgccaucgccggcuucaucgagaacggcugggagggcaugguggacggcugguacggcuucagacaccagaacagcgagggcagaggccaggccgccgaccugaagagcacccaggccgccaucgaccagaucaacggcaagcugaacagacugaucggcaagaccaacgagaaguuccaccagaucgagaaggaguucagcgagguggagggcagaauccaggaccuggagaaguacguggaggacaccaagaucgaccuguggagcuacaacgccgagcugcugguggcccuggagaaccagcacaccaucgaccugaccgacagcgagaugaacaagcuguucgagaagaccaagaagcagcugagagagaacgccgaggacaugggcaacggcugcuucaagaucuaccacaagugcgacaacgccugcaucggcagcaucagaaacggcaccuacaaccacgacguguacagagacgaggcccugaacaacagauuccagaucaagggcguggagcugaagagcggcuacaaggacuggauccuguggaucagcuucgccaucagcugcuuccugcugugcguggcccugcugggcuucaucaugugggccugccagaagggcaacaucagaugcaacaucugcaucuga

SEQ ID NO: 168317 - RNA, 1701 nt, Artificial Sequence; identical to SEQ ID NO: 168316
  derived and/or modified CDS sequence (opt4) from hemagglutinin__InfluenzaA__AFC34057

SEQ ID NO: 168318 - RNA, 1701 nt, Artificial Sequence
  derived and/or modified CDS sequence (opt4) from hemagglutinin__InfluenzaA__AFD32426
augaaggccaaccugcuggugcugcugagcgcccuggccgccgccgacgccgacaccaucugcaucggcuaccacgccaacaacagcaccgacaccguggacaccgugcuggagaagaacgugaccgugacccacagcgugaaccugcuggaggacagccacaacggcaagcugugcaagcugagaggcguggccccccugcaccugggcaagugcaacaucgccggcagaauccugggcaaccccgagugcgagagccugagcaccgccagcagcuggagcuacaucguggagacccccagcagcgacaacggcaccugcuaccccggcgacuucaucgacuacgaggagcugagagagcagcugagcagcgugagcagcuucgagagauucgagaucuuccccaagaccagcagcuggcccaaccacgacagcaacaagggcgugaccgccgccugcccccacgccggcgccaagagcuucuacaagaaccugaucuggcuggugaagaagggcaacagcuaccccaagcugagcaagagcuacaucaacgacaagggcaaggaggugcuggugcuguggggcauccaccaccccagcaccagcgccgaccagcagagccuguaccagaacgccgacaccuacguguucgugggcagcagcagauacagcaagaaguucaagcccgagaucgccaucagacccaaggugagagaccaggagggcagaaugaacuacuacuggacccugguggagcccggcgacaagaucaccuucgaggccaccggcaaccugguggugcccagauacgccuucgccauggagagaaacgccggcagcggcaucaucaucagcgacacccccgugcacgacugcaacaccaagugccagaccccccugggcgccaucaacagcagccugcccuaccagaacauccaccccgugaccaucggcgagugccccaaguacgugagaagcgccaagcugagaauggugaccggccugagaaacacccccagcauccagagcagaggccuguucggcgccaucgccggcuucaucgagggcggcuggaccggcaugaucgacggcugguacggcuaccaccaccagaacgagcagggcagcggcuacgccgccgaccagaagagcacccagaacgccaucaacggcaucaccaacaaggugaacaccgugaucgagaagaugaacauccaguucaccgccgugggcaaggaguucaacaagcuggagaagagaauggagaaccugaacaagaagguggacgacggcuuccuggacaucuggaccuacaacgccgagcugcuggugcugcuggagaacgagagaacccuggacuuccacgacagcaacgugaagaaccuguacgagaaggugaagagccagcugaagaacaacgccaaggagaucggcaacggcugcuucgaguucuaccacaagugcgacaacgagugcauggagagcgugagaaacggcaccuacgacuaccccaaguacagcgaggagagcaagcugaacagagagaagguggacggcgugaagcuggagagcaugggcaucuaccagauccuggccaucuacagcaccguggccagcagccuggugcugcuggugagccugggcgccaucagcuucuggaugugcagcaacggcagccugcagugcagaaucugcaucuga

SEQ ID NO: 168319 - RNA, 1698 nt, Artificial Sequence
  derived and/or modified CDS sequence (opt4) from hemagglutinin__InfluenzaA__AFD32427
augaaggccaaccugcuggugcugcugagcgcccuggccgccgccgacgccgacaccaucugcaucggcuaccacgccaacaacagcaccgacaccguggacaccgugcuggagaagaacgugaccgugacccacagcgugaaccugcuggaggacagccacaacggcaagcugugcgaccuggacggcgugaagccccugauccugagagacugcagcguggccggcuggcugcugggcaaccccaugugcgacgaguucaucaacgugcccgaguggagcuacaucguggagaaggccaaccccgugaacgaccugugcuaccccggcgacuucaacgacuacgaggagcugaagcaccugcugagcagaaucaaccacuucgagaagauccagaucauccccaagagcagcuggagcagccacgaggccagccugggcgugagcagcgccugccccuaccagggcaagagcagcuucuucagaaacgugguguggcugaucaagaagaacagcaccuaccccaccaucaagagaagcuacaacaacaccaaccaggaggaccugcuggugcuguggggcauccaccaccccaacgacgccgccgagcagaccaagcuguaccagaaccccaccaccuacaucagcgugggcaccagcacccugaaccagagacuggugcccagaaucgccaccagaagcaaggugaacggccagagcggcagaauggaguucuucuggaccauccugaagcccaacgacgccaucaacuucgagagcaacggcaacuucaucgcccccgaguacgccuacaagaucgugaagaagggcgacagcaccaucaugaagagcgagcuggaguacggcaacugcaacaccaagugccagaccccccugggcgccaucaacagcagccugcccuaccagaacauccaccccgugaccaucggcgagugccccaaguacgugagaagcgccaagcugagaauggugaccggccugagaaacacccccagcauccagagcagaggccuguucggcgccaucgccggcuucaucgagggcggcuggaccggcaugaucgacggcugguacggcuaccaccaccagaacgagcagggcagcggcuacgccgccgaccagaagagcacccagaacgccaucaacggcaucaccaacaaggugaacaccgugaucgagaagaugaacauccaguucaccgccgugggcaaggaguucaacaagcuggagaagagaauggagaaccugaacaagaagguggacgacggcuuccuggacaucuggaccuacaacgccgagcugcuggugcugcuggagaacgagagaacccuggacuuccacgacagcaacgugaagaaccuguacgagaaggugaagagccagcugaagaacaacgccaaggagaucggcaacggcugcuucgaguucuaccacaagugcgacaacgagugcauggagagcgugagaaacggcaccuacgacuaccccaaguacagcgaggagagcaagcugaacagagagaagguggacggcgugaagcuggagagcaugggcaucuaccagauccuggccaucuacagcaccguggccagcagccuggugcugcuggugagccugggcgccaucagcuucuggaugugcagcaacggcagccugcagugcagaaucugcaucuga

SEQ ID NO: 168320 - RNA, 1722 nt, Artificial Sequence
  derived and/or modified CDS sequence (opt4) from hemagglutinin__InfluenzaA__AFD32428
augaagaccaucaucgcccugagcuacauccugugccugguguucgcccagaagcugcccggcaacgacaacagcaccgccacccugugccugggccaccacgccgugcccaacggcaccaucgugaagaccaucaccaacgaccagaucgaggugaccaacgccaccgagcuggugcagagcagcagcaccggcgagaucugcgaccuggacggcgugaagccccugauccugagagacugcagcguggccggcuggcugcugggcaaccccaugugcgacgaguucaucaacgugcccgaguggagcuacaucguggagaaggccaaccccgugaacgaccugugcuaccccggcgacuucaacgacuacgaggagcugaagcaccugcugagcagaaucaaccacuucgagaagauccagaucauccccaagagcagcuggagcagccacgaggccagccugggcgugagcagcgccugccccuaccagggcaagagcagcuucuucagaaacgugguguggcugaucaagaagaacagcaccuaccccaccaucaagagaagcuacaacaacaccaaccaggaggaccugcuggugcuguggggcauccaccaccccaacgacgccgccgagcagaccaagcuguaccagaaccccaccaccuacaucagcgugggcaccagcacccugaaccagagacuggugcccagaaucgccaccagaagcaaggugaacggccagagcggcagaauggaguucuucuggaccauccugaagcccaacgacgccaucaacuucgagagcaacggcaacuucaucgcccccgaguacgccuacaagaucgugaagaagggcgacagcaccaucaugaagagcgagcuggaguacggcaacugcaacagcgagugcaucacccccaacggcagcauccccaacgacaagcccuuccagaacgugaacagaaucaccuacggcgccugccccagauacgugaagcagaacacccugaagcuggccaccggcaugagaaacgugcccgagaagcagaccagaggcaucuucggcgccaucgccggcuucaucgagaacggcugggagggcaugguggacggcugguacggcuucagacaccagaacagcgagggcagaggccaggccgccgaccugaagagcacccaggccgccaucgaccagaucaacggcaagcugaacagacugaucggcaagaccaacgagaaguuccaccagaucgagaaggaguucagcgagguggagggcagaauccaggaccuggagaaguacguggaggacaccaagaucgaccuguggagcuacaacgccgagcugcugguggcccuggagaaccagcacaccaucgaccugaccgacagcgagaugaacaagcuguucgagaagaccaagaagcagcugagagagaacgccgaggacaugggcaacggcugcuucaagaucuaccacaagugcgacaacgccugcaucggcagcaucagaaacggcaccuacgaccacgacguguacagagacgaggcccugaacaacagauuccagaucaagggcguggagcugaagagcggcuacaaggacuggauccuguggaucagcuucgccaucagcugcuuccugcugugcguggcccugcugggcuucaucaugugggccugccagaagggcaacaucagaugcaacaucugcaucuga

SEQ ID NO: 168321 - RNA, 1704 nt, Artificial Sequence
  derived and/or modified CDS sequence (opt4) from hemagglutinin__InfluenzaA__AFD32429
augaagaccaucaucgcccugagcuacauccugugccugguguucgcccagaagcugcccggcaacgacaacagcaccgccacccugugccugggccaccacgccgugcccaacggcaccaucgugaagaccaucaccaacgaccagaucgaggugaccaacgccaccgagcuggugcagagcagcagcaccggcgagaucugcacccagggcaagagacccaccgaccugggccagugcggccugcugggcacccugaucggccccccccagugcgaccaguuccuggaguucgacgccgaccugaucaucgagagaagagagggcaccgacgugugcuaccccggcaaguucaccaacgaggagagccugagacagauccugagaggcagcggcggcaucgacaaggagagcaugggcuucaccuacagcggcaucagaaccaacggcgccaccagcgccugcagaagaagcggcagcagcuucuacgccgagaugaaguggcugcugagcaacagcgacaacgccgaguucccccagaugaccaagagcuacagaaaccccagaaacaagcccgcccugaucaucuggggcgugcaccacagcggcagcgccaccgagcagaccaagcuguacggcagcggcaacaagcugaucaccgugggcagcagcaaguaccagcagagcuucacccccagccccggcgccagaccccaggugaacggccagagcggcagaaucgacuuccacuggcugcugcuggaccccaacgacaccgugaccuucaccuucaacggcgccuucaucgcccccgacagagccagcuucuucagaggcgagagccugggcgugcagagcgacgugccccuggacagcggcugcaacagcgagugcaucacccccaacggcagcauccccaacgacaagcccuuccagaacgugaacagaaucaccuacggcgccugccccagauacgugaagcagaacacccugaagcuggccaccggcaugagaaacgugcccgagaagcagaccagaggcaucuucggcgccaucgccggcuucaucgagaacggcugggagggcaugguggacggcugguacggcuucagacaccagaacagcgagggcagaggccaggccgccgaccugaagagcacccaggccgccaucgaccagaucaacggcaagcugaacagacugaucggcaagaccaacgagaaguuccaccagaucgagaaggaguucagcgagguggagggcagaauccaggaccuggagaaguacguggaggacaccaagaucgaccuguggagcuacaacgccgagcugcugguggcccuggagaaccagcacaccaucgaccugaccgacagcgagaugaacaagcuguucgagaagaccaagaagcagcugagagagaacgccgaggacaugggcaacggcugcuucaagaucuaccacaagugcgacaacgccugcaucggcagcaucagaaacggcaccuacgaccacgacguguacagagacgaggcccugaacaacagauuccagaucaagggcguggagcugaagagcggcuacaaggacuggauccuguggaucagcuucgccaucagcugcuuccugcugugcguggcccugcugggcuucaucaugugggccugccagaagggcaacaucagaugcaacaucugcaucuga

SEQ ID NO: 168322 - RNA, 1701 nt, Artificial Sequence; identical to SEQ ID NO: 160133
  derived and/or modified CDS sequence (opt4) from hemagglutinin__InfluenzaA__AFD63527

SEQ ID NO: 168323 - RNA, 1701 nt, Artificial Sequence
  derived and/or modified CDS sequence (opt4) from hemagglutinin__InfluenzaA__AFD63538
augaagaccaucaucgcccugagcuacauccugugccugguguucgcccagaagcugcccggcaacgacaacagcaccgccacccugugccugggccaccacgccgugcccaacggcaccaucgugaagaccaucaccaacgaccagaucgaggugaccaacgccaccgagcuggugcagagcagcagcaccggcggcaucugcgacagcccccaccagauccuggacggcgagaacugcacccugaucgacgcccugcugggcgacccccagugcgacggcuuccagaacaagaagugggaccuguucguggagagaagcaaggccuacagcaacugcuaccccuacgacgugcccgacuacgccagccugagaagcaucguggccagcagcggcacccuggaguucaacaacgagagcuucaacuggaccggcgugacccagaacggcaccagcagcgccugcaagagaaagagcaacaagagcuucuucagcagacugaacuggcugacccaccugaaguacaaguaccccgcccugaacgugaccaugcccaacaacgagaaguucgacaagcuguacaucuggggcgugcaccaccccggcaccgacaacgaccagaucagccuguacgcccaggccagcggcagaaucaccgugagcaccaagagaagccagcagaccgugauccccaacaucggcagcagacccagagugagagacgugagcagcagaaucagcaucuacuggaccaucgugaagcccggcgacauccugcugaucaacagcaccggcaaccugaucgcccccagaggcuacuucaagaucagaagcggcaagagcagcaucaugagaagcgacgcccccaucggcaagugcaacagcgagugcaucacccccaacggcagcauccccaacgacaagcccuuccagaacgugaacagaaucaccuacggcgccugccccagauacgugaagcagaacacccugaagcuggccaccggcaugagaaacgugcccgagaagcagaccagaggcaucuucggcgccaucgccggcuucaucgagaacggcugggagggcaugguggacggcugguacggcuucagacaccagaacagcgagggcaccggccaggccgccgaccugaagagcacccaggccgccaucaaccagaucaacggcaagcugaacagacugaucggcaagaccaacgagaaguuccaccagaucgagaaggaguucagcgagguggagggcagaauccaggaccuggagaaguacguggaggacaccaagaucgaccuguggagcuacaacgccgagcugcugguggcccuggagaaccagcacaccaucgaccugaccgacagcgagaugaacaagcuguucgagagaaccaagaagcagcugagagagaacgccgaggacaugggcaacggcugcuucaagaucuaccacaagugcgacaacgccugcaucggcagcaucagaaacggcaccuacgaccacgacguguacagagacgaggcccugaacaacagauaccagaucaagggcguggagcugaagagcggcuacaaggacuggauccuguggaucagcuucgccaucagcugcuuccugcugugcguggcccugcugggcuucaucaugugggccugccagaagggcaacaucagaugcaacaucugcaucuga

SEQ ID NO: 168324 - RNA, 1701 nt, Artificial Sequence
  derived and/or modified CDS sequence (opt4) from hemagglutinin__InfluenzaA__AFD63549
augaagaccaucaucgcccugagcuacauccugugccugguguucgcccagaagcugcccggcaacgacaacagcaccgccacccugugccugggccaccacgccgugcccaacggcaccaucgugaagaccaucaccaacgaccagaucgaggugaccaacgccaccgagcuggugcagaucagcagcaccggcggcaucugcgacagcccccaccagauccuggacggcgagaacugcacccugaucgacgcccugcugggcgacccccagugcgacggcuuccagaacaagaagugggaccuguucguggagagaagcaaggccuacagcaacugcuaccccuacgacgugcccgacuacgccagccugagaagccugguggccagcagcggcacccuggaguucaacaacgagagcuucgacuggaccggcgugacccagaacggcaccagcagcgccugcaagagaagaagcaacaagagcuucuucagcagacugaacuggcugacccaccugaaguacaaguaccccgcccugaacgugaccaugcccaacaacgagaaguucgacaagcuguacaucuggggcgugcaccaccccggcaccgacaacgaccagaucagccuguacgcccaggccagcggcagaaucaccgugagcaccaagagaagccagcagaccgugauccccaacaucggcagcagacccagagugagagacgugagcagcagaaucagcaucuacuggaccaucgugaagcccggcgacauccugcugaucaacagcaccggcaaccugaucgcccccagaggcuacuucaagaucagaagcggcaagagcagcaucaugagaagcgacgcccccaucggcaagugcaacagcgagugcaucacccccaacggcagcauccccaacgacaagcccuuccagaacgugaacagaaucaccuacggcgccugccccagauacgugaagcagaacacccugaagcuggccaccggcaugagaaacgugcccgagaagcagaccagaggcaucuucggcgccaucgccggcuucaucgagaacggcugggagggcaugguggacggcugguacggcuucagacaccagaacagcgagggcaccggccaggccgccgaccugaagagcacccaggccgccaucaaccagaucaacggcaagcugaacagacugaucggcaagaccaacgagaaguuccaccagaucgagaaggaguucagcgagguggagggcagaauccaggaccuggagaaguacguggaggacaccaagaucgaccuguggagcuacaacgccgagcugcugguggcccuggagaaccagcacaccaucgaccugaccgacagcgagaugaacaagcuguucgagagaaccaagaagcagcugagagagaacgccgaggacaugggcaacggcugcuucaagaucuaccacaagugcgacaacgccugcaucggcagcaucagaaacggcaccuacgaccacgacguguacagagacgaggcccugaacaacagauuccagaucaagggcguggagcugaagagcggcuacaaggacuggauccuguggaucagcuucgccaucagcugcuuccugcugugcguggcccugcugggcuucaucaugugggccugccagaagggcaacaucagaugcaacaucugcaucuga

SEQ ID NO: 168325 - RNA, 1701 nt, Artificial Sequence; identical to SEQ ID NO: 160133
  derived and/or modified CDS sequence (opt4) from hemagglutinin__InfluenzaA__AFD63571

SEQ ID NO: 168326 - RNA, 1701 nt, Artificial Sequence
  derived and/or modified CDS sequence (opt4) from hemagglutinin__InfluenzaA__AFD63615
augaagaccaucaucgcccugagcuacauccugugccugguguucgcccagaagcugcccggcaacgacaacagcaccgccacccugugccugggccaccacgccgugcccaacggcaccaucgugaagaccaucaccaacgaccagaucgaggugaccaacgccaccgagcuggugcagagcagcagcaccggcggcaucugcgacagcccccaccagauccuggacggcgagaacugcacccugaucgacgcccugcugggcgacccccagugcgacggcuuccagaacaagaagugggaccuguucguggagagaagcaaggccuacagcaacugcuaccccuacgacgugcccgacuacgccagccugagaagccugguggccagcagcggcacccuggaguucaacaacgagagcuucaacuggaccggcgugacccagaacggcaccagcagcgccugcaagagaaagagcaacaagagcuucuucagcagacugaacuggcugacccaccugaaguacaaguaccccgcccugaacgugaccaugcccaacaacgagaaguucgacaagcuguacaucuggggcgugcaccaccccggcaccgacaacgaccagaucagccuguacgcccaggccagcggcagaaucaccgugagcaccaagagaagccagcagaccgugauccccaacaucggcagcagacccagagugagagacgugagcagcagaaucagcaucuacuggaccaucgugaagcccggcgacauccugcugaucaacagcaccggcaaccugaucgcccccagaggcuacuucaagaucagaagcggcaagagcagcaucaugagaagcgacgcccccaucggcaagugcaacagcgagugcaucacccccaacggcagcauccccaacgacaagcccuuccagaacgugaacagaaucaccuacggcgccugccccagauacgugaagcagaacacccugaagcuggccaccggcaugagaaacgugcccgagaagcagaccagaggcaucuucggcgccaucgccggcuucaucgagaacggcugggagggcaugguggacggcugguacggcuucagacaccagaacagcgagggcaccggccaggccgccgaccugaagagcacccaggccgccaucaaccagaucaacggcaagcugaacagacugaucggcaagaccaacgagaaguuccaccagaucgagaaggaguucagcgagguggaggagagaauccaggaccuggagaaguacguggaggacaccaagaucgaccuguggagcuacaacgccgagcugcugguggcccuggagaaccagcacaccaucgaccugaccgacagcgagaugaacaagcuguucgagagaaccaagaagcagcugagagagaacgccgaggacaugggcaacggcugcuucaagaucuaccacaagugcgacaacgccugcaucggcagcaucagaaacggcaccuacgaccacgacguguacagagacgaggcccugaacaacagauuccagaucaagggcguggagcugaagagcggcuacaaggacuggauccuguggaucagcuucgccaucagcugcuuccugcugugcguggcccugcugggcuucaucaugugggccugccagaagggcaacaucagaugcaacaucugcaucuga

SEQ ID NO: 168327 - RNA, 1701 nt, Artificial Sequence
  derived and/or modified CDS sequence (opt4) from hemagglutinin__InfluenzaA__AFD63626
augaagaccaucaucgcccugagcuacauccugugccugguguucgcccagaagcugcccggcaacgacaacagcaccgccacccugugccugggccaccacgccgugcccaacggcaccaucgugaagaccaucaccaacgaccagaucgaggugaccaacgccaccgagcuggugcagaucagcagcaccggcggcaucugcgacagcccccaccagauccuggacggcgagaacugcacccugaucgacgcccugcugggcgacccccagugcgacggcuuccagaacaagaagugggaccuguucguggagagaagcaaggccuacagcaacugcuaccccuacgacgugcccgacuacgccagccugagaagccugguggccagcagcggcacccuggaguucaacaacgagagcuucgacuggaccggcgugacccagaacggcaccagcagcgccugcaagagaagaagcaacaagagcuucuucagcagacugaacuggcugacccaccugaaguacaaguaccccgcccugaacgugaccaugcccaacaacgagaaguucgacaagcuguacaucuggggcgugcaccaccccggcaccgacagcgaccagaucagccuguacgcccaggccagcggcagaaucaccgugagcaccaagagaagccagcagaccgugauccccaacaucggcagcagacccagagugagagacaucagcagcagaaucagcaucuacuggaccaucgugaagcccggcgacauccugcugaucaacagcaccggcaaccugaucgcccccagaggcuacuucaagaucagaagcggcaagagcagcaucaugagaagcgacgcccccaucggcaagugcaacagcgagugcaucacccccaacggcagcauccccaacgacaagcccuuccagaacgugaacagaaucaccuacggcgccugccccagauacgugaagcagaacacccugaagcuggccaccggcaugagaaacgugcccgagaagcagaccagaggcaucuucggcgccaucgccggcuucaucgagaacggcugggagggcaugguggacggcugguacggcuucagacaccagaacagcgagggcaccggccaggccgccgaccugaagagcacccaggccgccaucaaccagaucaacggcaagcugaacagacugaucggcaagaccaacgagaaguuccaccagaucgagaaggaguucagcgagguggagggcagaauccaggaccuggagaaguacguggaggacaccaagaucgaccuguggagcuacaacgccgagcugcugguggcccuggagaaccagcacaccaucgaccugaccgacagcgagaugaacaagcuguucgagagaaccaagaagcagcugagagagaacgccgaggacaugggcaacggcugcuucaagaucuaccacaagugcgacaacgccugcaucggcagcaucagaaacggcaccuacgaccacgacguguacagagacgaggcccugaacaacagauuccagaucaagggcguggagcugaagagcggcuacaaggacuggauccuguggaucagcuucgccaucagcugcuuccugcugugcguggcccugcugggcuucaucaugugggccugccagaagggcaacaucagaugcaacaucugcaucuga

SEQ ID NO: 168328 - RNA, 1701 nt, Artificial Sequence
  derived and/or modified CDS sequence (opt4) from hemagglutinin__InfluenzaA__AFD63637
augaagaccaucaucgcccugagcuacauccugugccugguguucgcccagaagcugcccggcaacgacaacagcaccgccacccugugccugggccaccacgccgugcccaacggcaccaucgugaagaccaucaccaacgaccagaucgaggugaccaacgccaccgagcuggugcagaucagcagcaccggcggcaucugcgacagcccccaccagauccuggacggcgagaacugcacccugaucgacgcccugcugggcgacccccagugcgacggcuuccagaacaagaagugggaccuguucguggagagaagcaaggccuacagcaacugcuaccccuacgacgugcccgacuacgccagccugagaagccugguggccagcagcggcacccuggaguucaacaacgagagcuucgacuggaccggcgugacccagaacggcaccagcagcaccugcaagagaagaagcaacaagagcuucuucagcagacugaacuggcugacccaccugaaguacaaguaccccgcccugaacgugaccaugcccaacaacgagaaguucgacaagcuguacaucuggggcgugcaccaccccggcaccgacagcgaccagaucagccuguacgcccaggccagcggcagaaucaccgugagcaccaagagaagccagcagaccgugauccccaacaucggcagcagacccagagugagagacgugagcagcagaaucagcaucuacuggaccaucgugaagcccggcgacauccugcugaucaacagcaccggcaaccugaucgcccccagaggcuacuucaagaucagaagcggcaagagcagcaucaugagaagcgacgcccccaucggcaagugcaacagcgagugcaucacccccaacggcagcauccccaacgacaagcccuuccagaacgugaacagaaucaccuacggcgccugccccagauacgugaagcagaacacccugaagcuggccaccggcaugagaaacgugcccgagaagcagaccagaggcaucuucggcgccaucgccggcuucaucgagaacggcugggagggcaugguggacggcugguacggcuucagacaccagaacagcgagggcaccggccaggccgccgaccugaagagcacccaggccgccaucaaccagaucaacggcaagcugaacagacugaucggcaagaccaacgagaaguuccaccagaucgagaaggaguucagcgagguggagggcagaauccaggaccuggagaaguacguggaggacaccaagaucgaccuguggagcuacaacgccgagcugcugguggcccuggagaaccagcacaccaucgaccugaccgacagcgagaugaacaagcuguucgagagaaccaagaagcagcugagagagaacgccgaggacaugggcaacggcugcuucaagaucuaccacaagugcgacaacgccugcaucggcagcaucagaaacggcaccuacgaccacgacguguacagagacgaggcccugaacaacagauuccagaucaagggcguggagcugaagagcggcuacaaggacuggauccuguggaucagcuucgccaucagcugcuuccugcugugcguggcccugcugggcuucaucaugugggccugccagaagggcaacaucagaugcaacaucugcaucuga

SEQ ID NO: 168329 - RNA, 1701 nt, Artificial Sequence
  derived and/or modified CDS sequence (opt4) from hemagglutinin__InfluenzaA__AFD63648
augaagaccaucaucgcccugagcuacauccugugccugguguucgcccagaagcugcccggcaacgacaacagcauggccacccugugccugggccaccacgccgugcccaacggcaccaucgugaagaccaucaccaacgaccagaucgaggugaccaacgccaccgagcuggugcagaucagcagcaccggcggcaucugcgacagcccccaccagauccuggacggcgagaacugcacccugaucgacgcccugcugggcgacccccagugcgacggcuuccagaacaagaagugggaccuguucguggagagaagcaaggccuacagcaacugcuaccccuacgacgugcccgacuacgccagccugagaagccugguggccagcagcggcacccuggaguucaacaacgagagcuucgacuggaccggcgugacccagaacggcaccagcagcgccugcaagagaagaagcaacaagagcuucuucagcagacugaacuggcugacccaccugaaguacaaguaccccgcccugaacgugaccaugcccaacaacgagaaguucgacaagcuguacaucuggggcgugcaccaccccggcaccgacagcgaccagaucagccuguacgcccaggccagcggcagaaucaccgugagcaccaagagaagccagcagaccgugauccccaacaucggcagcagacccagagugagagacgugagcagcagaaucagcaucuacuggaccaucgugaagcccggcgacauccugcugaucaacagcaccggcaaccugaucgcccccagaggcuacuucaagaucagaagcggcaagagcagcaucaugagaagcgacgcccccaucggcaagugcaacagcgagugcaucacccccaacggcagcauccccaacgacaagcccuuccagaacgugaacagaaucaccuacggcgccugccccagauacgugaagcagaacacccugaagcuggccaccggcaugagaaacgugcccgagaagcagaccagaggcaucuucggcgccaucgccggcuucaucgagaacggcugggagggcaugguggacggcugguacggcuucagacaccagaacagcgagggcaccggccaggccgccgaccugaagagcacccaggccgccaucaaccagaucaacggcaagcugaacagacugaucggcaagaccaacgagaaguuccaccagaucgagaaggaguucagcgagguggagggcagaauccaggaccuggagaaguacguggaggacaccaagaucgaccuguggagcuacaacgccgagcugcugguggcccuggagaaccagcacaccaucgaccugaccgacagcgagaugaacaagcuguucgagagaaccaagaagcagcugagagagaacgccgaggacaugggcaacggcugcuucaagaucuaccacaagugcgacaacgccugcaucggcagcaucagaaacggcaccuacgaccacgacguguacagagacgaggcccugaacaacagauuccagaucaagggcguggagcugaagagcggcuacaaggacuggauccuguggaucagcuucgccaucagcugcuuccugcugugcguggcccugcugggcuucaucaugugggccugccagaagggcaacaucagaugcaacaucugcaucuga

SEQ ID NO: 168330 - RNA, 1701 nt, Artificial Sequence; identical to SEQ ID NO: 160133
  derived and/or modified CDS sequence (opt4) from hemagglutinin__InfluenzaA__AFD63659

SEQ ID NO: 168331 - RNA, 1701 nt, Artificial Sequence
  derived and/or modified CDS sequence (opt4) from hemagglutinin__InfluenzaA__AFD63681
augaagaccaucaucgcccugagcuacauccugugccugguguucgcccagaagcugcccggcaacgacaacagcaccgccacccugugccugggccaccacgccgugcccaacggcaccaucgugaagaccaucaccaacgaccagaucgaggugaccaacgccaccgagcuggugcagagcagcagcaccggcggcaucugcgacagcccccaccagauccuggacggcgagaacugcacccugaucgacgcccugcugggcgacccccagugcgacggcuuccagaacaagaagugggaccuguucguggagagaagcaaggccuacagcaacugcuaccccuacgacgugcccgacuacgccagccugagaagccugguggccagcagcggcacccuggaguucaacaacgagagcuucaacuggaccggcgugacccagaacggcaccagcagcgccugcaagagaaagagcaacaagagcuucuucagcagacugaacuggcugacccaccugaaguacaaguaccccgcccugaacgugaccaugcccaacaacgagaaguucgacaagcuguacaucuggggcgugcaccaccccggcaccgacaacgaccagaucagccuguacgcccaggccagcggcagaaucaccgugagcaccaagagaagccagcagaccgugauccccaacaucggcagcagacccagagugagagacgugagcagcagaaucagcaucuacuggaccaucgugaagcccggcgacauccugcugaucaacagcaccggcaaccugaucgcccccagaggcuacuucaaggugagaagcggcaagagcagcaucaugagaagcgacgcccccaucggcaagugcaacagcgagugcaucacccccaacggcagcauccccaacgacaagcccuuccagaacgugaacagaaucaccuacggcgccugccccagauacgugaagcagaacacccugaagcuggccaccggcaugagaaacgugcccgagaagcagaccagaggcaucuucggcgccaucgccggcuucaucgagaacggcugggagggcaugguggacggcugguacggcuucagacaccagaacagcgagggcaccggccaggccgccgaccugaagagcacccaggccgccaucaaccagaucaacggcaagcugaacagacugaucggcaagaccaacgagaaguuccaccagaucgagaaggaguucagcgagguggagggcagaauccaggaccuggagaaguacguggaggacaccaagaucgaccuguggagcuacaacgccgagcugcugguggcccuggagaaccagcacaccaucgaccugaccgacagcgagaugaacaagcuguucgagagaaccaagaagcagcugagagagaacgccgaggacaugggcaacggcugcuucaagaucuaccacaagugcgacaacgccugcaucggcagcaucagaaacggcaccuacgaccacgacguguacagagacgaggcccugaacaacagauuccagaucaagggcguggagcugaagagcggcuacaaggacuggauccuguggaucagcuucgccaucagcugcuuccugcugugcguggcccugcugggcuucaucaugugggccugccagaagggcaacaucagaugcaacaucugcaucuga

SEQ ID NO: 168332 - RNA, 1701 nt, Artificial Sequence
  derived and/or modified CDS sequence (opt4) from hemagglutinin__InfluenzaA__AFD63692
augaagaccaucaucgcccugagcuacauccugugccugguguucgcccagaagcugcccggcaacgacaacagcaccgccacccugugccugggccaccacgccgugcccaacggcaccaucgugaagaccaucaccaacgaccagaucgaggugaccaacgccaccgagcuggugcagagcagcagcaccggcggcaucugcgacagcccccaccagauccuggacggcgagaacugcacccugaucgacgcccugcugggcgacccccagugcgacggcuuccagaacaagaagugggaccuguucguggagagaagcaaggccuacagcaacugcuaccccuacgacgugcccgacuacgccagccugagaagccugguggccagcagcggcacccuggaguucaacaacgagagcuucgacuggaccggcgugacccagaacggcaccagcagcgccugcaagagaagaagcaacaagagcuucuucagcagacugaacuggcugacccaccugaaguacaaguaccccgcccugaacgugaccaugcccaacaacgagaaguucgacaagcuguacaucuggggcgugcugcaccccggcaccgacagcgaccagaucagccuguacgcccaggccagcggcagaaucaccgugagcaccaagagaagccagcagaccgugauccccaacaucggcagcagacccagagugagagacgugagcagcagaaucagcaucuacuggaccaucgugaagcccggcgacauccugcugaucaacagcaccggcaaccugaucgcccccagaggcuacuucaagaucagaagcggcaagagcagcaucaugagaagcgacgcccccaucggcaagugcaacagcgagugcaucacccccaacggcagcauccccaacgacaagcccuuccagaacgugaacagaaucaccuacggcgccugccccagauacgugaagcagaacacccugaagcuggccaccggcaugagaaacgugcccgagaagcagaccagaggcaucuucggcgccaucgccggcuucaucgagaacggcugggagggcaugguggacggcugguacggcuucagacaccagaacagcgagggcaccggccaggccgccgaccugaagagcacccaggccgccaucaaccagaucaacggcaagcugaacagacugaucggcaagaccaacgagaaguuccaccagaucgagaaggaguucagcgagguggagggcagaauccaggaccuggagaaguacguggaggacaccaagaucgaccuguggagcuacaacgccgagcugcugguggcccuggagaaccagcacaccaucgaccugaccgacagcgagaugaacaagcuguucgagagaaccaagaagcagcugagagagaacgccgaggacaugggcaacggcugcuucaagaucuaccacaagugcgacaacgccugcaucggcagcaucagaaacggcaccuacgaccacgacguguacagagacgaggcccugaacaacagauuccagaucaagggcguggagcugaagagcggcuacaaggacuggauccuguggaucagcuucgccaucagcugcuuccugcugugcguggcccugcugggcuucaucaugugggccugccagaagggcaacaucagaugcaacaucugcaucuga

SEQ ID NO: 168333 - RNA, 1701 nt, Artificial Sequence
  derived and/or modified CDS sequence (opt4) from hemagglutinin__InfluenzaA__AFD63703
augaagaccaucaucgcccugagcuacauccugugccugguguucgcccagaagcugcccggcaacgacaacagcaccgccacccugugccugggccaccacgccgugcccaacggcaccaucgugaagaccaucaccaacgaccagaucgaggugaccaacgccaccgagcuggugcagaucagcagcaccagcggcaucugcgacagccccuaccagauccuggacggcgagaacugcacccugaucgacgcccugcugggcgacccccagugcgacggcuuccagaacaagaagugggaccuguucguggagagaagcaaggccuacagcaacugcuaccccuacgacgugcccgacuacgccagccugagaagccugguggccagcagcggcacccuggaguucaacaacgagagcuucgacuggaccggcgugacccagaacggcaccagcagcgccugcaagagaagaagcaacaagagcuucuucagcagacugaacuggcugacccaccugaaguacaaguaccccgcccugaacgugaccaugcccaacaacgagaaguucgacaagcuguacaucuggggcgugcaccaccccggcaccgacagcgaccagaucagccuguacgcccaggccagcggcagaaucaccgugagcaccaagagaagccagcagaccgugauccccaacaucggcagcagacccagagugagagacgugagcagccagaucagcaucuacuggaccaucgugaagcccggcgacauccugcugaucaacagcaccggcaaccugaucgcccccagaggcuacuucaagaucagaagcggcaagagcagcaucaugagaagcgacgcccccaucggcaagugcaacagcgagugcaucacccccaacggcagcauccccaacgacaagcccuuccagaacgugaacagaaucaccuacggcgccugccccagauacgugaagcagaacacccugaagcuggccaccggcaugagaaacgugcccgagaagcagaccagaggcaucuucggcgccaucgccggcuucaucgagaacggcugggagggcaugguggacggcugguacggcuucagacaccagaacagcgagggcaccggccaggccgccgaccugaagagcacccaggccgccaucaaccagaucaacggcaagcugaacagacugaucggcaagaccaacgagaaguuccaccagaucgagaaggaguucagcgagguggagggcagaauccaggaccuggagaaguacguggaggacaccaagaucgaccuguggagcuacaacgccgagcugcugguggcccuggagaaccagcacaccaucgaccugaccgacagcgagaugaacaagcuguucgagagaaccaagaagcagcugagagagaacgccgaggacaugggcaacggcugcuucaagaucuaccacaagugcgacaacgccugcaucggcagcaucagaaacggcaccuacgaccacgacguguacagagacgaggcccugaacaacagauuccagaucaagggcguggagcugaagagcggcuacaaggacuggauccuguggaucagcuucgccaucagcugcuuccugcugugcguggcccugcugggcuucaucaugugggccugccagaagggcaacaucagaugcaacaucugcaucuga

SEQ ID NO: 168334 - RNA, 1701 nt, Artificial Sequence
  derived and/or modified CDS sequence (opt4) from hemagglutinin__InfluenzaA__AFD63714
augaagaccaucaucgcccugagcuacauccugugccugguguucgcccagaagcugcccggcaacgacaacagcaccgccacccugugccugggccaccacgccgugcccaacggcaccaucgugaagaccaucaccaacgaccagaucgaggugaccaacgccaccgagcuggugcagaucagcagcaccggcggcaucugcgacagcccccaccagauccuggacggcgagaacugcacccugaucgacgcccugcugggcgacccccagugcgacggcuuccagaacaagaagugggaccuguucguggagagaagcaaggccuacagcaacugcuaccccuacgacgugcccgacuacgccagccugagaagccugguggccagcagcggcacccuggaguucaacaacgagagcuucgacuggaccggcgugacccagaacggcaccagcagcaccugcaagagaagaagcaacaagagcuucuucagcagacugaacuggcugacccaccugaaguacaaguaccccgcccugaacgugaccaugcccaacaacgagaaguucgacaagcuguacaucuggggcgugcaccaccccggcaccgacaacgaccagaucagccuguacgcccaggccagcggcagaaucaccgugagcaccaagagaagccagcagaccgugauccccaacaucggcagcagacccagagugagagacgugagcagcagaaucagcaucuacuggaccaucgugaagcccggcgacauccugcugaucaacagcaccggcaaccugaucgcccccagaggcuacuucaagaucagaagcggcaagagcagcaucaugagaagcgacgcccccaucggcaagugcaacagcgagugcaucacccccaacggcagcauccccaacgacaagcccuuccagaacgugaacagaaucaccuacggcgccugccccagauacgugaagcagaacacccugaagcuggccaccggcaugagaaacgugcccgagaagcagaccagaggcaucuucggcgccaucgccggcuucaucgagaacggcugggagggcaugguggacggcugguacggcuucagacaccagaacagcgagggcaccggccaggccgccgaccugaagagcacccaggccgccaucaaccagaucaacggcaagcugaacagacugaucggcaagaccaacgagaaguuccaccagaucgagaaggaguucagcgagguggagggcagaauccaggaccuggagaaguacguggaggacaccaagaucgaccuguggagcuacaacgccgagcugcugguggcccuggagaaccagcagaccaucgaccugaccgacagcgagaugaacaagcuguucgagagaaccaagaagcagcugagagagaacgccgaggacaugggcaacggcugcuucaagaucuaccacaagugcgacaacgccugcaucggcagcaucagaaacggcaccuacgaccacgacguguacagagacgaggcccugaacaacagauuccacaucaagggcguggagcugaagagcggcuacaaggacuggauccuguggaucagcuucgccaucagcugcuuccugcugugcguggcccugcugggcuucaucaugugggccugccagaagggcaacaucagaugcaacaucugcaucuga

SEQ ID NO: 168335 - RNA, 1701 nt, Artificial Sequence
  derived and/or modified CDS sequence (opt4) from hemagglutinin__InfluenzaA__AFD63736
augaagaccaucaucgcccugagcuacauccugugccugguguucgcccagaagcugcccggcaacgacaacagcaccgccacccugugccugggccaccacgccgugcccaacggcaccaucgugaagaccaucaccaacgaccagaucgaggugaccaacgccaccgagcuggugcagaucagcagcaccggcggcaucugcgacagcccccaccagauccuggacggcgagaacugcacccugaucgacgcccugcugggcgacccccagugcgacggcuuccagaacaagaagugggaccuguucguggagagaagcaaggccuacagcaacugcuaccccuacgacgugcccgacuacgccagccugagaagccugguggccagcagcggcacccuggaguucaacaacgagagcuucgacuggaccggcgugacccagaacggcaccagcagcaccugcaagagaagaagcaacaagagcuucuucagcagacugaacuggcugacccaccugaaguacaaguaccccgcccugaacgugaccaugcccaacaacgagaaguucgacaagcuguacaucuggggcgugcaccaccccggcaccgacaacgaccagaucagccuguacgcccaggccagcggcagaaucaccgugagcaccaagagaagccagcagaccgugauccccaacaucggcagcagacccagagugagagacgugagcagcagaaucagcaucuacuggaccaucgugaagcccggcgacauccugcugaucaacagcaccggcaaccugaucgcccccagaggcuacuucaagaucagaagcggcaagagcagcaucaugagaagcgacgcccccaucggcaagugcaacagcgagugcaucacccccaacggcagcauccccaacgacaagcccuuccagaacgugaacagaaucaccuacggcgccugccccagauacgugaagcagaacacccugaagcuggccaccggcaugagaaacgugcccgagaagcagaccagaggcaucuucggcgccaucgccggcuucaucgagaacggcugggagggcaugguggacggcugguacggcuucagacaccagaacagcgagggcaccggccaggccgccgaccugaagagcacccaggccgccaucaaccagaucaacggcaagcugaacagacugaucggcaagaccaacgagaaguuccaccagaucgagaaggaguucagcgagguggagggcagaauccaggaccuggagaaguacguggaggacaccaagaucgaccuguggagcuacaacgccgagcugcugguggcccuggagaaccagcacaccaucgaccugaccgacagcgagaugaacaagcuguucgagagaaccaagaagcagcugagagagaacgccgaggacaugggcaacggcugcuucaagaucuaccacaagugcgacaacgccugcaucggcagcaucagaaacggcaccuacgaccacgacguguacagagacgaggcccugaacaacagauuccacaucaagggcguggagcugaagagcggcuacaaggacuggauccuguggaucagcuucgccaucagcugcuuccugcugugcguggcccugcugggcuucaucaugugggccugccagaagggcaacaucagaugcaacaucugcaucuga

SEQ ID NO: 168336 - RNA, 1701 nt, Artificial Sequence
  derived and/or modified CDS sequence (opt4) from hemagglutinin__InfluenzaA__AFD63747
augaagaccaucaucgcccugagcuacauccugugccugguguucgcccagaagcugcccggcaacgacaacagcaccgccacccugugccugggccaccacgccgugcccaacggcaccaucgugaagaccaucaccaacgaccagaucgaggugaccaacgccaccgagcuggugcagagcagcagcaccggcggcaucugcgacagcccccaccagauccuggacggcgagaacugcacccugaucgacgcccugcugggcgacccccagugcgacggcuuccagaacaagaagugggaccuguucguggagagaagcaaggccuacagcaacugcuaccccuacgacgugcccgacuacgccagccugagaagccugguggccagcagcggcacccuggaguucaacaacgagagcuucgacuggaccggcgugacccagaacggcaccagcagcgccugcaagagaagaagcaacaagagcuucuucagcagacugaacuggcugacccaccugaaguacaaguaccccgcccugaacgugaccaugcccaacaacgagaaguucgacaagcuguacaucuggggcgugcaccaccccggcaccgacagcgaccagaucagccuguacgcccaggccagcggcagaaucaccgugagcaccaagagaagccagcagaccgugauccccaacaucggcagcagacccagagugagagacgugagcagcagaaucagcaucuacuggaccaucgugaagcccggcgacauccugcugaucaacagcaccggcaaccugaucgcccccagaggcuacuucaagaucagaagcggcaagagcagcaucaugagaagcgacgcccccaucggcaagugcaacagcgagugcaucacccccaacggcagcauccccaacgacaagcccuuccagaacgugaacagaaucaccuacggcgccugccccagauacgugaagcagaacacccugaagcuggccaccggcaugagaaacgugcccgagaagcagaccagaggcaucuucggcgccaucgccggcuucaucgagaacggcugggagggcaugguggacggcugguacggcuucagacaccagaacagcgagggcaccggccaggccgccgaccugaagagcacccaggccgccaucaaccagaucaacggcaagcugaacagacugaucggcaagaccaacgagaaguuccacagaaucgagaaggaguucagcgagguggagggcagaauccaggaccuggagaaguacguggaggacaccaagaucgaccuguggagcuacaacgccgagcugcugguggcccuggagaaccagcacaccaucgaccugaccgacagcgagaugaacaagcuguucgagagaaccaagaagcagcugagagagaacgccgaggacaugggcaacggcugcuucaagaucuaccacaagugcgacaacgccugcaucggcagcaucagaaacggcaccuacgaccacgacguguacagagacgaggcccugaacaacagauuccagaucaagggcguggagcugaagagcggcuacaaggacuggauccuguggaucagcuucgccaucagcugcuuccugcugugcguggcccugcugggcuucaucaugugggccugccagaagggcaacaucagaugcaacaucugcaucuga

SEQ ID NO: 168337 - RNA, 1701 nt, Artificial Sequence
  derived and/or modified CDS sequence (opt4) from hemagglutinin__InfluenzaA__AFD63758
augaagaccaucaucgcccugagcuacauccugugccugguguucgcccagaagcugcccggcaacgacaacagcaccgccacccugugccugggccaccacgccgugcccaacggcaccaucgugaagaccaucaccaacgaccagaucgaggugaccaacgccaccgagcuggugcagagcagcagcaccggcggcaucugcgacagcccccaccagauccuggacggcgagaacugcacccugaucgacgcccugcugggcgacccccagugcgacggcuuccagaacaagaagugggaccuguucguggagagaagcaaggccuacagcaacugcuaccccuacgacgugcccgacuacgccagccugagaagccugguggccagcagcggcacccuggaguucaacaacgagagcuucaacuggaccggcgugacccagaacggcaccagcagcgccugcaagagaaagagcaacaagagcuucuucagcagacugaacuggcugacccaccugaaguacaaguaccccgcccugaacgugaccaugcccaacaacgagaaguucgacaagcuguacaucuggggcgugcaccaccccggcaccgacaacgaccagaucagccuguacgcccaggccagcggcagaaucaccgugagcaccaagagaagccagcagaccgugauccccaacaucggcagcagacccagagugagagacgugagcagcagaaucagcaucuacuggaccaucgugaagcccggcgacauccugcugaucaacagcaccggcaaccugaucgcccccagaggcuacuucaagaucagaagcggcaagagcagcaucaugagaagcgacgcccccaucggcaagugcaacagcgagugcaucacccccaacggcagcauccccaacgacaagcccuuccagaacgugaacagaaucaccuacggcgccugccccagauacgugaagcagaacacccugaagcuggccaccggcaugagaaacgugcccgagaagcagaccagaggcaucuucggcgccaucgccggcuucaucgagaacggcugggagggcaugguggacggcugguacggcuucagacaccagaacagcgagggcaccggccaggccgccgaccugaagagcacccaggccgccaucaaccagaucaacggcaagcugaacagacugaucggcaagaccaacgagaaguuccaccagaucgagaaggaguucagcgagguggagggcagaauccaggaccuggagaaguacguggaggacaccaagaucgaccuguggagcuacaacgccgagcugcugguggcccuggagaaccagcacaccaucgaccugaccgacagcgagaugaacaagcuguucgagagaaccaagaagcagcugagagagaacgccgaggacaugggcaacggcugcuucaagaucuaccacaagugcgacaacgccugcaucggcagcaucagaaacggcaccuacgaccacgacguguacagagacgaggcccugaacaacagauuccagaucaagggcguggagcugaagagcggcuacaaggacuggauccuguggaucagcuucgccaucagcugcuuccugcugugcguggcccugcugggcuucaucaugugggccugccagaagggcaacaucagaugcaacaucugcaucuga

SEQ ID NO: 168338 - RNA, 1701 nt, Artificial Sequence
  derived and/or modified CDS sequence (opt4) from hemagglutinin__InfluenzaA__AFD63769
augaagaccaucaucgcccugagcuacauccugugccugguguucgcccagaagcugcccggcaacgacaacagcaccgccacccugugccugggccaccacgccgugcccaacggcaccaucgugaagaccaucaccaacgaccagaucgaggugaccaacgccaccgagcuggugcagaucagcagcaccggcggcaucugcgacagcccccaccagauccuggacggcgagaacugcacccugaucgacgcccugcugggcgacccccagugcgacggcuuccagaacaagaagugggaccuguucguggagagaagcaaggccuacagcaacugcuaccccuacgacgugcccgacuacgccagccugagaagccugguggccagcagcggcacccuggaguucaacaacgagagcuucgacuggaccggcgugacccagaacggcaccagcagcgccugcaagagaagaagcaacaagagcuucuucagcagacugaacuggcugacccaccugaaguacaaguaccccgcccugaacgugaccaugcccaacaacgagaaguucgacaagcuguacaucuggggcgugcaccaccccggcaccgacaacgaccagaucagccuguacgcccaggccagcggcagaaucaccgugagcaccaagagaagccagcagaccgugauccccaacaucggcagcagacccagagugagagacgugagcagcagaaucagcaucuacuggaccaucgugaagcccggcgacauccugcugaucaacagcaccggcaaccugaucgcccccagaggcuacuucaagaucagaagcggcaagagcagcaucaugagaagcgacgcccccaucggcaagugcaacagcgagugcaucacccccaacggcagcauccccaacgacaagcccuuccagaacgugaacagaaucaccuacggcgccugccccagauacgugaagcagaacacccugaagcuggccaccggcaugagaaacgugcccgagaagcagaccagaggcaucuucggcgccaucgccggcuucaucgagaacggcugggagggcaugguggacggcugguacggcuucagacaccagaacagcgagggcaccggccaggccgccgaccugaagagcacccaggccgccaucaaccagaucaacggcaagcugaacagacugaucggcaagaccaacgagaaguuccaccagaucgagaaggaguucagcgagguggagggcagaauccaggaccuggagaaguacguggaggacaccaagaucgaccuguggagcuacaacgccgagcugcugguggcccuggagaaccagcacaccaucgaccugaccgacagcgagaugaacaagcuguucgagagaaccaagaagcagcugagagagaacgccgaggacaugggcaacggcugcuucaagaucuaccacaagugcgacaacgccugcaucggcagcaucagaaacggcaccuacgaccacgacguguacagagacgaggcccugaacaacagauuccacaucaagagcguggagcugaagagcggcuacaaggacuggauccuguggaucagcuucgccaucagcugcuuccugcugugcguggcccugcugggcuucaucaugugggccugccagaagggcaacaucagaugcaacaucugcaucuga

SEQ ID NO: 168339 - RNA, 1701 nt, Artificial Sequence; identical to SEQ ID NO: 160133
  derived and/or modified CDS sequence (opt4) from hemagglutinin__InfluenzaA__AFD63780

SEQ ID NO: 168340 - RNA, 1701 nt, Artificial Sequence; identical to SEQ ID NO: 168337
  derived and/or modified CDS sequence (opt4) from hemagglutinin__InfluenzaA__AFD63791

SEQ ID NO: 168341 - RNA, 1701 nt, Artificial Sequence; identical to SEQ ID NO: 160133
  derived and/or modified CDS sequence (opt4) from hemagglutinin__InfluenzaA__AFD63802

SEQ ID NO: 168342 - RNA, 1701 nt, Artificial Sequence
  derived and/or modified CDS sequence (opt4) from hemagglutinin__InfluenzaA__AFD63813
augaagaccaucaucgcccugagcuacauccugagccugguguucgcccagaaguuccccggcaacgacaacagcaccgccacccugugccugggccaccacgccgugcccaacggcaccaucgugaagaccaucaccaacgaccagaucgaggugaccaacgccaccgagcuggugcagaucagcagcaccggcggcaucugcgacagcccccaccagauccuggacggcgagaacugcacccugaucgacgcccugcugggcgacccccagugcgacggcuuccagaacaagaagugggaccuguucguggagagaagcaaggccuacagcaacugcuaccccuacgacgugcccgacuacgccagccugagaagccugguggccagcagcggcagccuggaguucaacaacgagagcuucgacuggaccggcgugacccagaacggcaccagcagcgccugcaagagaagaagcaacaagagcuucuucagcagacugaacuggcugacccaccugaaguacaaguaccccgcccugaacgugaccaugcccaacaacgagaaguucgacaagcuguacaucuggggcgugcaccaccccggcaccgacagcgaccagaucagccuguacgcccaggccagcggcagaaucaccgugagcaccaagagaagccagcagaccgugauccccaacaucggcagcagacccagagugagagacaucagcagcagaaucagcaucuacuggaccaucgugaagcccggcgacauccugcugaucaacagcaccggcaaccugaucgcccccagaggcuacuucaagaucagaagcggcaagagcagcaucaugagaagcgacgcccccaucggcaagugcaacagcgagugcaucacccccaacggcagcauccccaacgacaagcccuuccagaacgugaacagaaucaccuacggcgccugccccagauacgugaagcagaacacccugaagcuggccaccggcaugagaaacgugcccgagaagcagaccagaggcaucuucggcgccaucgccggcuucaucgagaacggcugggagggcaugguggacggcugguacggcuucagacaccagaacagcgagggcaccggccaggccgccgaccugaagagcacccaggccgccaucaaccagaucaacggcaagcugaacagacugaucggcaagaccaacgagaaguuccaccagaucgagaaggaguucagcgagguggagggcagaauccaggaccuggagaaguacguggaggacaccaagaucgaccuguggagcuacaacgccgagcugcugguggcccuggagaaccagcacaccaucgaccugaccgacagcgagaugaacaagcuguucgagagaaccaagaagcagcugagagagaacgccgaggacaugggcaacggcugcuucaagaucuaccacaagugcgacaacgccugcaucggcagcaucagaaacggcaccuacgaccacgacguguacagagacgaggcccugaacaacagauuccagaucaagggcguggagcugaagagcggcuacaaggacuggauccuguggaucagcuucgccaccagcugcuuccugcugugcguggcccugcugggcuucaucaugugggccugccagaagggcaacaucagaugcaacaucugcaucuga

SEQ ID NO: 168343 - RNA, 1701 nt, Artificial Sequence; identical to SEQ ID NO: 168327
  derived and/or modified CDS sequence (opt4) from hemagglutinin__InfluenzaA__AFD63824

SEQ ID NO: 168344 - RNA, 1701 nt, Artificial Sequence; identical to SEQ ID NO: 160133
  derived and/or modified CDS sequence (opt4) from hemagglutinin__InfluenzaA__AFD63846

SEQ ID NO: 168345 - RNA, 1701 nt, Artificial Sequence; identical to SEQ ID NO: 161371
  derived and/or modified CDS sequence (opt4) from hemagglutinin__InfluenzaA__AFD63857

SEQ ID NO: 168346 - RNA, 1701 nt, Artificial Sequence; identical to SEQ ID NO: 160133
  derived and/or modified CDS sequence (opt4) from hemagglutinin__InfluenzaA__AFD63868

SEQ ID NO: 168347 - RNA, 1701 nt, Artificial Sequence; identical to SEQ ID NO: 160133
  derived and/or modified CDS sequence (opt4) from hemagglutinin__InfluenzaA__AFD63890

SEQ ID NO: 168348 - RNA, 1701 nt, Artificial Sequence; identical to SEQ ID NO: 160133
  derived and/or modified CDS sequence (opt4) from hemagglutinin__InfluenzaA__AFD63901

SEQ ID NO: 168349 - RNA, 1701 nt, Artificial Sequence; identical to SEQ ID NO: 160133
  derived and/or modified CDS sequence (opt4) from hemagglutinin__InfluenzaA__AFD63912

SEQ ID NO: 168350 - RNA, 1701 nt, Artificial Sequence
  derived and/or modified CDS sequence (opt4) from hemagglutinin__InfluenzaA__AFD63923
augaagaccaucaucgcccugagcuacauccugugccugguguucgcccagaagcugcccggcaacgacaacagcaccgccacccugugccugggccaccacgccgugcccaacggcaccaucgugaagaccaucaccaacgaccagaucgaggugaccaacgccaccgagcuggugcagagcagcagcaccggcggcaucugcgacagcccccaccagauccuggacggcgagaacugcacccugaucgacgcccugcugggcgacccccagugcgacggcuuccagaacaagaagugggaccuguucguggagagaagcaaggccuacagcaacugcuaccccuacgacgugcccgacuacgccagccugagaagccugguggccagcagcggcacccuggaguucaacaacgagagcuucaacuggaccggcgugacccagaacggcaccagcagcgccugcaagagaaagagcaacaagagcuucuucagcagacugaacuggcugacccaccugaaguacaaguaccccgcccugaacgugaccaugcccaacaacgagaaguucgacaagcuguacaucuggggcgugcaccaccccggcaccgacaacgaccagaucagccuguacgcccaggccagcggcagaaucaccgugagcaccaagagaagccagcagaccgugauccccaacaucggcagcagacccagagugagagacaucagcagcagaaucagcaucuacuggaccaucgugaagcccggcgacauccugcugaucaacagcaccggcaaccugaucgcccccagaggcuacuucaagaucagaagcggcaagagcagcaucaugagaagcgacgcccccaucggcaagugcaacagcgagugcaucacccccaacggcagcauccccaacgacaagcccuuccagaacgugaacagaaucaccuacggcgccugccccagauacgugaagcagaacacccugaagcuggccaccggcaugagaaacgugcccgagaagcagaccagaggcaucuucggcgccaucgccggcuucaucgagaacggcugggagggcaugguggacggcugguacggcuucagacaccagaacagcgagggcaccggccaggccgccgaccugaagagcacccaggccgccaucaaccagaucaacggcaagcugaacagacugaucggcaagaccaacgagaaguuccaccagaucgagaaggaguucagcgagguggagggcagaauccaggaccuggagaaguacguggaggacaccaagaucgaccuguggagcuacaacgccgagcugcugguggcccuggagaaccagcacaccaucgaccugaccgacagcgagaugaacaagcuguucgagagaaccaagaagcagcugagagagaacgccgaggacaugggcaacggcugcuucaagaucuaccacaagugcgacaacgccugcaucggcagcaucagaaacggcaccuacgaccacgacguguacagagacgaggcccugaacaacagauuccagaucaagggcguggagcugaagagcggcuacaaggacuggauccuguggaucagcuucgccaucagcugcuuccugcugugcguggcccugcugggcuucaucaugugggccugccagaagggcaacaucagaugcaacaucugcaucuga

SEQ ID NO: 168351 - RNA, 1701 nt, Artificial Sequence
  derived and/or modified CDS sequence (opt4) from hemagglutinin__InfluenzaA__AFD63934
augaagaccaucaucgcccugagcuacauccugugccugguguucgcccagaagcugcccggcaacgacaacagcaccgccacccugugccugggccaccacgccgugcccaacggcaccaucgugaagaccaucaccaacgaccagaucgaggugaccaacgccaccgagcuggugcagagcagcagcaccggcggcaucugcgacagcccccaccagauccuggacggcgagaacugcacccugaucgacgcccugcugggcgacccccagugcgacggcuuccagaacaagaagugggaccuguucguggagagaagcaaggccuacagcaacugcuaccccuacgacgugcccgacuacgccagccugagaagccugguggccagcagcggcacccuggaguucaacaacgagagcuucgacuggaccggcgugacccagaacggcaccagcagcgccugcaagagaagaagcaacaagagcuucuucagcagacugaacuggcugacccaccugaaguacaaguaccccgcccugaacgugaccaugcccaacaacgagaaguucgacaagcuguacaucuggggcgugcaccaccccggcaccgagagcgaccagaucagccuguacgcccaggccagcggcagaaucaccgugagcaccaagagaagccagcagaccgugauccccaacaucggcagcagacccagagugagagacgugagcagcagaaucagcaucuacuggaccguggugaagcccggcgacauccugcugaucaacagcaccggcaaccugaucgcccccagaggcuacuucaagaucagaagcggcaagagcagcaucaugagaagcgacgcccccaucggcaagugcaacagcgagugcaucacccccaacggcagcauccccaacgacaagcccuuccagaacgugaacagaaucaccuacggcgccugccccagauacgugaagcagaacacccugaagcuggccaccggcaugagaaacgugcccgagaagcagaccagaggcaucuucggcgccaucgccggcuucaucgagaacggcugggagggcaugguggacggcugguacggcuucagacaccagaacagcgagggcaccggccaggccgccgaccugaagagcacccaggccgccaucaaccagaucaacggcaagcugaacagacugaucggcaagaccaacgagaaguuccaccagaucgagaaggaguucagcgagguggagggcagaauccaggaccuggagaaguacguggaggacaccaagaucgaccuguggagcuacaacgccgagcugcugguggcccuggagaaccagcacaccaucgaccugaccgacagcgagaugaacaagcuguucgagagaaccaagaagcagcugagagagaacgccgaggacaugggcaacggcugcuucaagaucuaccacaagugcgacaacgccugcaucggcagcaucagaaacggcaccuacgaccacgacguguacagagacgaggcccugaacaacagauuccagaucaagggcguggagcugaagagcggcuacaaggacuggauccuguggaucagcuucgccaucagcugcuuccugcugugcguggcccugcugggcuucaucaugugggccugccagaagggcaacaucagaugcaacaucugcaucuga

SEQ ID NO: 168352 - RNA, 1701 nt, Artificial Sequence; identical to SEQ ID NO: 168327
  derived and/or modified CDS sequence (opt4) from hemagglutinin__InfluenzaA__AFD63945

SEQ ID NO: 168353 - RNA, 1701 nt, Artificial Sequence; identical to SEQ ID NO: 168327
  derived and/or modified CDS sequence (opt4) from hemagglutinin__InfluenzaA__AFD63956

SEQ ID NO: 168354 - RNA, 1701 nt, Artificial Sequence; identical to SEQ ID NO: 168327
  derived and/or modified CDS sequence (opt4) from hemagglutinin__InfluenzaA__AFD63967

SEQ ID NO: 168355 - RNA, 1701 nt, Artificial Sequence; identical to SEQ ID NO: 160133
  derived and/or modified CDS sequence (opt4) from hemagglutinin__InfluenzaA__AFD63989

SEQ ID NO: 168356 - RNA, 1701 nt, Artificial Sequence; identical to SEQ ID NO: 160133
  derived and/or modified CDS sequence (opt4) from hemagglutinin__InfluenzaA__AFD64000

SEQ ID NO: 168357 - RNA, 1701 nt, Artificial Sequence
  derived and/or modified CDS sequence (opt4) from hemagglutinin__InfluenzaA__AFD64011
augaagaccaucaucgcccugagcuacauccugugccugguguucgcccagaagcugcccggcaacgacaacagcaccgccacccugugccugggccaccacgccgugcccaacggcaccaucgugaagaccaucaccaacgaccagaucgaggugaccaacgccaccgagcuggugcagagcagcagcaccggcggcaucugcgacagcccccaccagauccuggacggcgagaacugcacccugaucgacgcccugcugggcgacccccagugcgacggcuuccagaacaagaagugggaccuguucguggagagaagcaaggccuacagcaacugcuaccccuacgacgugcccgacuacgccagccugagaagccugguggccagcagcggcacccuggaguucaacaacgagagcuucgacuggaccggcgugacccagaacggcaccagcagcgccugcaagagaagaagcaacaagagcuucuucagcagacugaacuggcugacccaccugaaguacaaguaccccgcccugaacgugaccaugcccaacaacgagaaguucgacaagcuguacaucuggggcgugcaccaccccggcaccgacagcgaccagaucagccuguacgcccaggcccccggcaagaucaccgugagcaccaagagaagccagcagaccgugauccccaacaucggcagcagacccagagugagagacgugagcagcagaaucagcaucuacuggaccaucgugaagcccggcgacauccugcugaucaacagcaccggcaaccugaucgcccccagaggcuacuucaagaucagaagcggcaagagcagcaucaugagaagcgacgcccccaucggcaagugcaacagcgagugcaucacccccaacggcagcauccccaacgacaagcccuuccagaacgugaacagaaucaccuacggcgccugccccagauacgugaagcagaacacccugaagcuggccaccggcaugagaaacgugcccgagaagcagaccagaggcaucuucggcgccaucgccggcuucaucgagaacggcugggagggcaugguggacggcugguacggcuucagacaccagaacagcgagggcaccggccaggccgccgaccugaagagcacccaggccgccaucaaccagaucaacggcaagcugaacagacugaucggcaagaccaacgagaaguuccaccagaucgagaaggaguucagcgagguggagggcagaauccaggaccuggagaaguacguggaggacaccaagaucgaccuguggagcuacaacgccgagcugcugguggcccuggagaaccagcacaccaucgaccugaccgacagcgagaugaacaagcuguucgagagaaccaagaagcagcugagagagaacgccgaggacaugggcaacggcugcuucaagaucuaccacaagugcgacaacgccugcaucggcagcaucagaaacggcaccuacgaccacgacguguacagagacgaggcccugaacaacagauuccagaucaagggcguggagcugaagagcggcuacaaggacuggauccuguggaucagcuucgccaucagcugcuuccugcugugcguggcccugcugggcuucaucaugugggccugccagaagggcaacaucagaugcgacaucugcaucuga

SEQ ID NO: 168358 - RNA, 1701 nt, Artificial Sequence; identical to SEQ ID NO: 160133
  derived and/or modified CDS sequence (opt4) from hemagglutinin__InfluenzaA__AFD64022

SEQ ID NO: 168359 - RNA, 1701 nt, Artificial Sequence; identical to SEQ ID NO: 160133
  derived and/or modified CDS sequence (opt4) from hemagglutinin__InfluenzaA__AFD64033

SEQ ID NO: 168360 - RNA, 1701 nt, Artificial Sequence
  derived and/or modified CDS sequence (opt4) from hemagglutinin__InfluenzaA__AFD64044
augaagaccaucaucgcccugagcuacauccugugccugguguucgcccagaagcugcccggcaacgagaacagcaccgccacccugugccugggccaccacgccgugcccaacggcaccaucgugaagaccaucaccaacgaccagaucgaggugaccaacgccaccgagcuggugcagagcagcagcaccggcggcaucugcgacagcccccaccagauccuggacggcgagaacugcacccugaucgacgcccugcugggcgacccccagugcgacggcuuccagaacaagaagugggaccuguucguggagagaagcaaggccuacagcaacugcuaccccuacgacgugcccgacuacgccagccugagaagccugguggccagcagcggcacccuggaguucaacaacgagagcuucgacuggaccggcgugacccagaacggcaccagcagcgccugcaagagaagaagcaacaagagcuucuucagcagacugaacuggcugacccaccugaaguacaaguaccccgcccugaacgugaccaugcccaacaacgagaaguucgacaagcuguacaucuggggcgugcaccaccccggcaccgacagcgaccagaucagccuguacgcccaggccagcggcagaaucaccgugagcaccaagagaagccagcagaccgugauccccaacaucggcagcagacccagagugagagacgugagcagcagaaucagcaucuacuggaccaucgugaagcccggcgacauccugcugaucaacagcaccggcaaccugaucgcccccagaggcuacuucaagaucagaagcggcaagagcagcaucaugagaagcgacgcccccaucggcaagugcaacagcgagugcaucacccccaacggcagcauccccaacgacaagcccuuccagaacgugaacagaaucaccuacggcgccugccccagauacgugaagcagaacacccugaagcuggccaccggcaugagaaacgugcccgagaagcagaccagaggcaucuucggcgccaucgccggcuucaucgagaacggcugggagggcaugguggacggcugguacggcuucagacaccagaacagcgagggcaccggccaggccgccgaccugaagagcacccaggccgccaucaaccagaucaacggcaagcugaacagacugaucggcaagaccaacgagaaguuccaccagaucgagaaggaguucagcgagguggagggcagaauccaggaccuggagaaguacguggaggacaccaagaucgaccuguggagcuacaacgccgagcugcugguggcccuggagaaccagcacaccaucgaccugaccgacagcgagaugaacaagcuguucgagagaaccaagaagcagcugagagagaacgccgaggacaugggcaacggcugcuucaagaucuaccacaagugcgacaacgccugcaucggcagcaucagaaacggcaccuacgaccacgacguguacagagacgaggcccugaacaacagauuccagaucaagggcguggagcugaagagcggcuacaaggacuggauccuguggaucagcuucgccaucagcugcuuccugcugugcguggcccugcugggcuucaucaugugggccugccagaagggcaacaucagaugcaacaucugcaucuga

SEQ ID NO: 168361 - RNA, 1701 nt, Artificial Sequence; identical to SEQ ID NO: 168337
  derived and/or modified CDS sequence (opt4) from hemagglutinin__InfluenzaA__AFD64055

SEQ ID NO: 168362 - RNA, 1701 nt, Artificial Sequence
  derived and/or modified CDS sequence (opt4) from hemagglutinin__InfluenzaA__AFD64066
augaagaccaucaucgcccugagcuacauccugugccugguguucgcccagaagcugcccggcaacgacaacagcaccgccacccugugccugggccaccacgccgugcccaacggcaccaucgugaagaccaucaccaacgaccagaucgaggugaccaacgccaccgagcuggugcagagcagcagcaccggcggcaucugcgacagcccccaccagauccuggacggcgagaacugcacccugaucgacgcccugcugggcgacccccagugcgacggcuuccagaacaagaagugggaccuguucguggagagaagcaaggccuacagcaacugcuaccccuacgacgugcccgacuacaccagccugagaagccugguggccagcagcggcacccuggaguucaacaacgagagcuucaacuggaccggcgugacccagaacggcaccagcagcgccugcaagagaagaagcaacaagagcuucuucagcagacugaacuggcugacccaccugaaguucaaguaccccgcccugaacgugaccaugcccaacaacgagaaguucgacaagcuguacaucuggggcgugcaccaccccggcaccgacaacgaccagaucagccuguacgcccaggccagcggcagaaucaccgugagcaccaagagaagccagcagaccgugauccccaacaucggcagcagacccagagugagagacgugcccagcagaaucagcaucuacuggaccaucgugaagcccggcgacauccugcugaucaacagcaccggcaaccugaucgcccccagaggcuacuucaagaucagaagcggcaagagcagcaucaugagaagcgacgcccccaucggcaagugcaacagcgagugcaucacccccaacggcagcauccccaacgacaagcccuuccagaacgugaacagaaucaccuacggcgccugccccagauacgugaagcagaacacccugaagcuggccaccggcaugagaaacgugcccgagaagcagaccagaggcaucuucggcgccaucgccggcuucaucgagaacggcugggagggcaugguggacggcugguacggcuucagacaccagaacgccgagggcaccggccaggccgccgaccugaagagcacccaggccgccaucaaccagaucaacggcaagcugaacagacugaucggcaagaccaacgagaaguuccaccagaucgagaaggaguucagcgagguggagggcagaauccaggaccuggagaaguacguggaggacaccaagaucgaccuguggagcuacaacgccgagcugcugguggcccuggagaaccagcacaccaucgaccugaccgacagcgagaugaacaagcuguucgagagaaccaagaagcagcugagagagaacgccgaggacaugggcaacggcugcuucaagaucuaccacaagugcgacaacgccugcaucggcagcaucagaaacggcaccuacgaccacgacguguacagagacgaggcccugaacaacagauuccagaucaagggcguggagcugaagagcggcuacaagaacuggauccuguggaucagcuucgccaucagcugcuuccugcugugcguggcccugcugggcuucaucaugugggccugccagaagggcaacaucagaugcaacaucugcaucuga

SEQ ID NO: 168363 - RNA, 1701 nt, Artificial Sequence
  derived and/or modified CDS sequence (opt4) from hemagglutinin__InfluenzaA__AFD64077
augaagaccaucaucgcccugagcuacauccugugccugguguucgcccagaagcugcccggcaacgacaacagcaccgccacccugugccugggccaccacgccgugcccaacggcaccaucgugaagaccaucaccaacgaccagaucgaggugaccaacgccaccgagcuggugcagaucagcagcaccggcgagaucugcgacagcccccaccagauccuggacggcgagaacugcacccugaucgacgcccugcugggcgacccccagugcgacggcuuccagaacaagaagugggaccuguucguggagagaagcaaggccuacagcaacugcuaccccuacgacgugcccgacuacgccagccugagaagccugguggccagcagcggcacccuggaguucaacaacgagagcuucgacuggaccggcgugacccagaacggcaccagcagcgccugcaagagaagaagcaacaagagcuucuucagcagacugaacuggcugacccaccugaaguacaaguaccccgcccugaacgugaccaugcccaacaacgagaaguucgacaagcuguacaucuggggcgugcaccaccccggcaccgacagcgaccagaucagccuguacgcccaggccagcggcagaaucaccgugagcaccaagagaagccagcagaccgugauccccaacaucggcagcagacccagaaucagagacgugagcagcagaaucagcaucuacuggaccaucgugaagcccggcgacauccugcugaucaacagcaccggcaaccugaucgcccccagaggcuacuucaagaucagaagcggcaagagcagcaucaugagaagcgacgcccccaucggcaagugcaacagcgagugcaucacccccaacggcagcauccccaacgacaagcccuuccagaacgugaacagaaucaccuacggcgccugccccagauacgugaagcagaacacccugaagcuggccaccggcaugagaaacgugcccgagaagcagaccagaggcaucuucggcgccaucgccggcuucaucgagaacggcugggagggcaugguggacggcugguacggcuucagacaccagaacagcgagggcaccggccaggccgccgaccugaagagcacccaggccgccaucaaccagaucaacggcaagcugaacagacugaucggcaagaccaacgagaaguuccaccagaucgagaaggaguucagcgagguggagggcagaauccaggaccuggagaaguacguggaggacaccaagaucgaccuguggagcuacaacgccgagcugcugguggcccuggagaaccagcacaccaucgaccugaccgacagcgagaugaacaagcuguucgagagaaccaagaagcagcugagagagaacgccgaggacaugggcaacggcugcuucaagaucuaccacaagugcgacaacgccugcaucggcagcaucagaaacggcaccuacgaccacgacguguacagagacgaggcccugaacaacagauuccagaucaagggcguggagcugaagagcggcuacaaggacuggauccuguggaucagcuucgccaucagcugcuuccugcugugcguggcccugcugggcuucaucaugugggccugccagaagggcaacaucagaugcaacaucugcaucuga

SEQ ID NO: 168364 - RNA, 1701 nt, Artificial Sequence; identical to SEQ ID NO: 160133
  derived and/or modified CDS sequence (opt4) from hemagglutinin__InfluenzaA__AFD64088

SEQ ID NO: 168365 - RNA, 1701 nt, Artificial Sequence; identical to SEQ ID NO: 160133
  derived and/or modified CDS sequence (opt4) from hemagglutinin__InfluenzaA__AFD64099

SEQ ID NO: 168366 - RNA, 1701 nt, Artificial Sequence; identical to SEQ ID NO: 168337
  derived and/or modified CDS sequence (opt4) from hemagglutinin__InfluenzaA__AFD64110

SEQ ID NO: 168367 - RNA, 1701 nt, Artificial Sequence
  derived and/or modified CDS sequence (opt4) from hemagglutinin__InfluenzaA__AFD64121
augaagaccaucaucgcccugagcuacauccugugccugguguucgcccagaagcugcccggcaacgacaacagcaccgccacccugugccugggccaccacgccgugcccaacggcaccaucgugaagaccaucaccaacgaccagaucgaggugaccaacgccaccgagcuggugcagagcagcagcaccggcggcaucugcgacagcccccaccagauccuggacggcgagaacugcacccugaucgacgcccugcugggcgacccccagugcgacggcuuccagaacaagaagugggaccuguucguggagagaagcagagccuacagcaacugcuaccccuacgacgugcccgacuacgccagccugagaagccugguggccagcagcggcacccuggaguucaacaacgagagcuucaacuggaccggcgugacccagaacggcaccagcagcgccugcaagagaaagagcaacaagagcuucuucagcagacugaacuggcugacccaccugaaguacaaguaccccgcccugaacgugaccaugcccaacaacgagaaguucgacaagcuguacaucuggggcgugcaccaccccggcaccgacaacgaccagaucagccuguacgcccaggccagcggcagaaucaccgugagcaccaagagaagccagcagaccgugauccccaacaucggcagcagacccagagugagagacgugagcagcagaaucagcaucuacuggaccaucgugaagcccggcgacauccugcugaucaacagcaccggcaaccugaucgcccccagaggcuacuucaagaucagaagcggcaagagcagcaucaugagaagcgacgcccccaucggcaagugcaacagcgagugcaucacccccaacggcagcauccccaacgacaagcccuuccagaacgugaacagaaucaccuacggcgccugccccagauacgugaagcagaacacccugaagcuggccaccggcaugagaaacgugcccgagaagcagaccagaggcaucuucggcgccaucgccggcuucaucgagaacggcugggagggcaugguggacggcugguacggcuucagacaccagaacagcgagggcaccggccaggccgccgaccugaagagcacccaggccgccaucaaccagaucaacggcaagcugaacagacugaucggcaagaccaacgagaaguuccaccagaucgagaaggaguucagcgagguggagggcagaauccaggaccuggagaaguacguggaggacaccaagaucgaccuguggagcuacaacgccgagcugcugguggcccuggagaaccagcacaccaucgaccugaccgacagcgagaugaacaagcuguucgagagaaccaagaagcagcugagagagaacgccgaggacaugggcaacggcugcuucaagaucuaccacaagugcgacaacgccugcaucggcagcaucagaaacggcaccuacgaccacgacguguacagagacgaggcccugaacaacagauuccagaucaagggcguggagcugaagagcggcuacaaggacuggauccuguggaucagcuucgccaucagcugcuuccugcugugcguggcccugcugggcuucaucaugugggccugccagaagggcaacaucagaugcaacaucugcaucuga

SEQ ID NO: 168368 - RNA, 1701 nt, Artificial Sequence; identical to SEQ ID NO: 160133
  derived and/or modified CDS sequence (opt4) from hemagglutinin__InfluenzaA__AFD64132

SEQ ID NO: 168369 - RNA, 1701 nt, Artificial Sequence; identical to SEQ ID NO: 168327
  derived and/or modified CDS sequence (opt4) from hemagglutinin__InfluenzaA__AFD64143

SEQ ID NO: 168370 - RNA, 1701 nt, Artificial Sequence; identical to SEQ ID NO: 160133
  derived and/or modified CDS sequence (opt4) from hemagglutinin__InfluenzaA__AFD64154

SEQ ID NO: 168371 - RNA, 1701 nt, Artificial Sequence
  derived and/or modified CDS sequence (opt4) from hemagglutinin__InfluenzaA__AFD64179
augaagaccaucaucgcccugagcuacauccugugccugguguucgcccagaagcugcccggcaacgacaacagcaccgccacccugugccugggccaccacgccgugcccaacggcaccaucgugaagaccaucaccaacgaccagaucgaggugaccaacgccaccgagcuggugcagaucagcagcaccggcggcaucugcgacagcccccaccagauccuggacggcgagaacugcacccugaucgacgcccugcugggcgacccccagugcgacggcuuccagaacaagaagugggaccuguucguggagagaagcaaggccuacagcaacugcuaccccuacgacgugcccgacuacgccagccugagaagccugguggccagcagcggcacccuggaguucaacaacgagagcuucgacuggaccggcgugacccagaacggcaccagcagcgccugcaagagaagaagcaacaagagcuucuucagcagacugaacuggcugacccaccugaaguacaaguaccccgcccugaacgugaccaugcccaacaacgagaaguucgacaagcuguacaucuggggcgugcaccaccccggcaccgacagcgaccagaucagccuguacgcccaggccagcggcagaaucaccgugagcaccaagagaagccagcagaccgugauccccaacaucggcagcagacccagagugagagacgugagcagccagaucagcaucuacuggaccaucgugaagcccggcgacauccugcugaucaacagcaccggcaaccugaucgcccccagaggcuacuucaagaucagaagcggcaagagcagcaucaugagaagcgacgcccccaucggcaagugcaacagcgagugcaucacccccaacggcagcauccccaacgacaagcccuuccagaacgugaacagaaucaccuacggcgccugccccagauacgugaagcagaacacccugaagcuggccaccggcaugagaaacgugcccgagaagcagaccagaggcaucuucggcgccaucgccggcuucaucgagaacggcugggagggcaugguggacggcugguacggcuucagacaccagaacagcgagggcaccggccaggccgccgaccugaagagcacccaggccgccaucaaccagaucaacggcaagcugaacagacugaucggcaagaccaacgagaaguuccaccagaucgagaaggaguucagcgagguggagggcagaauccaggaccuggagaaguacguggaggacaccaagaucgaccuguggagcuacaacgccgagcugcugguggcccuggagaaccagcacaccaucgaccugaccgacagcgagaugaacaagcuguucgagagaaccaagaagcagcugagagagaacgccgaggacaugggcaacggcugcuucaagaucuaccacaagugcgacaacgccugcaucggcagcaucagaaacggcaccuacgaccacgacguguacagagacgaggcccugaacaacagauuccagaucaagggcguggagcugaagagcggcuacaaggacuggauccuguggaucagcuucgccaucagcugcuuccugcugugcguggcccugcugggcuucaucaugugggccugccagaagggcaacaucagaugcaacaucugcaucuga

SEQ ID NO: 168372 - RNA, 1701 nt, Artificial Sequence; identical to SEQ ID NO: 168371
  derived and/or modified CDS sequence (opt4) from hemagglutinin__InfluenzaA__AFD64190

SEQ ID NO: 168373 - RNA, 1701 nt, Artificial Sequence; identical to SEQ ID NO: 168327
  derived and/or modified CDS sequence (opt4) from hemagglutinin__InfluenzaA__AFD64201

SEQ ID NO: 168374 - RNA, 1701 nt, Artificial Sequence; identical to SEQ ID NO: 168337
  derived and/or modified CDS sequence (opt4) from hemagglutinin__InfluenzaA__AFD64212

SEQ ID NO: 168375 - RNA, 1701 nt, Artificial Sequence
  derived and/or modified CDS sequence (opt4) from hemagglutinin__InfluenzaA__AFD64223
augaagaccaucaucgcccugagcuacauccugugccugguguucgcccagaagcugcccggcaacgacaacagcaccgccacccugugccugggccaccacgccgugcccaacggcaccaucgugaagaccaucaccaacgaccagaucgaggugaccaacgccaccgagcuggugcagagcagcagcaccggcggcaucugcgacagcccccaccagauccuggacggcgagaacugcacccugaucgacgcccugcugggcgacccccagugcgacggcuuccagaacaagaagugggaccuguucguggagagaagcaaggccuacagcaacugcuaccccuacgacgugcccgacuacgccagccugagaagccugguggccagcagcggcacccuggaguucaacaacgagagcuucaacuggaccggcgugacccagaacggcaccagcagcgccugcaagagaagaagcaacaagagcuucuucagcagacugaacuggcugacccaccugaaguacaaguaccccgcccugaacgugaccaugcccaacaacgagaaguucgacaagcuguacaucuggggcgugcugcaccccggcaccgacagcgaccagaucagacuguacgcccaggccagcggcagaaucaccgugagcaccaagagaagccagcagaccgugauccccaacaucggcagcagacccagagugagagacgugagcagcagaaucagcaucuacuggaccaucgugaagcccggcgacauccugcugaucaacagcaccggcaaccugaucgcccccagaggcuacuucaagaucagaagcggcaagagcagcaucaugagaagcgacgcccccaucggcaagugcaacagcgagugcaucacccccaacggcagcauccccaacgacaagcccuuccagaacgugaacagaaucaccuacggcgccugccccagauacaucaagcagaacacccugaagcuggccaccggcaugagaaacgugcccgagaagcagaccagaggcaucuucggcgccaucgccggcuucaucgagaacggcugggagggcaugguggacggcugguacggcuucagacaccagaacagcgagggcaccggccaggccgccgaccugaagagcacccaggccgccaucaaccagaucaacggcaagcugaacagacugaucggcaagaccaacgagaaguuccaccagaucgagaaggaguucagcgagguggagggcagaauccaggaccuggagaaguacguggaggacaccaagaucgaccuguggagcuacaacgccgagcugcugguggcccuggagaaccaguacaccaucgaccugaccgacagcgagaugaacaagcuguucgagagaaccaagaagcagcugagagagaacgccgaggacaugggcaacggcugcuucaagaucuaccacaagugcgacaacgccugcaucggcagcaucagaaacggcaccuacgaccacgacguguacagagacgaggcccugaacaacagauuccagaucaagggcguggagcugaagagcggcuacaaggacuggauccuguggaucagcuucgccaucagcugcuuccugcugugcguggcccugcugggcuucaucaugugggccugccagaagggcaacaucagaugcaacaucugcaucuga

SEQ ID NO: 168376 - RNA, 1701 nt, Artificial Sequence
  derived and/or modified CDS sequence (opt4) from hemagglutinin__InfluenzaA__AFD64315
augaagaccaucaucgcccugagcuacauccugugccugguguucgcccagaagcugcccggcaacgacaacagcaccgccacccugugccugggccaccacgccgugcccaacggcaccaucgugaagaccaucaccaacgaccagaucgaggugaccaacgccaccgagcuggugcagaucagcagcaccggcggcaucugcgacagcccccaccagauccuggacggcgagaacugcacccugaucgacgcccugcugggcgacccccagugcgacggcuuccagaacaagaagugggaccuguucguggagagaagcaaggccuacagcaacugcuaccccuacgacgugcccgacuacgccagccugagaagccugguggccagcagcggcacccuggaguucaacaacgagagcuucgacuggaccggcgugacccagaacggcaccagcagcgccugcaagagaagaagcaacaagagcuucuucagcagacugaacuggcugacccaccugaaguacaaguaccccgcccugaacgugaccaugcccaacaacgagaaguucgacaagcuguacaucuggggcgugcaccaccccggcaccgacagcgaccagaucagccuguacgcccaggccagcggcagaaucaccgugagcaccaagagaagccagcagaccgugauccccaacaucggcagcagacccagagugagagacgugagcagcagaaucagcaucuacuggaccaucgugaagcccggcgacauccugcugaucaacagcaccggcaaccugaucgcccccagaggcuacuucaagaucagaagcggcaagagcagcaucaugagaagcgacgcccccaucggcaagugcaacagcgagugcaucacccccaacggcagcauccccaacgacaagcccuuccagaacgugaacagaaucaccuacggcgccugccccagauacgugaagcagaacacccugaagcuggccaccggcaugagaaacgugcccgagaagcagaccagaggcaucuucggcgccaucgccggcuucaucgagaacggcugggagggcaugguggacggcugguacggcuucagacaccagaacagcgagggcaccggccaggccgccgaccugaagagcacccaggccgccaucaaccagaucaacggcaagcugaacagacugaucggcaagaccaacgagaaguuccaccagaucgagaaggaguucagcgagguggagggcagaauccaggaccuggagaaguacguggaggacaccaagaucgaccuguggagcuacaacgccgagcugcugguggcccuggagaaccagcacaccaucgaccugaccgacagcgagaugaacaagcuguucgagagaaccaagaaccagcugagagagaacgccgaggacaugggcaacggcugcuucaagaucuaccacaagugcgacaacgccugcaucggcagcaucagaaacggcaccuacgaccacgacguguacagagacgaggcccugaacaacagauuccagaucaagggcguggagcugaagagcggcuacaaggacuggauccuguggaucagcuucgccaucagcugcuuccugcugugcguggcccugcugggcuucaucaugugggccugccagaagggcaacaucagaugcaacaucugcaucuga

SEQ ID NO: 168377 - RNA, 1701 nt, Artificial Sequence; identical to SEQ ID NO: 168367
  derived and/or modified CDS sequence (opt4) from hemagglutinin__InfluenzaA__AFD64326

SEQ ID NO: 168378 - RNA, 1701 nt, Artificial Sequence; identical to SEQ ID NO: 168337
  derived and/or modified CDS sequence (opt4) from hemagglutinin__InfluenzaA__AFD64337

SEQ ID NO: 168379 - RNA, 1701 nt, Artificial Sequence; identical to SEQ ID NO: 160133
  derived and/or modified CDS sequence (opt4) from hemagglutinin__InfluenzaA__AFD64348

SEQ ID NO: 168380 - RNA, 1701 nt, Artificial Sequence; identical to SEQ ID NO: 168337
  derived and/or modified CDS sequence (opt4) from hemagglutinin__InfluenzaA__AFD64359

SEQ ID NO: 168381 - RNA, 1701 nt, Artificial Sequence
  derived and/or modified CDS sequence (opt4) from hemagglutinin__InfluenzaA__AFD64370
augaagaccaucaucgcccugagcuacauccugugccugguguucgcccagaagcugcccggcaacgacaacagcaccgccacccugugccugggccaccacgccgugcccaacggcaccaucgugaagaccaucaccaacgaccagaucgaggugaccaacgccaccgagcuggugcagagcagcagcaccggcggcaucugcgacagcccccaccagauccuggacggcgagaacugcacccugaucgacgcccugcugggcgacccccacugcgacggcuuccagaacaagaagugggaccuguucguggagagaagcaaggccuacagcaacugcuaccccuacgacgugcccgacuacgccagccugagaagccugguggccagcagcggcacccuggaguucaacaacgagagcuucaacuggaccggcgugacccagaacggcaccagcagcgccugcaagagaaagagcaacaagagcuucuucagcagacugaacuggcugacccaccugaaguacaaguaccccgcccugaacgugaccaugcccaacaacgagaaguucgacaagcuguacaucuggggcgugcaccaccccggcaccgacaacgaccagaucagccuguacgcccaggccagcggcagaaucaccgugagcaccaagagaagccagcagaccgugauccccaacaucggcagcagacccagagugagagacaucagcagcagaaucagcaucuacuggaccaucgugaagcccggcgacauccugcugaucaacagcaccggcaaccugaucgcccccagaggcuacuucaagaucagaagcggcaagagcagcaucaugagaagcgacgcccccaucggcaagugcaacagcgagugcaucacccccaacggcagcauccccaacgacaagcccuuccagaacgugaacagaaucaccuacggcgccugccccagauacgugaagcagaacacccugaagcuggccaccggcaugagaaacgugcccgagaagcagaccagaggcaucuucggcgccaucgccggcuucaucgagaacggcugggagggcaugguggacggcugguacggcuucagacaccagaacagcgagggcaccggccaggccgccgaccugaagagcacccaggccgccaucaaccagaucaacggcaagcugaacagacugaucggcaagaccaacgagaaguuccaccagaucgagaaggaguucagcgagguggagggcagaauccaggaccuggagaaguacguggaggacaccaagaucgaccuguggagcuacaacgccgagcugcugguggcccuggagaaccagcacaccaucgaccugaccgacagcgagaugaacaagcuguucgagagaaccaagaagcagcugagagagaacgccgaggacaugggcaacggcugcuucaagaucuaccacaagugcgacaacgccugcaucggcagcaucagaaacggcaccuacgaccacgacguguacagagacgaggcccugaacaacagauuccagaucaagggcguggagcugaagagcggcuacaaggacuggauccuguggaucagcuucgccaucagcugcuuccugcugugcguggcccugcugggcuucaucaugugggccugccagaagggcaacaucagaugcaacaucugcaucuga

SEQ ID NO: 168382 - RNA, 1701 nt, Artificial Sequence; identical to SEQ ID NO: 160133
  derived and/or modified CDS sequence (opt4) from hemagglutinin__InfluenzaA__AFD64381

SEQ ID NO: 168383 - RNA, 1701 nt, Artificial Sequence; identical to SEQ ID NO: 168337
  derived and/or modified CDS sequence (opt4) from hemagglutinin__InfluenzaA__AFD64392

SEQ ID NO: 168384 - RNA, 1701 nt, Artificial Sequence; identical to SEQ ID NO: 168327
  derived and/or modified CDS sequence (opt4) from hemagglutinin__InfluenzaA__AFD64403

SEQ ID NO: 168385 - RNA, 1701 nt, Artificial Sequence; identical to SEQ ID NO: 168327
  derived and/or modified CDS sequence (opt4) from hemagglutinin__InfluenzaA__AFD64414

SEQ ID NO: 168386 - RNA, 1701 nt, Artificial Sequence
  derived and/or modified CDS sequence (opt4) from hemagglutinin__InfluenzaA__AFD64425
augaagaccaucaucgcccugagcuacauccugugccugguguucgcccagaagcugcccggcaacgacaacagcaccgccacccugugccugggccaccacgccgugcccaacggcaccaucgugaagaccaucaccaacgaccagaucgaggugaccaacgccaccgagcuggugcagaucagcagcaccggcggcaucugcgacagcccccaccagauccuggacggcgagaacugcacccugaucgacgcccugcugggcgacccccagugcgacggcuuccagaacaagaagugggaccuguucguggagagaagcaaggccuacagcaacugcuaccccuacgacgugcccaacuacgccagccugagaagccugguggccagcagcggcacccuggaguucaacaacgagagcuucgacuggaccggcgugacccagaacggcaccagcagcgccugcaagagaagaagcaacaagagcuucuucagcagacugaacuggcugacccaccugaaguacaaguaccccgcccugaacgugaccaugcccaacaacgagaaguucgacaagcuguacaucuggggcgugcaccaccccggcaccgacagcgaccagaucagccuguacgcccaggccagcggcagaaucaccgugagcaccaagagaagccagcagaccgugauccccaacaucggcagcagacccagagugagagacgugagcagcagaaucagcaucuacuggaccaucgugaagcccggcgacauccugcugaucaacagcaccggcaaccugaucgcccccagaggcuacuucaagaucagaagcggcaagagcagcaucaugagaagcgacgcccccaucggcaagugcaacagcgagugcaucacccccaacggcagcauccccaacgacaagcccuuccagaacgugaacagaaucaccuacggcgccugccccagauacgugaagcagaacacccugaagcuggccaccggcaugagaaacgugcccgagaagcagaccagaggcaucuucggcgccaucgccggcuucaucgagaacggcugggagggcaugguggacggcugguacggcuucagacaccagaacagcgagggcaccggccaggccgccgaccugaagagcacccaggccgccaucaaccagaucaacggcaagcugaacagacugaucggcaagaccaacgagaaguuccaccagaucgagaaggaguucagcgagguggagggcagaauccaggaccuggagaaguacguggaggacaccaagaucgaccuguggagcuacaacgccgagcugcugguggcccuggagaaccagcacaccaucgaccugaccgacagcgagaugaacaagcuguucgagagaaccaagaagcagcugagagagaacgccgaggacaugggcaacggcugcuucaagaucuaccacaagugcgacaacgccugcaucggcagcaucagaaacggcaccuacgaccacaacguguacagagacgaggcccugaacaacagauuccagaucaagggcguggagcugaagagcggcuacaaggacuggauccuguggaucagcuucgccaucagcugcuuccugcugugcguggcccugcugggcuucaucaugugggccugccagaagggcaacaucagaugcaacaucugcaucuga

SEQ ID NO: 168387 - RNA, 1701 nt, Artificial Sequence; identical to SEQ ID NO: 160133
  derived and/or modified CDS sequence (opt4) from hemagglutinin__InfluenzaA__AFD64436

SEQ ID NO: 168388 - RNA, 1701 nt, Artificial Sequence; identical to SEQ ID NO: 160133
  derived and/or modified CDS sequence (opt4) from hemagglutinin__InfluenzaA__AFD64447

SEQ ID NO: 168389 - RNA, 1701 nt, Artificial Sequence
  derived and/or modified CDS sequence (opt4) from hemagglutinin__InfluenzaA__AFD64458
augaagaccaucaucgcccugagcuacauccugugccugguguucgcccagaagcugcccggcaacgacaacagcaccgccacccugugccugggccaccacgccgugcagaacggcaccaucgugaagaccaucaccaacgaccagaucgaggugaccaacgccaccgagcuggugcagagcagcagcaccggcggcaucugcgacagcccccaccagauccuggacggcgagaacugcacccugaucgacgcccugcugggcgacccccagugcgacggcuuccagaacaagaagugggaccuguucguggagagaagcaaggccuacagcaacugcuaccccuacgacgugcccgacuacgccagccugagaagccugguggccagcagcggcacccuggaguucaacaacgagagcuucgacuggaccggcgugacccagaacggcaccagcagcgccugcaagagaagaagcaacaagagcuucuucagcagacugaacuggcugacccaccugaaguacaaguaccccgcccugaacgugaccaugcccaacaacgagaaguucgacaagcuguacaucuggggcgugcaccaccccggcaccgacagcgaccagaucagccuguacgcccaggccagcggcagaaucaccgugagcaccaagagaagccagcagaccgugauccccaacaucggcagcagacccagagugagagacgugagcagcagaaucagcaucuacuggaccaucgugaagcccggcgacauccugcugaucaacagcaccggcaaccugaucgcccccagaggcuacuucaagaucagaagcggcaagagcagcaucaugagaagcgacgcccccaucggcaagugcaacagcgagugcaucacccccaacggcagcauccccaacgacaagcccuuccagaacgugaacagaaucaccuacggcgccugccccagauacgugaagcagaacacccugaagcuggccaccggcaugagaaacgugcccgagaagcagaccagaggcaucuucggcgccaucgccggcuucaucgagaacggcugggagggcaugguggacggcugguacggcuucagacaccagaacagcgagggcaccggccaggccgccgaccugaagagcacccaggccgccaucaaccagaucaacggcaagcugaacagacugaucggcaagaccaacgagaaguuccaccagaucgagaaggaguucagcgagguggagggcagaauccaggaccuggagaaguacguggaggacaccaagaucgaccuguggagcuacaacgccgagcugcugguggcccuggagaaccagcacaccaucgaccugaccgacagcgagaugaacaagcuguucgagagaaccaagaagcagcugagagagaacgccgaggacaugggcaacggcugcuucaagaucuaccacaagugcgacaacgccugcaucggcagcaucagaaacggcaccuacgaccacgacguguacagagacgaggcccugaacaacagauuccagaucaagggcguggagcugaagagcggcuacaaggacuggauccuguggaucagcuucgccaucagcugcuuccugcugugcguggcccugcugggcuucaucaugugggccugccagaagggcaacaucagaugcaacaucugcaucuga

SEQ ID NO: 168390 - RNA, 1701 nt, Artificial Sequence; identical to SEQ ID NO: 166915
  derived and/or modified CDS sequence (opt4) from hemagglutinin__InfluenzaA__AFD64795

SEQ ID NO: 168391 - RNA, 1701 nt, Artificial Sequence; identical to SEQ ID NO: 167042
  derived and/or modified CDS sequence (opt4) from hemagglutinin__InfluenzaA__AFD64799

SEQ ID NO: 168392 - RNA, 1701 nt, Artificial Sequence
  derived and/or modified CDS sequence (opt4) from hemagglutinin__InfluenzaA__AFD64802
augaagaccaucaucgcccugagcuacauccugugccugguguucgcccagaagcugcccggcaacgacaacagcaccgccacccugugccugggccaccacgccgugcccaacggcaccaucgugaagaccaucaccaacgaccagaucgaggugaccaacgccaccgagcuggugcagagcagcagcaccggcgagaucugcaacagcccccaccagauccuggacggcgagaacugcacccugaucgacgcccugcugggcgacccccagugcgacggcuuccagaacaagaagugggaccuguucguggagagaagcaaggcccacagcaacugcuaccccuacgacgugcccgacuacgccagccugagaagccugguggccagcagcggcacccuggaguucaacaacgagagcuucaacuggaccggcgugacccagaacggcaccagcagcgccugcaucagaagaagcaacaacagcuucuucagcagacugaacuggcugacccaccugaacuucaaguaccccgcccugaacgugaccaugcccaacaacgagcaguucgacaagcuguacaucuggggcgugcaccaccccggcaccgacaaggaccagaccuuccuguacgcccaggccagcggcagaaucaccgugagcaccaagagaagccagcaggccgugauccccaacaucggcagcagacccagagugagaaacauccccagcagagugagcaucuacuggaccaucgugaagcccggcgacauccugcugaucaacagcaccggcaaccugaucgcccccagaggcuacuucaagaucagaagcggcaagagcagcaucaugagaagcgacgcccccaucggcaagugcaacagcgccugcaucacccccaacggcagcauccccaacgacaagcccuuccagaacgugaacagaaucaccuacggcgccugccccagauacgugaagcagaacacccugaagcuggccaccggcaugagaaacgugcccgagaagcagaccagaggcaucuucggcgccaucgccggcuucaucgagaacggcugggagggcaugguggacggcugguacggcuucagacaccagaacagcgagggcagaggccaggccgccgaccugaagagcacccaggccgccaucgaccagaucaacggcaagcugaacagacugaucggcaagaccaacgagaaguuccaccagaucgagaaggaguucagcgagguggagggcagaauccaggaccuggagaaguacguggaggacaccaagaucgaccuguggagcuacaacgccgagcugcugguggcccuggagaaccagcacaccaucgaccugaccgacagcgagaugaacaagcuguucgagaagaccaagaagcagcugagagagaacgccgaggacaugggcaacggcugcuucaagaucuaccacaagugcgacaacgccugcaucggcagcaucagaaacggcaccuacgaccacgacguguacagagacgaggcccugaacaacagauuccagaucaagggcguggagcugaagagcgaguacaaggacuggauccuguggaucagcuucgccaucagcugcuuccugcugugcguggcccugcugggcuucaucaugugggccugccagaagggcaacaucagaugcaacaucugcaucuga

SEQ ID NO: 168393 - RNA, 1701 nt, Artificial Sequence
  derived and/or modified CDS sequence (opt4) from hemagglutinin__InfluenzaA__AFD64804
augaagaccaucaucgcccugagcuacauccugugccugguguucgcccagaagcugcccggcaacgacaacagcaccgccacccugugccugggccaccacgccgugcccaacggcaccaucgugaagaccaucaccaacgaccagaucgaggugaccaacgccaccgagcuggugcagagcagcagcaccggcgagaucugcaacagcccccaccagauccuggacggcgagaacugcacccugaucgacgcccugcugggcgacccccagugcgacggcuuccagaacaagaagugggaccuguucguggagagaagcaaggcccacagcaacugcuaccccuacgacgugcccgacuacgccagccugagaagccugguggccagcagcggcacccuggaguucaacaacgagagcuucaacuggaccggcgugacccagaacggcaccagcagcgccugcaucagaagaagcaacaacagcuucuucagcagacugaacuggcugacccaccugaacuucaaguaccccgcccugaacgugaccaugcccaacaacgagcaguucgacaagcuguacaucuggggcgugcaccaccccggcaccgacaaggaccagaucuuccuguacgcccaggccagcggcagaaucaccgugagcaccaagagaagccagcaggccgugauccccaacaucggcagcagacccagagugagaaacauccccagcagagugagcaucuacuggaccaucgugaagcccggcgacauccugcugaucaacagcaccggcaaccugaucgcccccagaggcuacuucaagaucagaagcggcaagagcagcaucaugagaagcgacgcccccaucggcaagugcaacagcgccugcaucacccccaacggcagcauccccaacgacaagcccuuccagaacgugaacagaaucaccuacggcgccugccccagauacgugaagcagaacacccugaagcuggccaccggcaugagaaacgugcccgagaagcagaccagaggcaucuucggcgccaucgccggcuucaucgagaacggcugggagggcaugauggacggcugguacggcuucagacaccagaacagcgagggcagaggccaggccgccgaccugaagagcacccaggccgccaucgaccagaucaacggcaagcugaacagacugaucggcaagaccaacgagaaguuccaccagaucgagaaggaguucagcgagguggagggcagaauccaggaccuggagaaguacguggaggacaccaagaucgaccuguggagcuacaacgccgagcugcugguggcccuggagaaccagcacaccaucgaccugaccgacagcgagaugaacaagcuguucgagaagaccaagaagcagcugagagagaacgccgaggacaugggcaacggcugcuucaagaucuaccacaagugcgacaacgccugcaucggcagcaucagaaacggcaccuacgaccacgacguguacagagacgaggcccugaacaacagauuccagaucaagggcguggagcugaagagcggcuacaaggacuggauccuguggaucagcuucgccaucagcugcuuccugcugugcguggcccugcugggcuucaucaugugggccugccagaagggcaacaucagaugcaacaucugcaucuga

SEQ ID NO: 168394 - RNA, 1701 nt, Artificial Sequence
  derived and/or modified CDS sequence (opt4) from hemagglutinin__InfluenzaA__AFD64806
augaagaccaucaucgcccugagcuacauccugugccugguguucgcccagaagcugcccggcaacgacaacagcaccgccacccugugccugggccaccacgccgugcccaacggcaccaucgugaagaccaucaccaacgaccagaucgaggugaccaacgccaccgagcuggugcagagcagcagcaccggcgagaucugcaacagcccccaccagauccuggacggcgagaacugcacccugaucgacgcccugcugggcgacccccagugcgacggcuuccagaacaagaagugggaccuguucguggagagaagcaaggcccacagcaacugcuaccccuacgacgugcccgacuacgccagccugagaagccugguggccagcagcggcacccuggaguucaacaacgagagcuucaacuggaccggcgugacccagaacggcaccagcagcgccugcaucagaagaagcaacaacagcuucuucagcagacugaacuggcugacccaccugaacuucaaguaccccgcccugaacgugaccaugcccaacaacgagcaguucgacaagcuguacaucuggggcgugcaccaccccggcaccgacaaggaccagaccuuccuguacgcccaggccagcggcagaaucaccgugagcaccaagagaagccagcaggccgugauccccaacaucggcagcagacccagagugagaaacauccccagcagagugagcaucuacuggaccaucgugaagcccggcgacauccugcugaucaacagcaccggcaaccugaucgcccccagaggcuacuucaagaucagaagcggcaagagcagcaucaugagaagcgacgcccccaucggcaagugcaacagcgccugcaucacccccaacggcagcauccccaacgacaagcccuuccagaacgugaacagaaucaccuacggcgccugccccagauacgugaagcagaacacccugaagcuggccaccggcaugagaaacgugcccgagaagcagaccagaggcaucuucggcgccaucgccggcuucaucgagaacggcugggagggcaugguggacggcugguacggcuucagacaccagaacagcgagggcagaggccaggccgccgaccugaagagcacccaggccgccaucgaccagaucaacggcaagcugaacagacugaucggcaagaccaacgagaaguuccaccagaucgagaaggaguucagcgagguggagggcagaauccaggaccuggagaaguacguggaggacaccaagaucgaccuguggagcuacaacgccgagcugcugguggcccuggagaaccagcacaccaucgaccugaccgacagcgagaugaacaagcuguucgagaagaccaagaagcagcugagagagaacgccgaggacaugggcaacggcugcuucaagaucuaccacaagugcgacaacgccugcaucggcagcaucagaaacggcaccuacgaccacgacguguacagagacgaggcccugaacaacagauuccagaucaagggcguggagcugaagagcggcuacaaggacuggauccuguggaucagcuucgccaucagcugcuuccugcugugcguggcccugcugggcuucaucaugugggccugccagaagggcaacaucagaugcaacaucugcaucuga

SEQ ID NO: 168395 - RNA, 1701 nt, Artificial Sequence
  derived and/or modified CDS sequence (opt4) from hemagglutinin__InfluenzaA__AFD64807
augaagaccaucaucgcccugagcuacauccugugccugguguucgcccagaagcugcccggcaacgacaacagcaccgccacccugugccugggccaccacgccgugcccaacggcaccaucgugaagaccaucaccaacgaccagaucgaggugaccaacgccaccgagcuggugcagagcagcagcaccggcgagaucugcaacagcccccaccagauccuggacggcgagaacugcacccugaucgacgcccugcugggcgacccccagugcgacggcuuccagaacaagaagugggaccuguucguggagagaagcaaggcccacagcaacugcuaccccuacgacgugcccgacuacgccagccugagaagccugguggccagcagcggcacccuggaguucaacaacgagagcuucaacuggaccggcgugacccagaacggcaccagcagcgccugcaucagaagaagcaacaacagcuucuucagcagacugaacuggcugacccaccugaacuucaaguaccccgcccugaacgugaccaugcccaacaacgagcaguucgacaagcuguacaucuggggcgugcaccaccccggcaccgacaaggaccagaccuuccuguacgcccaggccagcggcagaaucaccgugagcaccaagagaagccagcaggccgugauccccaacaucggcagcagacccagagugagagacauccccagcagagugagcaucuacuggaccaucgugaagcccggcgacauccugcugaucaacagcaccggcaaccugaucgcccccagaggcuacuucaagaucagaagcggcaagagcagcaucaugagaagcgacgccccccugggcaagugccacagcgccugcaucacccccaacggcagcauccccaacgacaagcccuuccagaacgugaacagaaucaccuacggcgccugccccagauacgugaagcagaacacccugaagcuggccaccggcaugagaaacgugcccgagaagcagaccagaggcaucuucggcgccaucgccggcuucaucgagaacggcugggagggcaugguggacggcugguacggcuucagacaccagaacagcgagggcagaggccaggccgccgaccugaagagcacccaggccgccaucgaccagaucaacggcaagcugaacagacugaucggcaagaccaacgagaaguuccaccagaucgagaaggaguucagcgagguggagggcagaauccaggaccuggagaaguacguggaggacaccaagaucgaccuguggagcuacaacgccgagcugcugguggcccuggagaaccagcacaccaucgaccugaccgacagcgagaugaacaagcuguucgagaagaccaagaagcagcugagagagaacgccgaggacaugggcaacggcugcuucaagaucuaccacaagugcgacaacgccugcaucggcagcaucagaaacggcaccuacgaccacgacauguacagagacgaggcccugaacaacagauuccagaucaagggcguggagcugaagagcggcuacaaggacuggauccuguggaucagcuucgccaucagcugcuuccugcugugcguggcccugcugggcuucaucaugugggccugccagaagggcaacaucagaugcaacaucugcaucuga

SEQ ID NO: 168396 - RNA, 1701 nt, Artificial Sequence
  derived and/or modified CDS sequence (opt4) from hemagglutinin__InfluenzaA__AFD64810
augaagaccaucaucgcccugagcuacauccugugccugguguucgcccagaagcugcccggcaacgacaacagcaccgccacccugugccugggccaccacgccgugcccaacggcaccaucgugaagaccaucaccaacgaccagaucgaggugaccaacgccaccgagcuggugcagagcagcagcaccggcgagaucugcaacagcccccaccagauccuggacggcgagaacugcacccugaucgacgcccugcugggcgacccccagugcgacggcuuccagaacaagaagugggaccuguucguggagagaagcaaggcccacagcaacugcuaccccuacgacgugcccgacuacgccagccugagaagccugguggccagcagcggcacccuggaguucaacaacgagagcuucaacuggaccggcgugacccagaacggcaccagcagcgccugcaucagaagaagcaacaacagcuucuucagcagacugaacuggcugacccaccugaacuucaaguaccccgcccugaacgugaccaugcccaacaacgagcaguucgacaagcuguacaucuggggcgugcaccaccccggcaccgacaaggaccagaucuuccuguacgcccaggccagcggcagaaucaccgugagcaccaagagaagccagcaggccgugauccccaacaucggcagcagacccagagugagaaacauccccagcagagugagcaucuacuggaccaucgugaagcccggcgacauccugcugaucaacagcaccggcaaccugaucgcccccagaggcuacuucaagaucagaagcggcaagagcagcaucaugagaagcgacgcccccaucggcaagugcaacagcgccugcaucacccccaacggcagcauccccaacgacaagcccuuccagaacgugaacagaaucaccuacggcgccugccccagauacgugaagcagaacacccugaagcuggccaccggcaugagaaacgugcccgagaagcagaccagaggcaucuucggcgccaucgccggcuucaucgagaacggcugggagggcaugguggacggcugguacggcuucagacaccagaacagcgagggcagaggccaggccgccgaccugaagagcacccaggccgccaucgaccagaucaacggcaagcugaacagacugaucggcaagaccaacgagaaguuccaccagaucgagaaggaguucagcgagguggagggcagaauccaggaccuggagaaguacguggaggacaccaagaucgaccuguggagcuacaacgccgagcugcugguggcccuggagaaccagcacaccaucgaccugaccgacagcgagaugaacaagcuguucgagaagaccaagaagcagcugagagagaacgccgaggacaugggcaacggcugcuucaagaucuaccacaagugcgacaacgccugcaucggcagcaucagaaacggcaccuacgaccccgacguguacagagacgaggcccugaacaacagauuccagaucaagggcguggagcugaagagcggcuacaaggacuggauccuguggaucagcuucgccaucagcugcuuccugcugugcguggcccugcugggcuucaucaugugggccugccagaagggcaacaucagaugcaacaucugcaucuga

SEQ ID NO: 168397 - RNA, 1701 nt, Artificial Sequence
  derived and/or modified CDS sequence (opt4) from hemagglutinin__InfluenzaA__AFD64812
augaagaccaucaucgcccugagcuacauccugugccugguguucgcccagaagcugcccggcaacgacaacagcaccgccacccugugccugggccaccacgccgugcccaacggcaccaucgugaagaccaucaccaacgaccagaucgaggugaccaacgccaccgagcuggugcagagcagcagcaccggcgagaucugcaacagcccccaccagauccuggacggcgagaacugcacccugaucgacgcccugcugggcgacccccagugcgacggcuuccagaacaagaagugggaccuguucguggagagaagcaaggcccacagcaacugcuaccccuacgacgugcccgacuacgccagccugagaagccugguggccagcagcggcacccuggaguucaacaacgagagcuucaacuggaccggcgugacccagaacggcaccagcagcgccugcaucagaagaagcaacaacagcuucuucagcagacugaacuggcugacccaccugaacuucaaguaccccgcccugaacgugaccaugcccaacaacgagcaguucgacaagcuguacaucuggggcgugcaccaccccggcaccgacaaggaccagaccuuccuguacgcccaggccagcggcagaaucaccgugagcaccaagagaagccagcaggccgugauccccaacaucggcagcagacccagagugagaaacauccccagcagagugagcaucuacuggaccaucgugaagcccggcgacauccugcugaucaacagcaccggcaaccugaucgcccccagaggcuacuucaagaucagaagcggcaagagcagcaucaugagaagcgacgcccccaucggcaagugcaacagcgccugcaucacccccaacggcagcauccccaacgacaagcccuuccagaacgugaacagaaucaccuacggcgccugccccagauacgugaagcagaacacccugaagcuggccaccggcaugagaaacgugcccgagaagcagaccagaggcaucuucggcgccaucgccggcuucaucgagaacggcugggagggcaugguggacggcugguacggcuucagacaccagaacagcgagggcagaggccaggccgccgaccugaagagcacccaggccgccaccgaccagaucaacggcaagcugaacagacugaucggcaagaccaacgagaaguuccaccagaucgagaaggaguucagcgagguggagggcagaauccaggaccuggagaaguacguggaggacaccaagaucgaccuguggagcuacaacgccgagcugcugguggcccuggagaaccagcacaccaucgaccugaccgacagcgagaugaacaagcuguucgagaagaccaagaagcagcugagagagaacgccgaggacaugggcaacggcugcuucaagaucuaccacaagugcgacaacgccugcaucggcagcaucagaaacggcaccuacgaccacgacguguacagagacgaggcccugaacaacagauuccagaucaagggcguggagcugaagagcggcuacaaggacuggauccuguggaucagcuucgccaucagcugcuuccugcugugcguggcccugcugggcuucaucaugugggccugccagaagggcaacaucagaugcaacaucugcaucuga

SEQ ID NO: 168398 - RNA, 1701 nt, Artificial Sequence
  derived and/or modified CDS sequence (opt4) from hemagglutinin__InfluenzaA__AFD64814
augaagaccaucaucgcccugagcuacauccugugccugguguucgcccagaagcugcccggcaacgacaacagcaccgccacccugugccugggccaccacgccgugcccaacggcaccaucgugaagaccaucaccaacgaccagaucgaggugaccaacgccaccgagcuggugcagagcagcagcaccggcgagaucugcaacagcccccaccagauccuggacggcgagaacugcacccugaucgacgcccugcugggcgacccccagugcgacggcuuccagaacaagaagugggaccuguucguggagagaagcaaggcccacagcaacugcuaccccuacgacgugcccgacuacgccagccugagaagccugguggccagcagcggcacccuggaguucaacaacgagagcuucaacuggaccggcgugacccagaacggcaccagcagcgccugcaucagaagaagcaacaacagcuucuucagcagacugaacuggcugacccaccugaacuucaaguaccccgcccugaacgugaccaugcccaacaacgagcaguucgacaagcuguacaucuggggcgugcaccaccccggcaccgacaaggaccagaccuuccuguacgcccaggccagcggcagaaucaccgugagcaccaagagaagccagcaggccgugauccccaacaucggcagcagacccagagugagaaacauccccagcagagugagcaucuacuggaccaucgugaagcccggcgacauccugcugaucaacagcaccggcaaccugaucgcccccagaggcuacuucaagaucagaagcggcaagagcagcaucaugagaagcgacgcccccaucggcaagugcaacagcgccugcaucacccccaacggcagcauccccaacgacaagcccuuccagaacgugaacagaaucaccuacggcgccugccccagauacgugaagcagaacacccugaagcuggccaccggcaugagaaacgugcccgagaagcagaccagaggcaucuucggcgccaucgccggcuucaucgagaacggcugggagggcaugguggacggcugguacggcuucagacaccagaacagcgagggcagaggccaggccgccgaccugaagagcacccaggccgccaucgaccagaucaacggcaagcugaacagacugaucggcaagaccaacgagaaguuccaccagaucgagaaggaguucagcgagguggagggcagaauccaggaccuggagaaguacguggaggacaccaagaucgaccuguggagcuacaacgccgagcugcugguggcccuggagaaccagcacaccaucgaccugaccgacagcgagaugaacaagcuguucgagaagaccaagaagcagcugagagagaacgccgaggacaugggcaacggcugcuucaagaucuaccacaagugcgacaacgccugcaucggcagcaucagaaacggcaccuacgaccccgacguguacagagacgaggcccugaacaacagauuccagaucaagggcguggagcugaagagcggcuacaaggacuggauccuguggaucagcuucgccaucagcugcuuccugcugugcguggcccugcugggcuucaucaugugggccugccagaagggcaacaucagaugcaacaucugcaucuga

SEQ ID NO: 168399 - RNA, 1701 nt, Artificial Sequence
  derived and/or modified CDS sequence (opt4) from hemagglutinin__InfluenzaA__AFD64816
augaagaccaucaucgcccugagcuacauccugugccugguguucgcccagaagcugcccgagaacgacaacagcaccgccacccugugccugggccaccacgccgugcccaacggcaccaucgugaagaccaucaccaacgaccagaucgaggugaccaacgccaccgagcuggugcagagcagcagcaccggcgagaucugcaacagcccccaccagauccuggacggcgagaacugcacccugaucgacgcccugcugggcgacccccagugcgacggcuuccagaacaagaagugggaccuguucguggagagaagcaaggcccacagcaacugcuaccccuacgacgugcccgacuacgccagccugagaagccugguggccagcagcggcacccuggaguucaacaacgagagcuucaacuggaccggcgugacccagaacggcaccagcagcgccugcaugagaagaagcaacaacagcuucuucagcagacugaacuggcugacccaccugaacuucaaguaccccgcccugaacgugaccaugcccaacaacgagcaguucgacaagcuguacaucuggggcgugcaccaccccggcaccgacaaggaccagaucuuccuguacgcccaggccagcggcagaaucaccgugagcaccaagagaagccagcaggccgugauccccaacaucggcagcagacccagagugagaaacauccccagcagagugagcaucuacuggaccaucgugaagcccggcgacauccugcugaucaacagcaccggcaaccugaucgcccccagaggcuacuucaagaucagaagcggcaagagcagcaucaugagaagcgacgcccccaucggcaagugcaacagcgccugcaucacccccaacggcagcauccccaacgacaagcccuuccagaacgugaacagaaucaccuacggcgccugccccagauacgugaagcagaacacccugaagcuggccaccggcaugagaaacgugcccgagaagcagaccagaggcaucuucggcgccaucgccggcuucaucgagaacggcugggagggcaugguggacggcugguacggcuucagacaccagaacagcgagggcagaggccaggccgccgaccugaagagcacccaggccgccaucgaccagaucaacggcaagcugaacagacugaucggcaagaccaacgagaaguuccaccagaucgagaaggaguucagcgagguggagggcagaauccaggaccuggagaaguacguggaggacaccaagaucgaccuguggagcuacaacgccgagcugcugguggcccuggagaaccagcacaccaucgaccugaccgacagcgagaugaacaagcuguucgagaagaccaagaagcagcugagagagaacgccgaggacaugggcaacggcugcuucaagaucuaccacaagugcgacaacgccugcaucggcagcaucagaaacggcaccuacgaccacgacguguacagagacgaggcccugaacaacagauuccagaucaagggcguggagcugaagagcggcuacaaggacuggauccuguggaucagcuucgccaucagcugcuuccugcugugcguggcccugcugggcuucaucaugugggccugccagaagggcaacaucagaugcaacaucugcaucuga

SEQ ID NO: 168400 - RNA, 1701 nt, Artificial Sequence
  derived and/or modified CDS sequence (opt4) from hemagglutinin__InfluenzaA__AFD64818
augaagaccaucaucgcccugagcuacauccugugccugguguucgcccagaagcugcccggcaacgacaacagcaccgccacccugugccugggccaccacgccgugcccaacggcaccaucgugaagaccaucaccaacgaccagaucgaggugaccaacgccaccgagcuggugcagagcagcagcaccggcgagaucugcaacagcccccaccagauccuggacggcgagaacugcacccugaucgacgcccugcugggcgacccccagugcgacggcuuccagaacaagaagugggaccuguucguggagagaagcaaggcccacagcaacugcuaccccuacgacgugcccgacuacgccagccugagaagccugguggccagcagcggcacccuggaguucaacaacgagagcuucaacuggaccggcgugacccagaacggcaccagcagcgccugcaucagaagaagcaacaacagcuucuucagcagacugaacuggcugacccaccugaacuucaaguaccccgcccugaacgugaccaugcccaacaacgagcaguucgacaagcuguacaucuggggcgugcaccaccccggcaccgacaaggaccagaccuuccuguacgcccaggccagcggcagaaucaccgugagcaccaagagaagccagcaggccgugauccccaacaucggcagcagacccagagugagaaacauccccagcagagugagcaucuacuggaccaucgugaagcccggcgacauccugcugaucaacagcaccggcaaccugaucgcccccagaggcuacuucaagaucagaagcggcaagagcagcaucaugagaagcgacgccccccugggcaagugcaucagcgccugcaucacccccaacggcagcauccccaacgacaagcccuuccagaacgugaacagaaucaccuacggcgccugccccagauacgugaagcagaacacccugaagcuggccaccggcaugagaaacgugcccgagaagcagaccagaggcaucuucggcgccaucgccggcuucaucgagaacggcugggagggcaugguggacggcugguacggcuucagacaccagaacagcgagggcagaggccaggccgccgaccugaagagcacccaggccgccaucgaccagaucaacggcaagcugaacagacugaucggcaagaccaacgagaaguuccaccagaucgagaaggaguucagcgagguggagggcagaauccaggaccuggagaaguacguggaggacaccaagaucgaccuguggagcuacaacgccgagcugcugguggcccuggagaaccagcacaccaucgaccugaccgacagcgagaugaacaagcuguucgagaagaccaagaagcagcugagagagaacgccgaggacaugggcaacggcugcuucaagaucuaccacaagugcgacaacgccugcaucggcagcaucagaaacggcaccuacgaccacgacguguacagagacgaggcccugaacaacagauuccagaucaagggcguggagcugaagagcggcuacaaggacuggauccuguggaucagcuucgccaucagcugcuuccugcugugcguggcccugcugggcuucaucaugugggccugccagaagggcaacaucagaugcaacaucugcaucuga

SEQ ID NO: 168401 - RNA, 1701 nt, Artificial Sequence
  derived and/or modified CDS sequence (opt4) from hemagglutinin__InfluenzaA__AFD64819
augaagaccaucaucgcccugagcuacauccugugccugguguucgcccagaagcugcccggcaacgacaacagcaccgccacccugugccugggccaccacgccgugcccaacggcaccaucgugaagaccaucaccaacgaccagaucgaggugaccaacgccaccgagcuggugcagagcagcagcaccggcgagaucugcaacagcccccaccagauccuggacggcgagaacugcacccugaucgacgcccugcugggcgacccccagugcgacggcuuccagaacaagaagugggaccuguucguggagagaagcaaggcccacagcaacugcuaccccuacgacgugcccgacuacgccagccugagaagccugguggccagcagcggcacccuggaguucaacaacgagagcuucaacuggaccggcgugacccagaacggcaccagcagcgccugcaucagaagaagcaacaacagcuucuucagcagacugaacuggcugacccaccugaacuucaaguaccccgcccugaacgugaccaugcccaacaacgagcaguucgacaagcuguacaucuggggcgugcaccaccccggcaccgacaaggaccagaccuuccuguacgcccaggccagcggcagaaucaccgugagcaccaagagaagccagcaggccgugauccccaacaucggcagcagacccagaaucagaaacauccccagcagagugagcaucuacuggaccaucgugaagcccggcgacauccugcugaucaacagcaccggcaaccugaucgcccccagaggcuacuucaagaucagaagcggcaagagcagcaucaugagaagcgacgcccccaucggcaagugcaucagcgccugcaucacccccaacggcagcauccccaacgacaagcccuuccagaacgugaacagaaucaccuacggcgccugccccagauacgugaagcagaacacccugaagcuggccaccggcaugagaaacgugcccgagaagcagaccagaggcaucuucggcgccaucgccggcuucaucgagaacggcugggagggcaugguggacggcugguacggcuucagacaccagaacagcgagggcagaggccaggccgccgaccugaagagcacccaggccgccaucgaccagaucaacggcaagcugaacagacugaucggcaagaccaacgagaaguuccaccagaucgagaaggaguucagcgagguggagggcagaauccaggaccuggagaaguacguggaggacaccaagaucgaccuguggagcuacaacgccgagcugcugguggcccuggagaaccagcacaccaucgaccugaccgacagcgagaugaacaagcuguucgagaagaccaagaagcagcugagagagaacgccgaggacaugggcaacggcugcuucaagaucuaccacaagugcgacaacgccugcaucggcagcaucagaaacggcaccuacgaccccgacguguacagagacgaggcccugaacaacagauuccagaucaagggcguggagcugaagagcggcuacaaggacuggauccuguggaucagcuucgccaucagcugcuuccugcugugcguggcccugcugggcuucaucaugugggccugccagaagggcaacaucagaugcaacaucugcaucuga

SEQ ID NO: 168402 - RNA, 1701 nt, Artificial Sequence; identical to SEQ ID NO: 167042
  derived and/or modified CDS sequence (opt4) from hemagglutinin__InfluenzaA__AFD64820

SEQ ID NO: 168403 - RNA, 1701 nt, Artificial Sequence
  derived and/or modified CDS sequence (opt4) from hemagglutinin__InfluenzaA__AFD64822
augaagaccaucaucgcccugagcuacauccugugccugguguucgcccagaagcugcccggcaacgacaacagcaccgccacccugugccugggccaccacgccgugcccaacggcaccaucgugaagaccaucaccaacgaccagaucgaggugaccaacgccaccgagcuggugcagagcagcagcaccggcgagaucugcaacagcccccaccagauccuggacggcgagaacugcacccugaucgacgcccugcugggcgacccccagugcgacggcuuccagaacaagaagugggaccuguucguggagagaagcaaggcccacagcaacugcuaccccuacgacgugcccgacuacgccagccugagaagccugguggccagcagcggcacccuggaguucaacaacgagagcuucaacuggaccggcgugacccagaacggcaccagcagcgccugcaugagaagaagcaacaacagcuucuucagcagacugaacuggcugacccaccugaacuucaaguaccccgcccugaacgugaccaugcccaacaacgagcaguucgacaagcuguacaucuggggcgugcaccaccccggcaccgacaaggaccagaucuuccuguacgcccaggccagcggcagaaucaccgugagcaccaagagaagccagcaggccgugauccccaacaucggcagcagacccagagugagaaacauccccagcagagugagcaucuacuggaccaucgugaagcccggcgacauccugcugaucaacagcaccggcaaccugaucgcccccagaggcuacuucaagaucagaagcggcaagagcagcaucaugagaagcgacgcccccaucggcaagugcaacagcgccugcaucacccccaacggcagcauccccaacgacaagcccuuccagaacgugaacagaaucaccuacggcgccugccccagauacgugaagcagaacacccugaagcuggccaccggcaugagaaacgugcccgagaagcagaccagaggcaucuucggcgccaucgccggcuucaucgagaacggcugggagggcaugguggacggcugguacggcuucagacaccagaacagcgagggcagaggccaggccgccgaccugaagagcacccaggccgccaucgaccagaucaacggcaagcugaacagacugaucggcaagaccaacgagaaguuccaccagaucgagaaggaguucagcgagguggagggcagaauccaggaccuggagaaguacguggaggacaccaagaucgaccuguggagcuacaacgccgagcugcugguggcccuggagaaccagcacaccaucgaccugaccgacagcgagaugaacaagcuguucgagaagaccaagaagcagcugagagagaacgccgaggacaugggcaacggcugcuucaagaucuaccacaagugcgacaacgccugcaucggcagcaucagaaacggcaccuacgaccacgacguguacagagacgaggcccugaacaacagauuccagaucaagggcguggagcugaagagcggcuacaaggacuggauccuguggaucagcuucgccaucagcugcuuccugcugugcguggcccugcugggcuucaucaugugggccugccagaagggcaacaucagaugcaacaucugcaucuga

SEQ ID NO: 168404 - RNA, 1701 nt, Artificial Sequence
  derived and/or modified CDS sequence (opt4) from hemagglutinin__InfluenzaA__AFD64823
augaagaccaucaucgcccugagcuacauccugugccugguguucgcccagaagcugcccggcaacgacaacagcaccgccacccugugccugggccaccacgccgugcccaacggcaccaucgugaagaccaucaccaacgaccagaucgaggugaccaacgccaccgagcuggugcagagcagcagcaccggcgagaucugcaacagcccccaccagauccuggacggcgagaacugcacccugaucgacgcccugcugggcgacccccagugcgacggcuuccagaacaagaagugggaccuguucguggagagaagcaaggcccacagcaacugcuaccccuacgacgugcccgacuacgccagccugagaagccugguggccagcagcggcacccuggaguucaacaacgagagcuucaacuggaccggcgugacccagaacggcaccagcagcgccugcaucagaagaagcaacaacagcuucuucagcagacugaacuggcugacccaccugaacuucaaguaccccgcccugaacgugaccaugcccaacaacgagcaguucgacaagcuguacaucuggggcgugcaccaccccggcaccgacaaggaccagaucuuccuguacgcccaggccgccggcagaaucaccgugagcaccaagagaagccagcaggccgugauccccaacaucggcagcagacccagagugagaaacauccccagcagagugagcaucuacuggaccaucgugaagcccggcgacauccugcugaucaacagcaccggcaaccugaucgcccccagaggcuacuucaagaucagaagcggcaagagcagcaucaugagaagcgacgcccccaucggcagaugcaacagcgccugcaucacccccaacggcagcauccccaacgacaagcccuuccagaacgugaacagaaucaccuacggcgccugccccagauacgugaagcagaacacccugaagcuggccaccggcaugagaaacgugcccgagaagcagaccagaggcaucuucggcgccaucgccggcuucaucgagaacggcugggagggcaugguggacggcugguacggcuucagacaccagaacagcgagggcagaggccaggccgccgaccugaagagcacccaggccgccaucgaccagaucaacggcaagcugaacagacugaucggcaagaccaacgagaaguuccaccagaucgagaaggaguucagcgagguggagggcagaauccaggaccuggagaaguacguggaggacaccaagaucgaccuguggagcuacaacgccgagcugcugguggcccuggagaaccagcacaccaucgaccugaccgacagcgagaugaacaagcuguucgagaagaccaagaagcagcugagagagaacgccgaggacaugggcaacggcugcuucaagaucuaccacaagugcgacaacgccugcaucggcagcaucagaaacggcaccuacgaccacgacguguacagagacgaggcccugaacaacagauuccagaucaagggcguggagcugaagagcggcuacaaggacuggauccuguggaucagcuucgccaucagcugcuuccugcugugcguggcccugcugggcuucaucaugugggccugccagaagggcaacaucagaugcaacaucugcaucuga

SEQ ID NO: 168405 - RNA, 1701 nt, Artificial Sequence
  derived and/or modified CDS sequence (opt4) from hemagglutinin__InfluenzaA__AFD64824
augaagaccaucaucgcccugagcuacauccugugccugguguucgcccagaagcugcccggcaacgacaacagcaccgccacccugugccugggccaccacgccgugcccaacggcaccaucgugaagaccaucaccaacgaccagaucgaggugaccaacgccaccgagcuggugcagagcagcagcaccggcgagaucugcaacagcccccaccagauccuggacggcgagaacugcacccugaucgacgcccugcugggcgacccccagugcgacggcuuccagaacaagaagugggaccuguucguggagagaagcaaggcccacagcaacugcuaccccuacgacgugcccgacuacgccagccugagaagccugguggccagcagcggcacccuggaguucaacaacgagagcuucaacuggaccggcgugacccagaacggcaccagcagcgccugcaucagaagaagcaacaacagcuucuucagcagacugaacuggcugacccaccugaacuucaaguaccccgcccugaacgugaccaugcccaacaacgagcaguucgacaagcuguacaucuggggcgugcaccaccccggcaccgacaaggaccagaccuuccuguacgcccaggccagcggcagaaucaccgugagcaccaagagaagccagcaggccgugauccccaacaucggcagcagacccagagugagaaacauccccagcagagugagcaucuacuggaccaucgugaagcccggcgacauccugcugaucaacagcaccggcaaccugaucgcccccagaggcuacuucaagaucagaagcggcaagagcagcaucaugagaagcgacgcccccaucggcaagugcaacagcgccugcaucacccccaacggcagcauccccaacgacaagcccuuccagaacgugaacagaaucaccuacggcgccugccccagauacgugaagcagaacacccugaagcuggccaccggcaugagaaacgugcccgagaagcagaccagaggcaucuucggcgccaucgccggcuucaucgagaacggcugggagggcaugguggacggcugguacggcuucagacaccagaacagcgagggcagaggccaggccgccgaccugaagagcacccaggccgccaucgaccagaucaacggcaagcugaacagacugaucggcaagaccaacgagaaguuccaccagaucgagaaggaguucagcgagguggagggcagaauccaggaccuggagaaguacguggaggacaccaagaucgaccuguggagcuacaacgccgagcugcugguggcccuggagaaccagcacaccaucgaccugaccgacagcgagaugaacaagcuguucgagaagaccaagaagcagcugagagagaacgccgaggacaugggcaacggcugcuucaagaucuaccacaagugcgacaacgccugcaucggcagcaucagaaacggcaccuacgaccacgacguguacagagacgaggcccugaacaacagauuccagaucaagggcguggagcugaagagcggcuacaaggacuggauccuguggaucagcuucgccaccagcugcuuccugcugugcguggcccugcugggcuucaucaugugggccugccagaagggcaacaucagaugcaacaucugcaucuga

SEQ ID NO: 168406 - RNA, 1701 nt, Artificial Sequence; identical to SEQ ID NO: 168394
  derived and/or modified CDS sequence (opt4) from hemagglutinin__InfluenzaA__AFD64825

SEQ ID NO: 168407 - RNA, 1701 nt, Artificial Sequence; identical to SEQ ID NO: 168394
  derived and/or modified CDS sequence (opt4) from hemagglutinin__InfluenzaA__AFD64827

SEQ ID NO: 168408 - RNA, 1701 nt, Artificial Sequence
  derived and/or modified CDS sequence (opt4) from hemagglutinin__InfluenzaA__AFD64828
augaagaccaucaucgcccugagcuacauccugugccugguguucgcccagaagcugcccggcaacgacaacagcaccgccacccugugccugggccaccacgccgugcccaacggcaccaucgugaagaccaucaccaacgaccagaucgaggugaccaacgccaccgagcuggugcagagcagcagcaccggcgagaucugcaacagcccccaccagauccuggacggcgagaacugcacccugaucgacgcccugcugggcgacccccagugcgacggcuuccagaacaagaagugggaccuguucguggagagaagcaaggcccacagcaacugcuaccccuacgacgugcccgacuacgccagccugagaagccugguggccagcagcggcacccuggaguucaacaacgagagcuucaacuggaccggcgugacccagaacggcaccagcagcgccugcaucagaagaagcaacaacagcuucuucagcagacugaacuggcugacccaccugaacuucaaguaccccgcccugaacgugaccaugcccaacaacgagcaguucgacaagcuguacaucuggggcgugcaccaccccggcaccgacaaggaccagaucuuccuguacgcccaggccagcggcagaaucaccgugagcaccaagagaagccagcaggccgugauccccaacaucggcagcagacccagagugagaaacauccccagcagagugagcaucuacuggaccaucgugaagcccggcgacauccugcugaucaacagcaccggcaaccugaucgcccccagaggcuacuucaagaucagaagcggcaagagcagcaucaugagaagcgacgcccccaucggcaagugcaacagcgccugcaucacccccaacggcagcauccccaacgacaagcccuuccagaacgugaacagaaucaccuacggcgccugccccagauacgugaagcagaacacccugaagcuggccaccggcaugagaaacgugcccgagaagcagaccagaggcaucuucggcgccaucgccggcuucaucgagaacggcugggagggcaugauggacggcugguacggcuucagacaccagaacagcgagggcagaggccaggccgccgaccugaagagcacccaggccgccaucgaccagaucaacggcaagcugaacagacugaucggcaagaccaacgagaaguuccaccagaucgagaaggaguucagcgagguggagggcagaauccaggaccuggagaaguacguggaggacaccaagaucgaccuguggagcuacaacgccgagcugcugguggcccuggagaaccagcacaccaucgaccugaccgacagcgagaugaacaagcuguucgagaagaccaagaagcagcugagagagaacgccgaggacaugggcaacggcugcuucaagaucuaccacaagugcgacaacgccugcaucggcagcaucagaaacggcaccuacgaccccgacguguacagagacgaggcccugaacaacagauuccagaucaagggcguggagcugaagagcggcuacaaggacuggauccuguggaucagcuucgccaucagcugcuuccugcugugcguggcccugcugggcuucaucaugugggccugccagaagggcaacaucagaugcaacaucugcaucuga

SEQ ID NO: 168409 - RNA, 1701 nt, Artificial Sequence; identical to SEQ ID NO: 168403
  derived and/or modified CDS sequence (opt4) from hemagglutinin__InfluenzaA__AFD64830

SEQ ID NO: 168410 - RNA, 1701 nt, Artificial Sequence; identical to SEQ ID NO: 167042
  derived and/or modified CDS sequence (opt4) from hemagglutinin__InfluenzaA__AFD98095

SEQ ID NO: 168411 - RNA, 1701 nt, Artificial Sequence
  derived and/or modified CDS sequence (opt4) from hemagglutinin__InfluenzaA__AFD98106
augaagaccaucaucgcccugagcuacauccugugccugguguucgcccagaagcugcccggcaacgacaacagcaccgccacccugugccugggccaccacgccgugcccaacggcaccaucgugaagaccaucaccaacgaccagaucgaggugaccaacgccaccgagcuggugcagagcagcagcgccggcgagaucugcgacagcccccaccacauccuggacggcgagaacugcacccugaucgacgcccugcugggcgacccccagugcgacggcuuccagaacaagaagugggaccuguucguggagagaagcagagccuacagcaacugcuaccccuacgacgugcccgacuacgccagccugagaagccugguggccagcagcggcacccuggaguucaacaacgagagcuucaacuggaccggcgugacccagaacggcaccagcagcgccugcaucagaagaagcaacaacagcuucuucagcagacugaacuggcugacccaccugaacuucaaguaccccgcccugaacgugaccaugcccaacaacgagcaguucgacaagcuguacaucuggggcgugcaccaccccggcaccgacaaggaccagaucuuccuguacgcccaggccagcggcagaaucaccgugagcaccaagagaagccagcaggccgugauccccaacaucggcagcagacccagagugagaaacauccccagcagaaucagcaucuacuggaccaucgugaagcccggcgacauccugcugaucaacagcaccggcaaccugaucgcccccagaggcuacuucaagaucagaagcggcaagagcagcaucaugagaagcgacgcccccaucggcaagugcaacagcgagugcaucacccccaacggcagcauccccaacgacaagcccuuccagaacgugaacagaaucaccuacggcgccugccccagauacgugaagcagagcacccugaagcuggccaccggcaugagaaacgugcccgagaagcagaccagaggcaucuucggcgccaucgccggcuucaucgagaacggcugggagggcaugauggacggcugguacggcuucagacaccagaacagcgagggcagaggccaggccgccgaccugaagagcacccaggccgccaucgaccagaucaacggcaagcugaacagacugaucggcaagaccaacgagaaguuccaccagaucgagaaggaguucagcgagguggagggcagaauccaggaccuggagaaguacguggaggacaccaagaucgaccuguggagcuacaacgccgagcugcugguggcccuggagaaccagcacaccaucgaccugaccgacagcgagaugaacaagcuguucgagaagaccaagaagcagcugagagagaacgccgaggacaugggcaacggcugcuucaagaucuaccacaagugcgacaacgccugcaucggcagcaucagaaacggcaccuacgaccacgacguguacagagacgaggcccugaacaacagauuccagaucaagggcguggagcugaagagcggcuacaaggacuggauccuguggaucagcuucgccaucagcugcuuccugcugugcguggcccugcugggcuucaucaugugggccugccagaagggcaacaucagaugcaacaucugcaucuga

SEQ ID NO: 168412 - RNA, 1701 nt, Artificial Sequence
  derived and/or modified CDS sequence (opt4) from hemagglutinin__InfluenzaA__AFD98128
augaagaccaucaucgcccugagcuacauccugugccugguguucgcccagaagcugcccggcaacgacaacagcaccgccacccugugccugggccaccacgccgugcccaacggcaccaucgugaagaccaucaccaacgaccagaucgaggugaccaacgccaccgagcuggugcagaacagcagcaccggcgagaucugcaacagcccccaccagauccuggacggcgagaacugcacccugaucgacgcccugcugggcgacccccagugcgacggcuuccagaacaagaagugggaccuguucguggagagaagcaaggcccacagcaacugcuaccccuacgacgugcccgacuacgccagccugagaagccugguggccagcagcggcacccuggaguucaacaacgagagcuucaacuggaccggcgugacccagaacggcaccagcagcgccugcaucagaaagagcaacaacagcuucuucagcagacugaacuggcugacccaccugaacuucaaguaccccgcccugaacgugaccaugcccaacaacgagcaguucgacaagcuguacaucuggggcgugcaccaccccggcaccgacaaggaccagaucuuccuguacgcccaggccgccggcagaaucaccgugagcaccaagagaagccagcaggccgugauccccaacaucggcagcagacccagagugagaaacauccccagcagagugagcaucuacuggaccaucgugaagcccggcgacauccugcugaucaacagcaccggcaaccugaucgcccccagaggcuacuucaagaucagaagcggcaagagcagcaucaugagaagcgacgcccccaucggcaagugcaacagcgccugcaucacccccaacggcagcauccccaacgacaagcccuuccagaacgugaacagaaucaccuacggcgccugccccagauacgugaagcagaacacccugaagcuggccaccggcaugagaaacgugcccgagaagcagaccagaggcaucuucggcgccaucgccggcuucaucgagaacggcugggagggcaugguggacggcugguacggcuucagacaccagaacagcgagggcagaggccaggccgccgaccugaagagcacccaggccgccaucgaccagaucaacggcaagcugaacagacugaucggcaagaccaacgagaaguuccaccagaucgagaaggaguucagcgagguggagggcagaauccaggaccuggagaaguacguggaggacaccaagaucgaccuguggagcuacaacgccgagcugcugguggcccuggagaaccagcacaccaucgaccugaccgacagcgagaugaacaagcuguucgagaagaccaagaagcagcugagagagaacgccgaggacaugggcaacggcugcuucaagaucuaccacaagugcgacaacgccugcaucggcagcaucagaaacggcaccuacgaccacgacguguacagagacgaggcccugaacaacagauuccagaucaagggcguggagcugaagagcggcuacaaggacuggauccuguggaucagcuucgccaucagcugcuuccugcugugcguggcccugcugggcuucaucaugugggccugccagaagggcaacaucagaugcaacaucugcaucuga

SEQ ID NO: 168413 - RNA, 1701 nt, Artificial Sequence; identical to SEQ ID NO: 167042
  derived and/or modified CDS sequence (opt4) from hemagglutinin__InfluenzaA__AFD98139

SEQ ID NO: 168414 - RNA, 1701 nt, Artificial Sequence
  derived and/or modified CDS sequence (opt4) from hemagglutinin__InfluenzaA__AFD98161
augaagaccaucaucgcccugagcuacauccugugccugguguucgcccagaagcugcccggcaacgacaacagcaccgccacccugugccugggccaccacgccgugcccaacggcaccaucgugaagaccaucaccaacgaccagaucgaggugaccaacgccaccgagcuggugcagaacagcagcgccggcgagaucugcgacagcccccaccacauccuggacggcgagaacugcacccugaucgacgcccugcugggcgacccccagugcgacggcuuccagaacaagaagugggaccuguucguggagagaagcagagccuacagcaacugcuaccccuacgacgugcccgacuacgccagccugagaagccugguggccagcagcggcacccuggaguucaacaacgagagcuucaacuggaccggcgugacccagaacggcaccagcagcgccugcaucagaagaagcaacaacagcuucuucagcagacugaacuggcugacccaccugaacuucaaguaccccgcccugaacgugaccaugcccaacaacgagcaguucgacaagcuguacaucuggggcgugcaccaccccggcaccgacaaggaccagaucuuccuguacgcccaggccagcggcagaaucaccgugagcaccaagagaagccagcaggccgugauccccaacaucggcagcagacccagagugagaaacauccccagcagaaucagcaucuacuggaccaucgugaagcccggcgacauccugcugaucaacagcaccggcaaccugaucgcccccagaggcuacuucaagaucagaagcggcaagagcagcaucaugagaagcgacgcccccaucggcaagugcaacagcgagugcaucacccccaacggcagcauccccaacgacaagcccuuccagaacgugaacagaaucaccuacggcgccugccccagauacgugaagcagagcacccugaagcuggccaccggcaugagaaacgugcccgagaagcagaccagaggcaucuucggcgccaucgccggcuucaucgagaacggcugggagggcaugauggacggcugguacggcuucagacaccagaacagcgagggcagaggccaggccgccgaccugaagagcacccaggccgccaucgaccagaucaacggcaagcugaacagacugaucggcaagaccaacgagaaguuccaccagaucgagaaggaguucagcgagguggagggcagaauccaggaccuggagaaguacguggaggacaccaagaucgaccuguggagcuacaacgccgagcugcugguggcccuggagaaccagcacaccaucgaccugaccgacagcgagaugaacaagcuguucgagaagaccaagaagcagcugagagagaacgccgaggacaugggcaacggcugcuucaagaucuaccacaagugcgacaacgccugcaucggcagcaucagaaacggcaccuacgaccacgacguguacagagacgaggcccugaacaacagauuccagaucaagggcguggagcugaagagcggcuacaaggacuggauccuguggaucagcuucgccaucagcugcuuccugcugugcguggcccugcugggcuucaucaugugggccugccagaagggcaacaucagaugcaacaucugcaucuga

SEQ ID NO: 168415 - RNA, 1701 nt, Artificial Sequence
  derived and/or modified CDS sequence (opt4) from hemagglutinin__InfluenzaA__AFD98172
augaagaccaucaucgcccugagcuacauccugugccugguguucgcccagaagcugcccggcaacgacaacagcaccgccacccugugccugggccaccacgccgugcccaacggcaccaucgugaagaccaucaccaacgaccagaucgaggugaccaacgccaccgagcuggugcagagcagcagcgccggcgagaucugcgacagcccccaccacauccuggacggcgagaacugcacccugaucgacgcccugcugggcgacccccagugcgacggcuuccagaacaagaagugggaccuguucguggagagaagcagagccuacagcaacugcuaccccuacgacgugcccgacuacgccagccugagaagccugguggccagcagcggcacccuggaguucaacaacgagagcuucaacuggaccggcgugacccagaacggcaccagcagcgccugcaucagaagaagcaacaacagcuucuucagcagacugaacuggcugacccaccugaacuucaaguaccccgcccugaacgugaccaugcccaacaacgagcaguucgacaagcuguacaucuggggcgugcaccaccccggcaccgacaaggaccagaucuuccuguacgcccaggccagcggcagaaucaccgugagcaccaagagaagccagcaggccgugauccccaacaucggcagcagacccagagugagaaacauccccagcagaaucagcaucuacuggaccaucgugaagcccggcgacauccugcugaucaacagcaccggcaaccugaucgcccccagaggcuacuucaagaucagaagcggcaagagcagcaucaugagaagcgacgcccccaucggcaagugcaacagcgagugcaucacccccaacggcagcauccccaacgacaagcccuuccagaacgugaacagaaucaccuacggcgccugccccagauacgugaagcagagcacccugaagcuggccaccggcaugagaaacgugcccgagaagcagaccagaggcaucuucggcgccaucgccggcuucaucgagaacggcugggagggcaugauggacggcugguacggcuucagacaccagaacagcgagggcagaggccaggccgccgaccugaagagcacccaggccgccaucgaccagaucaacggcaagcugaacagacugaucggcaagaccaacgagaaguuccaccagaucgagaaggaguucagcgagguggagggcagaauccaggaccuggagaaguacguggaggacaccaagaucgaccuguggagcuacaacgccgagcugcugguggcccuggagaaccagcacaccaucgaccugaccgacagcgagaugaacaagcuguucgagaagaccaagaagcagcugagagagaacgccgaggacaugggcaacggcugcuucaagaucuaccacaagugcgacaacgccugcaucggcagcaucagaaacggcaccuacgaccacgacguguacagagacgaggcccugaacaacagauuccagaucaagggcguggagcugaagagcggcuacaaggacugggugcuguggaucagcuucgccaucagcugcuuccugcugugcguggcccugcugggcuucaucaugugggccugccagaagggcaacaucagaugcaacaucugcaucuga

SEQ ID NO: 168416 - RNA, 1701 nt, Artificial Sequence
  derived and/or modified CDS sequence (opt4) from hemagglutinin__InfluenzaA__AFD98183
augaagaccaucaucgcccugagcuacauccugugccugguguucgcccagaagcugcccggcaacgacaacagcaccgccacccugugccugggccaccacgccgugcccaacggcaccaucgugaagaccaucaccaacgaccagaucgaggugaccaacgccaccgagcuggugcagagcagcagcaccggcgagaucugcaacagcccccaccagauccuggacggcgagaacugcacccugaucgacgcccugcugggcgacccccagugcgacggcuuccagaacaagaagugggaccuguucguggagagaagcaaggcccacagcaacugcuaccccuacgacgugcccgacuacgccagccugagaagccugguggccagcagcggcacccuggaguucaacaacgagagcuucaacuggaccggcgugacccagaacggcaccagcagcgccugcaucagaagaagcaacaacagcuucuucagcagacugaacuggcugacccaccugaacuucaaguaccccgcccugaacgugaccaugcccaacaacgagcaguucgacaagcuguacaucuggggcgugcaccaccccggcaccgacaaggaccagaucuuccuguacgcccaggccagcggcagaaucaccgugagcaccaagagaagccagcaggccgugcugcccaacaucggcagcagacccagagugagaaacauccccagcagagugagcaucuacuggaccaucgugaagcccggcgacauccugcugaucaacagcaccggcaaccugaucgcccccagaggcuacuucaagaucagaagcggcaagagcagcaucaugagaagcgacgcccccaucggcaagugcaacagcaccugcaucacccccaacggcagcauccccaacgacaagcccuuccagaacgugaacagaaucaccuacggcgccugccccagauacgugaagcagaacacccugaagcuggccaccggcaugagaaacgugcccgagaagcagaccagaggcaucuucggcgccaucgccggcuucaucgagaacggcugggagggcaugguggacggcugguacggcuucagacaccagaacagcgagggcagaggccaggccgccgaccugaagagcacccaggccgccaucgaccagaucaacggcaagcugaacagacugaucggcaagaccaacgagaaguuccaccagaucgagaaggaguucagcgagguggagggcagaauccaggaccuggagaaguacguggaggacaccaagaucgaccuguggagcuacaacgccgagcugcugguggcccuggagaaccagcacaccaucgaccugaccgacagcgagaugaacaagcuguucgagaagaccaagaagcagcugagagagaacgccgaggacaugggcaacggcugcuucaagaucuaccacaagugcgacaacgccugcaucggcagcaucagaaacggcaccuacgaccacgacguguacagagacgaggcccugaacaacagauuccagaucaagggcguggagcugaagagcggcuacaaggacuggauccuguggaucagcuucgccaucagcugcuuccugcugugcguggcccugcugggcuucaucaugugggccugccagaagggcaacaucagaugcaacaucugcaucuga

SEQ ID NO: 168417 - RNA, 1701 nt, Artificial Sequence; identical to SEQ ID NO: 166915
  derived and/or modified CDS sequence (opt4) from hemagglutinin__InfluenzaA__AFD98194

SEQ ID NO: 168418 - RNA, 1701 nt, Artificial Sequence; identical to SEQ ID NO: 166969
  derived and/or modified CDS sequence (opt4) from hemagglutinin__InfluenzaA__AFD98205

SEQ ID NO: 168419 - RNA, 1701 nt, Artificial Sequence; identical to SEQ ID NO: 168411
  derived and/or modified CDS sequence (opt4) from hemagglutinin__InfluenzaA__AFD98215

SEQ ID NO: 168420 - RNA, 1701 nt, Artificial Sequence; identical to SEQ ID NO: 167042
  derived and/or modified CDS sequence (opt4) from hemagglutinin__InfluenzaA__AFD98226

SEQ ID NO: 168421 - RNA, 1701 nt, Artificial Sequence
  derived and/or modified CDS sequence (opt4) from hemagglutinin__InfluenzaA__AFD98237
augaagaccaucaucgcccugagcuacauccugugccuggugagcgcccagaagcugcccggcaacgacaacagcaccgccacccugugccugggccaccacgccgugcccaacggcaccaucgugaagaccaucaccaacgaccagaucgaggugaccaacgccaccgagcuggugcagagcagcagcaccggcgagaucugcaacagcccccaccagauccuggacggcgagaacugcacccugaucgacgcccugcugggcgacccccagugcgacggcuuccagaacaagaagugggaccuguucguggagagaagcaaggcccacagcaacugcuaccccuacgacgugcccgacuacgccagccugagaagccugguggccagcagcggcacccuggaguucaacaacgagagcuucaacuggaccggcgugacccagaacggcaccagcagcgccugcaucagaagaagcaacaacagcuucuucagcagacugaacuggcugacccaccugaacuucaaguaccccgcccugaacgugaccaugcccaacaacgagcaguucgacaagcuguacaucuggggcgugcaccaccccggcaccgacaaggaccagaucuuccuguacgcccaggccagcggcagaaucaccgugagcaccaagagaagccagcaggccgugauccccaacaucggcagcagacccagagugagaaacauccccagcagagugagcaucuacuggaccaucgugaagcccggcgacauccugcugaucaacagcaccggcaaccugaucgcccccagaggcuacuucaagaucagaagcggcaagagcagcaucaugagaagcgacgcccccaucggcaagugcaacagcgccugcaucacccccaacggcagcauccccaacgacaagcccuuccagaacgugaacagaaucaccuacggcgccugccccagauacgugaagcagaacacccugaagcuggccaccggcaugagaaacgugcccgagaagcagaccagaggcaucuucggcgccaucgccggcuucaucgagaacggcugggagggcaugguggacggcugguacggcuucagacaccagaacagcgagggcagaggccaggccgccgaccugaagagcacccaggccgccaucgaccagaucaacggcaagcugaacagacugaucggcaagaccaacgagaaguuccaccagaucgagaaggaguucagcgagguggagggcagaauccaggaccuggagaaguacguggaggacaccaagaucgaccuguggagcuacaacgccgagcugcugguggcccuggagaaccagcacaccaucgaccugaccgacagcgagaugaacaagcuguucgagaagaccaagaagcagcugagagagaacgccgaggacaugggcaacggcugcuucaagaucuaccacaagugcgacaacgccugcaucggcagcaucagaaacggcaccuacgaccacgacguguacagagacgaggcccugaacaacagauuccagaucaagggcguggagcugaagagcggcuacaaggacuggauccuguggaucagcuucgccaucagcugcuuccugcugugcguggcccugcugggcuucaucaugugggccugccagaagggcaacaucagaugcaacaucugcaucuga

SEQ ID NO: 168422 - RNA, 1701 nt, Artificial Sequence; identical to SEQ ID NO: 168414
  derived and/or modified CDS sequence (opt4) from hemagglutinin__InfluenzaA__AFD98248

SEQ ID NO: 168423 - RNA, 1701 nt, Artificial Sequence
  derived and/or modified CDS sequence (opt4) from hemagglutinin__InfluenzaA__AFD98259
augaagaccaucaucgcccugagcuacauccugugccugguguucgcccagaagcugcccggcaacgacaacagcaccgccacccugugccugggccaccacgccgugcccaacggcaccaucgugaagaccaucaccaacgaccagaucgaggugaccaacgccaccgagcuggugcagagcagcagcgccggcgagaucugcgacagcccccaccacauccuggacggcgagaacugcacccugaucgacgcccugcugggcgacccccagugcgacggcuuccagaacaagaagugggaccuguucguggagagaagcaaggccuacagcaacugcuaccccuacgacgugcaggacuacgccagccugagaagccugguggccagcagcggcacccuggaguucaacaacgagagcuucaacuggaccggcgugacccagaacggcaccagcagcgccugcaucagaagaagcaacaacagcuucuucagcagacugaacuggcugacccaccugaacuucaaguaccccgcccugaacgugaccaugcccaacaacgagcaguucgacaagcuguacaucuggggcgugcaccaccccggcaccgacaaggaccagaucuuccuguacgcccaggccagcggcagaaucaccgugagcaccaagagaagccagcaggccgugauccccaacaucggcagcagacccagagugagaaacauccccagcagaaucagcaucuacuggaccaucgugaagcccggcgacauccugcugaucaacagcaccggcaaccugaucgcccccagaggcuacuucaagaucagaagcggcaagagcagcaucaugagaagcgacgcccccaucggcaagugcaacagcgagugcaucacccccaacggcagcauccccaacgacaagcccuuccagaacgugaacagaaucaccuacggcgccugccccagauacgugaagcagagcacccugaagcuggccaccggcaugagaaacgugcccgagaagcagaccagaggcaucuucggcgccaucgccggcuucaucgagaacggcugggagggcaugauggacggcugguacggcuucagacaccagaacagcgagggcagaggccaggccgccgaccugaagagcacccaggccgccaucgaccagaucaacggcaagcugaacagacugaucggcaagaccaacgagaaguuccaccagaucgagaaggaguucagcgagguggagggcagaauccaggaccuggagaaguacguggaggacaccaagaucgaccuguggagcuacaacgccgagcugcugguggcccuggagaaccagcacaccaucgaccugaccgacagcgagaugaacaagcuguucgagaagaccaagaagcagcugagagagaacgccgaggacaugggcaacggcugcuucaagaucuaccacaagugcgacaacgccugcaucggcagcaucagaaacggcaccuacgaccacgacguguacagagacgaggcccugaacaacagauuccagaucaagggcguggagcugaagagcggcuacaaggacuggauccuguggaucagcuucgccaucagcugcuuccugcugugcguggcccugcugggcuucaucaugugggccugccagaagggcaacaucagaugcaacaucugcaucuga

SEQ ID NO: 168424 - RNA, 1701 nt, Artificial Sequence
  derived and/or modified CDS sequence (opt4) from hemagglutinin__InfluenzaA__AFD98270
augaaggccauccugguggugcugcuguacaccuucgugaccgccaacgccgacacccugugcaucggcuaccacgccaacaacagcaccgacaccguggacaccgugcuggagaagaacgugaccgugacccacagcgugaaccugcuggaggacaagcacaacggcaagcugugcaagcugagaggcgugaccccccugcaccugggcaagugcaacaucgccggcuggauccugggcaaccccgagugcgagagccugagcaccgccagcagcuggagcuacaucguggagaccagcagcagcgacaacggcaccugcuaccccggcgacuucaucaacuacgaggagcugagagagcagcugagcagcgugagcagcuucgagagauucgagaucuuccccaacaccagcagcuggcccaaccacgacagcaacaagggcgugaccgccgccugcccccacgccggcgccaagagcuucuacaagaaccugaucuggcuggugaagaagggcaacagcuaccccaagcugagcaagagcuacaucaacgacaagggcaaggaggugcuggugcuguggggcauccaccaccccagcaccaccgccgaccagcagagccuguaccagaacgccgacgccuacguguucgugggcaccagcagauacagcaagaaguucaagcccgagaucgccaucagacccaaggugagagaccaggagggcagaaugaacuacuacuggacccugguggagcccggcgacaagaucaccuucgaggccaccggcaaccugguggugcccagauacgccuucgccauggagagaaacgccggcagcggcaucaucaucagcgacacccccgugcacgacugcaacaccaccugccagacccccaagggcgccaucaacaccagccugcccuuccagaacauccaccccaucaccaucggcaagugccccaaguacgugaagagcaccaagcugagacuggccaccggccugagaaacgugcccagcauccagagcagaggccuguucggcgccaucgccggcuucaucgagggcggcuggaccggcaugguggacggcugguacggcuaccaccaccagaacgagcagggcagcggcuacgccgccgaccugaagagcacccagaacgccaucgacaagaucaccaacaaggugaacagcgugaucgagaagaugaacacccaguucaccgccgugggcaaggaguucaaccaccuggagaagagaaucgagaaccugaacaagaagguggacgacggcuuccuggacaucuggaccuacaacgccgagcugcuggugcugcuggagaacgagagaacccuggacuaccacgacagcaacgugaagaaccuguacgagaaggugagaaaccagcugaagaacaacgccaaggagaucggcaacggcugcuucgaguucuaccacaagugcgacaacaccugcauggagagcgugaagaacggcaccuacgacuaccccaaguacagcgaggaggccaagcugaacagagaggagaucgacggcgugaagcuggagagcaccagaaucuaccagauccuggccaucuacagcaccguggccagcagccuggugcugguggugagccugggcgccaucagcuucuggaugugcagcaacggcagccugcagugcagaaucugcaucuga

SEQ ID NO: 168425 - RNA, 1701 nt, Artificial Sequence
  derived and/or modified CDS sequence (opt4) from hemagglutinin__InfluenzaA__AFD98280
augaaggccauccugguggugcugcuguacaccuucgccaccgccaacgccgacacccugugcaucggcuaccacgccaacaacagcaccgacaccguggacaccgugcuggagaagaacgugaccgugacccacagcgugaaccugcuggaggacaagcacaacggcaagcugugcaagcugagaggcguggccccccugcaccugggcaagugcaacaucgccggcuggauccugggcaaccccgagugcgacagccugagcaccgccagaagcuggagcuacaucguggagaccagcagcagcgacaacggcaccugcuaccccggcgacuucaucgacuacgaggagcugagagagcagcugagcagcgugagcagcuucgagagauucgagaucuuccccaagaccagcagcuggcccaaccacgacagcaacaagggcgugaccgccgccugcccccacgccggcgccaagggcuucuacaagaaccugaucuggcuggugaagaagggcaacagcuaccccaagcugagcaagagcuacaucaacgacaagggcaaggaggugcuggugcuguggggcauccaccaccccagcaccaccgccgaccagcagagccuguaccagaacgccgacaccuacguguucgugggcaccagcagauacagcaagaaguucaagcccgagaucgccaucagacccaaggugagagaccaggagggcagaaugaacuacuacuggacccugguggagcccggcgacaagaucaccuucgaggccaccggcaaccugguggugcccagauacgccuucgccauggagagaaacgccggcagcggcaucaucaucagcgacacccccgugcacgacugcaacaccaccugccagacccccaagggcgccaucaacaccagccugcccuuccagaacauccaccccaucaccaucggcaagugccccaaguacgugaagagcaccaagcugagacuggccaccggccugagaaacgugcccagcauccagagcagaggccuguucggcgccaucgccggcuucaucgagggcggcuggaccggcaugguggacggcugguacggcuaccaccaccagaacgagcagggcagcggcuacgccgccgaccugaagagcacccagaacgccaucgacaagaucaccaacaaggugaacagcgugaucgagaagaugaacacccaguucaccgccgugggcaaggaguucaaccaccuggagaagagaaucgagaaccugaacaagaagguggacgacggcuuccuggacaucuggaccuacaacgccgagcugcuggugcugcuggagaacgagagaacccuggacuaccacgacagcaacgugaagaaccuguacgagaaggugagaaaccagcugaagaacaacgccaaggagaucggcaacggcugcuucgaguucuaccacaagugcgacaacaccugcauggagagcgugaagaacggcaccuacgacuaccccaaguacagcgaggaggccaagcugaacagagaggagaucgacggcgugaagcuggagagcaccagaaucuaccagauccuggccaucuacagcaccguggccagcagccuggugcugguggugagccugggcgccaucagcuucuggaugugcagcaacggcagccugcagugcagaaucugcaucuga

SEQ ID NO: 168426 - RNA, 1701 nt, Artificial Sequence; identical to SEQ ID NO: 168403
  derived and/or modified CDS sequence (opt4) from hemagglutinin__InfluenzaA__AFD98290

SEQ ID NO: 168427 - RNA, 1701 nt, Artificial Sequence; identical to SEQ ID NO: 167146
  derived and/or modified CDS sequence (opt4) from hemagglutinin__InfluenzaA__AFD98310

SEQ ID NO: 168428 - RNA, 1701 nt, Artificial Sequence; identical to SEQ ID NO: 166514
  derived and/or modified CDS sequence (opt4) from hemagglutinin__InfluenzaA__AFD98320

SEQ ID NO: 168429 - RNA, 1701 nt, Artificial Sequence; identical to SEQ ID NO: 168414
  derived and/or modified CDS sequence (opt4) from hemagglutinin__InfluenzaA__AFD98340

SEQ ID NO: 168430 - RNA, 1701 nt, Artificial Sequence
  derived and/or modified CDS sequence (opt4) from hemagglutinin__InfluenzaA__AFD98351
augaagaccaucaucgcccugagcuacauccugugccugguguucgcccagaagcugcccggcaacgacaacagcaccgccacccugugccugggccaccacgccgugcccaacggcaccaucgugaagaccaucaccaacgaccagaucgaggugaccaacgccaccgagcuggugcagagcagcagcgccggcgagaucugcgacagcccccaccacauccuggacggcgagaacugcacccugaucgacgcccugcugggcgacccccagugcgacggcuuccagaacaagaagugggaccuguucguggagagaagcagagccuacagcaacugcuaccccuacgacgugcccgacuacgccagccugagaagccugguggccagcagcggcacccuggaguucaacaacgagagcuucaacuggaccggcgugacccagaacggcaccagcagcgccugcaucagaagaagcaacaacagcuucuucagcagacugaacuggcugacccaccugaacuucaaguaccccgcccugaacgugaccaugcccaacaacgagcaguucgacaagcuguacaucuggggcgugcaccaccccggcaccgacaaggaccagaucuuccuguacgcccaggccagcggcagaaucaccgugagcaccaagagaagccagcaggccgugauccccaacaucggcagcagacccagagugagaaacauccccagcagaaucagcaucuacuggaccaucgugaagcccggcgacauccugcugaucaacagcaccggcaaccugaucgcccccagaggcuacuucaagaucagaagcggcaagagcagcaucaugagaagcgacgcccccaucggcaagugcaacagcgagugcaucacccccaacggcagcauccccaacgacaagcccuuccagaacgugaacagaaucaccuacggcgccugccccagauacgugaagcagagcacccugaagcuggccaccggcaugagaaacgugcccgagaagcagaccagaggcaucuucggcgccaucgccggcuucaucgagaacggcugggagggcaugauggacggcugguacggcuucagacaccagaacagcgagggcagaggccaggccgccgaccugaagagcacccaggccgccaucgaccagaucaacggcaagcugaacagacugaucggcaagaccaacgagaaguuccaccagaucgagaaggaguucagcgagguggagggcagaauccaggaccuggagaaguacguggaggacaccaagaucgaccuguggagcuacaacgccgagcugcugguggcccuggagaaccagcacaccaucgaccugaccgacagcgagaugaacaagcuguucgagaagaccaagaagcagcugagagagaacgccgaggacaugggcaacggcugcuucaagaucuaccacaagugcgacaacgccugcaucggcaccaucagaaacggcaccuacgaccacgacguguacagagacgaggcccugaacaacagauuccagaucaagggcguggagcugaagagcggcuacaaggacuggauccuguggaucagcuucgccaucagcugcuuccugcugugcguggcccugcugggcuucaucaugugggccugccagaagggcaacaucagaugcaacaucugcaucuga

SEQ ID NO: 168431 - RNA, 1701 nt, Artificial Sequence
  derived and/or modified CDS sequence (opt4) from hemagglutinin__InfluenzaA__AFD98362
augaagaccaucaucgcccugagcuacauccugugccugguguucgcccagaagcugcccggcaacgacaacagcauggccacccugugccugggccaccacgccgugcccaacggcaccaucgugaagaccaucaccaacgaccagaucgaggugaccaacgccaccgagcuggugcagaacagcagcaccggcgagaucugcgacagcccccaccagauccuggacggcgagaacugcacccugaucgacgcccugcugggcgacccccagugcgacggcuuccagaacaagaagugggaccuguucguggagagaagcaaggccuacagcaacugcuaccccuacgacgugcccgacuacgccagccugagaagccugguggccagcagcggcacccuggaguucaacaacgagagcuucaacuggaccggcgugacccagaacggcaccagcagcgccugcaucagaagaagcaacaacagcuucuucagcagacugaacuggcugacccaccugaacuucaaguaccccgcccugaacgugaccaugcccaacaacgagcaguucgacaagcuguacaucuggggcgugcaccaccccggcaccgacaaggaccagaucuuccuguacgcccaggccagcggcagaaucaccgugagcaccaagagaggccagcaggccgugauccccaacaucggcagcagacccagagugagaaacauccccagcagaaucagcaucuacuggaccaucgugaagcccggcgacauccugcugaucaacagcaccggcaaccugaucgcccccagaggcuacuucaagaucagaagcggcaagagcagcaucaugagaagcgacgcccccaucggcaagugcaacagcgagugcaucacccccaacggcagcauccccaacgacaagcccuuccagaacgugaacagaaucaccuacggcgccugccccagauacgugaagcagaacacccugaagcuggccaccggcaugagaaacgugcccgagaagcagaccagaggcaucuucggcgccaucgccggcuucaucgagaacggcugggagggcaugguggacggcugguacggcuucagacaccagaacagcgagggcagaggccaggccgccgaccugaagagcacccaggccgccaucgaccagaucaacggcaagcugaacagacuggugggcaagaccaacgagaaguuccaccagaucgagaaggaguucagcgagguggagggcagaauccaggaccuggagaaguacguggaggacaccaagaucgaccuguggagcuacaacgccgagcugcugguggcccuggagaaccagcacaccaucgaccugaccgacagcgagaugaacaagcuguucgagaagaccaagaagcagcugagagagaacgccgaggacaugggcaacggcugcuucaagaucuaccacaagugcgacaacgccugcaucggcagcaucagaaacggcaccuacgaccacgacguguacagagacgaggcccugaacaacagauuccagaucaagggcguggagcugaagagcggcuacaaggacuggauccuguggaucagcuucgccaucagcugcuuccugcugugcguggcccugcugggcuucaucaugugggccugccagaagggcaacaucagaugcaacaucugcaucuga

SEQ ID NO: 168432 - RNA, 1701 nt, Artificial Sequence; identical to SEQ ID NO: 168411
  derived and/or modified CDS sequence (opt4) from hemagglutinin__InfluenzaA__AFD98373

SEQ ID NO: 168433 - RNA, 1701 nt, Artificial Sequence; identical to SEQ ID NO: 167042
  derived and/or modified CDS sequence (opt4) from hemagglutinin__InfluenzaA__AFD98384

SEQ ID NO: 168434 - RNA, 1701 nt, Artificial Sequence
  derived and/or modified CDS sequence (opt4) from hemagglutinin__InfluenzaA__AFD98395
augaagaccaucaucgcccugagcuacauccugugccugguguucgcccagaagcugcccggcgacgacaacagcaccgccacccugugccugggccaccacgccgugcccaacggcaccaucgugaagaccaucaccaacgaccagaucgaggugaccaacgccaccgagcuggugcagaacagcagcgccggcgagaucugcgacagcccccaccacauccuggacggcgagaacugcacccugaucgacgcccugcugggcgacccccagugcgacggcuuccagaacaagaagugggaccuguucguggagagaagcagagccuacagcaacugcuaccccuacgacgugcccgacuacgccagccugagaagccugguggccagcagcggcacccuggaguucaacaacgagagcuucaacuggaccggcgugacccagaacggcaccagcagcgccugcaucagaagaagcaacaacagcuucuucagcagacugaacuggcugacccaccugaacuucaaguaccccgcccugaacgugaccaugcccaacaacgagcaguucgacaagcuguacaucuggggcgugcaccaccccggcaccgacaaggaccagaucuuccuguacgcccaggccagcggcagaaucaccgugagcaccaagagaagccagcaggccgugauccccaacaucggcagcagacccagagugagaaacauccccagcagaaucagcaucuacuggaccaucgugaagcccggcgacauccugcugaucaacagcaccggcaaccugaucgcccccagaggcuacuucaagaucagaagcggcaagagcagcaucaugagaagcgacgcccccaucggcaagugcaacagcgagugcaucacccccaacggcagcauccccaacgacaagcccuuccagaacgugaacagaaucaccuacggcgccugccccagauacgugaagcagagcacccugaagcuggccaccggcaugagaaacgugcccgagaagcagaccagaggcaucuucggcgccaucgccggcuucaucgagaacggcugggagggcaugauggacggcugguacggcuucagacaccagaacagcgagggcagaggccaggccgccgaccugaagagcacccaggccgccaucgaccagaucaacggcaagcugaacagacugaucggcaagaccaacgagaaguuccaccagaucgagaaggaguucagcgagguggagggcagaauccaggaccuggagaaguacguggaggacaccaagaucgaccuguggagcuacaacgccgagcugcugguggcccuggagaaccagcacaccaucgaccugaccgacagcgagaugaacaagcuguucgagaagaccaagaagcagcugagagagaacgccgaggacaugggcaacggcugcuucaagaucuaccacaagugcgacaacgccugcaucggcagcaucagaaacggcaccuacgaccacgacguguacagagacgaggcccugaacaacagauuccagaucaagggcguggagcugaagagcggcuacaaggacuggauccuguggaucagcuucgccaucagcugcuuccugcugugcguggcccugcugggcuucaucaugugggccugccagaagggcaacaucagaugcaacaucugcaucuga

SEQ ID NO: 168435 - RNA, 1701 nt, Artificial Sequence; identical to SEQ ID NO: 168411
  derived and/or modified CDS sequence (opt4) from hemagglutinin__InfluenzaA__AFD98406

SEQ ID NO: 168436 - RNA, 1701 nt, Artificial Sequence; identical to SEQ ID NO: 168414
  derived and/or modified CDS sequence (opt4) from hemagglutinin__InfluenzaA__AFD98417

SEQ ID NO: 168437 - RNA, 1701 nt, Artificial Sequence
  derived and/or modified CDS sequence (opt4) from hemagglutinin__InfluenzaA__AFD98428
augaagaccaucaucgcccugagcuacauccugugccugguguucgcccagaagcugcccggcaacgacaacagcaccgccacccugugccugggccaccacgccgugcccaacggcaccaucgugaagaccaucaccaacgaccagaucgaggugaccaacgccaccgagcuggugcagagcagcagcaccggcgagaucugcaacagcccccaccagauccuggacggcgagaacugcacccugaucgacgcccugcugggcgacccccagugcgacggcuuccagaacaagaagugggaccuguucguggagagaagcaaggcccacagcaacugcuaccccuacgacgugcccgacuacgccagccugagaagccugguggccagcagcggcacccuggaguucaacaacgagagcuucaacuggaccggcgugacccagaacggcaccagcagcgccugcaucagaagaagcaacaacagcuucuucagcagacugaacuggcugacccaccugaacuucaaguaccccgcccugaacgugaccaugcccaacaacgagcaguucgacaagcuguacaucuggggcgugcaccaccccggcaccgacaaggaccagaccuuccuguacgcccaggccagcggcagaaucaccgugagcaccaagagaagccagcaggccgugauccccaacaucggcagcagacccagagugagaaacauccccagcagagugagcaucuacuggaccaucgugaagcccggcgacauccugcugaucaacagcaccggcaaccugaucgcccccagaggcuacuucaagaucagaagcggcaagagcagcaucaugagaagcgacgcccccaucggcaagugcaacagcgccugcaucacccccaacggcagcauccccaacgacaagcccuuccagaacgugaacagaaucaccuacggcgccugccccagauacgugaagcagaacacccugaagcuggccaccggcaugagaaacgugcccgagaagcagaccagaggcaucuucggcgccaucgccggcuucaucgagaacggcugggagggcaugguggacggcugguacggcuucagacaccagaacagcgagggcagaggccaggccgccgaccugaagagcacccaggccgccaucgaccagaucaacggcaagcugaacagacugaucggcaagaccaacgagaaguuccaccagaucgagaaggaguucagcgagguggagggcagaauccaggaccuggagaaguacguggaggacaccaagaucgaccuguggagcuacaacgccgagcugcugguggcccuggagaaccagcacaccaucgaccugaccgacagcgagaugaacaagcuguucgagaagaccaagaagcagcugagagagaacgccgaggacaugggcaacggcugcuucaagaucuaccacaagugcgacaacgccugcaucggcagcaucagaaacggcaccuacgaccacgacguguacagagacgaggcccugaacaacagauuccagaucaagggcguggagcugaagagcggcuacaaggacuggauccuguggaucagcuucaccaucagcugcuuccugcugugcguggcccugcugggcuucaucaugugggccugccagaagggcaacaucagaugcaacaucugcaucuga

SEQ ID NO: 168438 - RNA, 1701 nt, Artificial Sequence; identical to SEQ ID NO: 166927
  derived and/or modified CDS sequence (opt4) from hemagglutinin__InfluenzaA__AFD98439

SEQ ID NO: 168439 - RNA, 1701 nt, Artificial Sequence
  derived and/or modified CDS sequence (opt4) from hemagglutinin__InfluenzaA__AFD98449
augaagaccaucaucgcccugagcuacauccugugccugguguucgcccagaagcugcccggcaacgacaacagcaccgccacccugugccugggccaccacgccgugcccaacggcaccaucgugaagaccaucaccaacgaccagaucgaggugaccaacgccaccgagcuggugcagagcagcagcaccggcgagaucugcgacagcccccaccagauccuggacggcaagaacugcacccugaucgacgcccugcugggcgacccccagugcgacggcuuccagaacaagaagugggaccuguucguggagagaagcaaggccuacagcaacugcuaccccuacgacgugcccgacuacgccagccugagaagccugguggccagcagcggcacccuggaguucaacaacgagaacuucaacuggaccggcgugacccagaacggcaccagcagcgccugcaucagaagaagcaagaacagcuucuucagcagacugaacuggcugacccaccugaacuucaaguuccccgcccugaacgugaccaugcccaacaacgagcaguucgacaagcuguacaucuggggcgugcaccaccccggcaccgacaaggaccagaucuuccuguacgcccaggccagcggcagaaucaccgugagcaccaagagaagccagcagaccgccauccccaacaucggcagcagacccagagugagaaacauccccagcagaaucagcaucuacuggaccaucgugaagcccggcgacauccugcugaucaacagcaccggcaaccugaucgcccccagaggcuacuucaagaucagaagcggcaagagcagcaucaugagaagcgacgcccccaucggcaagugcaacagcgagugcaucacccccaacggcagcauccccaacgacaagcccuuccagaacgugaacagaaucaccuacggcgccugccccagauacgugaagcagaacacccugaagcuggccaccggcaugagaaacgugcccgagaagcagaccagaggcaucuucggcgccaucgccggcuucaucgagaacggcugggagggcaugguggacggcugguacggcuucagacaccagaacagcgagggcagaggccaggccgccgaccugaagagcacccaggccgccaucgaccagaucaacggcaagcugaacagacugaucggcaagaccaacgagaaguuccaccagaucgagaaggaguucagcgagguggagggcagaauccaggaccuggagaaguacguggaggacaccaagaucgaccuguggagcuacaacgccgagcugcugguggcccuggagaaccagcacaccaucgaccugaccgacagcgagaugaacaagcuguucgagaagaccaagaagcagcugagagagaacgccgaggacaugggcaacggcugcuucaagaucuaccacaagugcgacaacgccugcaucggcagcaucagaaacggcaccuacaaccacgacguguacagagacgaggcccugaacaacagauuccagaucaagggcguggagcugaagagcggcuacaaggacuggauccuguggaucagcuucgccaucagcugcuuccugcugugcguggcccugcugggcuucaucaugugggccugccagaagggcaacaucagaugcaacaucugcaucuga

SEQ ID NO: 168440 - RNA, 1701 nt, Artificial Sequence
  derived and/or modified CDS sequence (opt4) from hemagglutinin__InfluenzaA__AFD98460
augaagaccaucaucgcccugagcuacauccugugccugguguucgcccagaagcugcccggcaacgacaacagcaccgccacccugugccugggccaccacgccgugcccaacggcaccaucgugaagaccaucaccaacgaccagaucgaggugaccaacgccaccgagcuggugcagagcagcagcgccggcgagaucugcgacagcccccaccacauccuggacggcgagaacugcacccugaucgacgcccugcugggcgacccccagugcgacggcuuccagaacaagaagugggaccuguucguggagagaagcagagccuacagcaacugcuaccccuacgacgugcccgacuacgccagccugagaagccugguggccagcagcggcacccuggaguucaacaacgagagcuucaacuggaccggcgugacccagaacggcaccagcagcgccugcaucagaagaagcaacaacagcuucuucagcaagcugaacuggcugacccaccugaacuucaaguaccccgcccugaacgugaccaugcccaacaacgagcaguucgacaagcuguacaucuggggcgugcaccaccccggcaccgacaaggaccagaucuuccuguacgcccaggccagcggcagaaucaccgugagcaccaagagaagccagcaggccgugauccccaacaucggcagcagacccagagugagaaacauccccagcagaaucagcaucuacuggaccaucgugaagcccggcgacauccugcugaucaacagcaccggcaaccugaucgcccccagaggcuacuucaagaucagaagcggcaagagcagcaucaugagaagcgacgcccccaucggcaagugcaacagcgagugcaucacccccaacggcagcauccccaacgacaagcccuuccagaacgugaacagaaucaccuacggcgccugccccagauacgugaagcagagcacccugaagcuggccaccggcaugagaaacgugcccgagaagcagaccagaggcaucuucggcgccaucgccggcuucaucgagaacggcugggagggcaugauggacggcugguacggcuucagacaccagaacagcgagggcagaggccaggccgccgaccugaagagcacccaggccgccaucgaccagaucaacggcaagcugaacagacugaucggcaagaccaacgagaaguuccaccagaucgagaaggaguucagcgagguggagggcagaauccaggaccuggagaaguacguggaggacaccaagaucgaccuguggagcuacaacgccgagcugcugguggcccuggagaaccagcacaccaucgaccugaccgacagcgagaugaacaagcuguucgagaagaccaagaagcagcugagagagaacgccgaggacaugggcaacggcugcuucaagaucuaccacaagugcgacaacgccugcaucggcagcaucagaaacggcaccuacgaccacgacguguacagagacgaggcccugagcaacagauuccagaucaagggcguggagcugaagagcggcuacaaggacuggauccuguggaucagcuucgccaucagcugcuuccugcugugcguggcccugcugggcuucaucaugugggccugccagaagggcaacaucagaugcaacaucugcaucuga

SEQ ID NO: 168441 - RNA, 1701 nt, Artificial Sequence; identical to SEQ ID NO: 166927
  derived and/or modified CDS sequence (opt4) from hemagglutinin__InfluenzaA__AFD98471

SEQ ID NO: 168442 - RNA, 1701 nt, Artificial Sequence
  derived and/or modified CDS sequence (opt4) from hemagglutinin__InfluenzaA__AFD98481
augaagaccaucaucgcccugagcuacauccugugccugguguucgcccagaagcugcccggcaacgacaacagcaccgccacccugugccugggccaccacgccgugcccaacggcaccaucgugaagaccaucaccaacgaccagaucgaggugaccaacgccaccgagcuggugcagaacagcagcaccggcgagaucugcaacagcccccaccagauccuggacggcgagaacugcacccugaucgacgcccugcugggcgacccccagugcgacggcuuccagaacaagaagugggaccuguucguggagagaagcaaggcccacagcaacugcuaccccuacgacgugcccgacuacgccagccugagaagccugguggccagcagcggcacccuggaguucaacaacgagagcuucaacuggaccggcgugacccagaacggcaccagcagcgccugcaucagaagaagcaacaacagcuucuucagcagacugaacuggcugacccaccugaacuucaaguaccccgcccugaacgugaccaugcccaacaacgagcaguucgacaagcuguacaucuggggcgugcaccaccccggcaccgacaaggaccagaucuuccuguacgcccaggccgccggcagaaucaccgugagcaccaagagaagccagcaggccgugauccccaacaucggcagcagacccagagugagaaacauccccagcagagugagcaucuacuggaccaucgugaagcccggcgacauccugcugaucaacagcaccggcaaccugaucgcccccagaggcuacuucaagaucagaagcggcaagagcagcgugaugagaagcgacgcccccaucggcaagugcaacagcgccugcaucacccccaacggcagcauccccaacgacaagcccuuccagaacgugaacagaaucaccuacggcgccugccccagauacgugaagcagaacacccugaagcuggccaccggcaugagaaacgugcccgagaagcagaccagaggcaucuucggcgccaucgccggcuucaucgagaacggcugggagggcaugguggacggcugguacggcuucagacaccagaacagcgagggcagaggccaggccgccgaccugaagagcacccaggccgccaucgaccagaucaacggcaagcugaacagacugaucggcaagaccaacgagaaguuccaccagaucgagaaggaguucagcgagguggagggcagaauccaggaccuggagaaguacguggaggacaccaagaucgaccuguggagcuacaacgccgagcugcugguggcccuggagaaccagcacaccaucgaccugaccgacagcgagaugaacaagcuguucgagaagaccaagaagcagcugagagagaacgccgaggacaugggcaacggcugcuucaagaucuaccacaagugcgacaacgccugcaucggcagcaucagaaacggcaccuacgaccacgacguguacagagacgaggcccugaacaacagauuccagaucaagggcguggagcugaagagcggcuacaaggacuggauccuguggaucagcuucgccaucagcugcuuccugcugugcguggcccugcugggcuucaucaugugggccugccagaagggcaacaucagaugcaacaucugcaucuga

SEQ ID NO: 168443 - RNA, 1701 nt, Artificial Sequence; identical to SEQ ID NO: 167042
  derived and/or modified CDS sequence (opt4) from hemagglutinin__InfluenzaA__AFD98492

SEQ ID NO: 168444 - RNA, 1701 nt, Artificial Sequence
  derived and/or modified CDS sequence (opt4) from hemagglutinin__InfluenzaA__AFD98503
augaagaccaucaucgcccugagcuacauccugugccugguguucgcccagaagcugcccggcaacgacaacagcaccgccacccugugccugggccaccacgccgugcccaacggcaccaucgugaagaccaucaccaacgaccagaucgaggugaccaacgccaccgagcuggugcagagcagcagcgccggcgagaucugcgacagcccccaccacauccuggacggcgagaacugcacccugaucgacgcccugcugggcgacccccagugcgacggcuuccagaacaagaagugggaccuguucguggagagaagcagagccuacagcaacugcuaccccuacgacgugcccgacuacgccagccugagaagccugguggccagcagcggcacccuggaguucaacaacgagagcuucaacuggaccggcgugacccagaacggcaccagcagcgccugcaucagaagaagcaacaacagcuucuucagcagacugaacuggcugacccaccugaacuucaaguaccccgcccugaacgugaccaugcccaacaacgagcaguucgacaagcuguacaucuggggcgugcaccaccccggcaccgacaaggaccagaucuuccuguacgcccaggccagcggcagaaucaccgugagcaccaagagaagccagcaggccgugauccccaacaucggcagcagacccagagugagaaacauccccagcagaaucagcaucuacuggaccaucgugaagcccggcgacauccugcugaucaacagcaccggcaaccugaucgcccccagaggcuacuucaagaucagaagcggcaagagcagcaucaugagaagcgacgcccccaucggcaagugcaacagcgagugcaucacccccaacggcagcauccccaacgacaagcccuuccagaacgugaacagaaucaccuacggcgccugccccagauacgugaagcagagcacccugaagcuggccaccggcaugagaaacgugcccgagaagcagaccaagggcaucuucggcgccaucgccggcuucaucgagaacggcugggagggcaugauggacggcugguacggcuucagacaccagaacagcgagggcagaggccaggccgccgaccugaagagcacccaggccgccaucgaccagaucaacggcaagcugaacagacugaucggcaagaccaacgagaaguuccaccagaucgagaaggaguucagcgagguggagggcagaauccaggaccuggagaaguacguggaggacaccaagaucgaccuguggagcuacaacgccgagcugcugguggcccuggagaaccagcacaccaucgaccugaccgacagcgagaugaacaagcuguucgagaagaccaagaagcagcugagagagaacgccgaggacaugggcaacggcugcuucaagaucuaccacaagugcgacaacgccugcaucggcagcaucagaaacggcaccuacgaccacgacguguacagagacgaggcccugaacaacagauuccagaucaagggcguggagcugaagagcggcuacaaggacuggauccuguggaucagcuucgccaucagcugcuuccugcugugcguggcccugcugggcuucaucaugugggccugccagaagggcaacaucagaugcaacaucugcaucuga

SEQ ID NO: 168445 - RNA, 1701 nt, Artificial Sequence; identical to SEQ ID NO: 167042
  derived and/or modified CDS sequence (opt4) from hemagglutinin__InfluenzaA__AFD98514

SEQ ID NO: 168446 - RNA, 1701 nt, Artificial Sequence; identical to SEQ ID NO: 168394
  derived and/or modified CDS sequence (opt4) from hemagglutinin__InfluenzaA__AFD98525

SEQ ID NO: 168447 - RNA, 1701 nt, Artificial Sequence; identical to SEQ ID NO: 166915
  derived and/or modified CDS sequence (opt4) from hemagglutinin__InfluenzaA__AFD98558

SEQ ID NO: 168448 - RNA, 1701 nt, Artificial Sequence
  derived and/or modified CDS sequence (opt4) from hemagglutinin__InfluenzaA__AFD98569
augaagaccaucaucgcccugagcuacauccugugccugguguucgcccagaagcugcccggcaacgacaacagcaccgccacccugugccugggccaccacgccgugcccaacggcaccaucgugaagaccaucaccaacgaccagaucgaggugaccaacgccaccgagcuggugcagagcagcagcaccggcgagaucugcaacagcccccaccagauccuggacggcgagaacugcacccugaucgacgcccugcugggcgacccccagugcgacggcuuccagaacaagaagugggaccuguucguggagagaagcaaggcccacagcaacugcuaccccuacgacgugcccgacuacgccagccugagaagccugguggccagcagcggcacccuggaguucaacaacgagagcuucaacuggaccggcgugacccagaacggcaccagcagcgccugcaucagaagaagcaacaacagcuucuucagcagacugaacuggcugacccaccugaacuucaaguaccccgcccugaacgugaccaugcccaacaacgagcaguucgacaagcuguacaucuggggcgugcaccaccccggcaccgacaaggaccagaccuuccuguacgcccaggccagcggcagaaucaccgugagcaccaagagaagccagcaggccgugauccccaacaucggcagcagacccagagugagaaacauccccagcagagugagcaucuacuggaccaucgugaagcccggcgacauccugcugaucaacagcaccggcaaccugaucgcccccagaggcuacuucaagaucagaagcggcaagagcagcaucaugagaagcgacgcccccaucggcaagugcaacagcgccugcaucacccccaacggcagcauccccaacgacaagcccuuccagaacgugaacagaaucaccuacggcgccugccccagauacgugaagcagaacacccugaagcuggccaccggcaugagaaacgugcccgagaagcagaccagaggcaucuucggcgccaucgccggcuucaucgagaacggcugggagggcaugguggacggcugguacggcuucagacaccagaacagcgagggcagaggccaggccgccgaccugaagagcacccaggccgccaucgaccagaucaacggcaagcugaacagacugaucggcaagaccaacgagaaguuccaccagaucgagaaggaguucagcgagguggagggcagaauccaggaccuggagaaguacguggaggacaccaagaucgaccuguggagcuacaacgccgagcugcugguggcccuggagaaccagcacaccaucgaccugaccgacagcgagaugaacaagcuguucgagaagaccaagaagcagcugagagagaacgccgaggacaugggcaacggcugcuucaagaucuaccacgagugcgacaacgccugcaucggcagcaucagaaacggcaccuacgaccacgacguguacagagacgaggcccugaacaacagauuccagaucaagggcguggagcugaagagcggcuacaaggacuggauccuguggaucagcuucgccaucagcugcuuccugcugugcguggcccugcugggcuucaucaugugggccugccagaagggcaacaucagaugcaacaucugcaucuga

SEQ ID NO: 168449 - RNA, 1701 nt, Artificial Sequence; identical to SEQ ID NO: 166915
  derived and/or modified CDS sequence (opt4) from hemagglutinin__InfluenzaA__AFD98580

SEQ ID NO: 168450 - RNA, 1701 nt, Artificial Sequence
  derived and/or modified CDS sequence (opt4) from hemagglutinin__InfluenzaA__AFE02942
augaaggccauccugguggugcugcuguacaccuucgccaccgccaacgccgacacccugugcaucggcuaccacgccaacaacagcaccgacaccguggacacccugcuggagaagaacgugaccgugacccacagcgugaaccugcuggaggacaagcacaacggcaagcugugcaagcugagaggcguggccccccugcaccugggcaagugcaacaucgccggcuggauccugggcaaccccgagugcgagagccugagcaccgccagcagcuggagcuacaucguggagaccagcaacagcgacaacggcaccugcuaccccggcgacuucaucgacuacgaggagcugagagagcagcugagcagcgugagcagcuucgagagauucgagaucuuccccaagaccagcagcuggcccaaccacgacagcaacaagggcgugaccgccgccugcccccacgccggcgccaagagcuucuacaagaaccugaucuggcuggugaagaagggcaacagcuaccccaagcugagcaagagcuacaucaacgacaagggcaaggaggugcuggugcuguggggcauccaccaccccagcaccagcgccgaccagcagagccuguaccagaacgccgacgccuacguguucguguggaccagcagauacagcaagaaguucaagcccgagaucgccaucagacccaaggugagagaccaggagggcagaaugaacuacuacuggacccugguggagcccggcgacaagaucaccuucgaggccaccggcaaccugguggugcccagauacgccuucgccauggacagaaacgccggcagcggcaucaucaucagcgacacccccgugcacgacugcaacaccaccugccagacccccaagggcgccaucaacaccagccugcccuuccagaacauccaccccaucaccaucggcaagugccccaaguacgugaagagcaccaagcugagacuggccaccggccugagaaacgugcccagcauccagagcagaggccuguucggcgccaucgccggcuucaucgagggcggcuggaccggcaugguggacggcugguacggcuaccaccaccagaacgagcagggcagcggcuacgccgccgaccugaagagcacccagaacgccaucgacgagaucaccaacaaggugaacagcgugaucgagaagaugaacacccaguucaccgccgugggcaaggaguucaaccaccuggagaagagaaucgagaaccugaacaagaagguggacgacggcuuccuggacaucuggaccuacaacgccgagcugcuggugcugcuggagaacgagagaacccuggacuaccacgacagcaacgugaagaaccuguacgagaaggugagaagccagcugaagaacaacgccaaggagaucggcaacggcugcuucgaguucuaccacaagugcgacaacaccugcauggagagcgugaagaacggcaccuacgacuaccccaaguacagcgaggaggccaagcugaacagagaggagaucgacggcgugaagcuggagagcaccagaaucuaccagauccuggccaucuacagcaccguggccagcagccuggugcugguggugagccugggcgccaucagcuucuggaugugcagcaacggcagccugcagugcagaaucugcaucuga

SEQ ID NO: 168451 - RNA, 1701 nt, Artificial Sequence; identical to SEQ ID NO: 163893
  derived and/or modified CDS sequence (opt4) from hemagglutinin__InfluenzaA__AFE18688

SEQ ID NO: 168452 - RNA, 1701 nt, Artificial Sequence; identical to SEQ ID NO: 160710
  derived and/or modified CDS sequence (opt4) from hemagglutinin__InfluenzaA__AFE47624

SEQ ID NO: 168453 - RNA, 1701 nt, Artificial Sequence; identical to SEQ ID NO: 161460
  derived and/or modified CDS sequence (opt4) from hemagglutinin__InfluenzaA__AFE47635

SEQ ID NO: 168454 - RNA, 1701 nt, Artificial Sequence; identical to SEQ ID NO: 167042
  derived and/or modified CDS sequence (opt4) from hemagglutinin__InfluenzaA__AFF18506

SEQ ID NO: 168455 - RNA, 1701 nt, Artificial Sequence
  derived and/or modified CDS sequence (opt4) from hemagglutinin__InfluenzaA__AFF57124
augaaggccauccugguggugcugcuguacaccuucgccaccgccaacgccgacacccugugcaucggcuaccacgccaacaacagcaccgacaccguggacaccgugcuggagaagaacgugaccgugacccacagcgugaaccugcuggaggacaagcacaacggcaagcugugcaagcugagaggcguggccccccugcaccugggcaagugcaacaucgccggcuggauccugggcaaccccgagugcgagagccugagcaccgccagcagcuggagcuacaucguggagaccagcagcagcgacaacggcaccugcuaccccggcgacuucaucaacuacgaggagcugagagagcagcugagcagcgugagcagcuucgagagauucgagaucuuccccaagaccagcagcuggcccaaccacgacagcaacaagggcgugaccgccgccugcccccacgccggcgccaagagcuucuacaagaaccugaucuggcuggugaagaaggagaacagcuaccccaagcugagcaagagcuacaucaacgacaagggcaaggaggugcuggugcuguggggcauccaccaccccagcaccaccgccgaccagcagagacuguaccagaacgccgacgccuacguguucgugggcaccagcagauacagcaagaaguucaagcccgagaucgccaucagacccaaggugagagaccaggagggcagaaugaacuacuacuggacccugguggagcccggcgacaagaucaccuucgaggccaccggcaaccugguggugcccagauacgccuucgccauggagagaaacgccggcagcggcaucaucaucagcgacacccccgugcacgacugcaacaccaccugccagacccccaagggcgccaucaacaccagccugcccuuccagaacauccaccccaucaccaucggcaagugccccaaguacgugaagagcaccaagcugagacuggccaccggccugagaaacgugcccagcauccagagcagaggccuguucggcgccaucgccggcuucaucgagggcggcuggaccggcaugguggacggcugguacggcuaccaccaccagaacgagcagggcagcggcuacgccgccgaccugaagagcacccagaacgccaucgacaagaucaccaacaaggugaacagcgugaucgagaagaugaacacccaguucaccgccgugggcaaggaguucaaccaccuggagaagagaaucgagaaccugaacaagaagguggacgacggcuuccuggacaucuggaccuacaacgccgagcugcuggugcugcuggagaacgagagaacccuggacuaccacgacagcaacgugaagaaccuguacgagaaggugagaaaccagcugaagaacaacgccaaggagaucggcaacggcugcuucgaguucuaccacaagugcgacaacaccugcauggagagcgugaagaacggcaccuacgacuaccccaaguacagcgaggaggccaagcugaacagagaggagaucgacggcgugaagcuggagagcaccagaaucuaccagauccuggccaucuacagcaccguggccagcagccuggugcugguggugagccugggcgccaucagcuucuggaugugcagcaacggcagccugcagugcagaaucugcaucuga

SEQ ID NO: 168456 - RNA, 1701 nt, Artificial Sequence
  derived and/or modified CDS sequence (opt4) from hemagglutinin__InfluenzaA__AFF57128
augaaggccauccugguggugcugcuguacaccuucgccaccgccaacgccgacacccugugcaucggcuaccacgccaacaacagcaccgacaccguggacaccgugcuggagaagaacgugaccgugacccacagcgugaaccugcuggaggacaagcacaacggcaagcugugcaagcugagaggcguggccccccugcaccugggcaagugcaacaucgccggcuggauccugggcaaccccgagugcgagagccugagcaccgccagcagcuggagcuacaucguggagaccagcagcagcgacaacggcaccugcuaccccggcgacuucaucaacuacgaggagcugagagagcagcugagcagcgugagcagcuucgagagauucgagaucuuccccaagaccagcagcuggcccaaccacgacagcaacaagggcgugaccgccgccugcccccacgccggcgccaagagcuucuacaagaaccugaucuggcuggugaagaagggcaacagcuaccccaagcugagcaagagcuacaucaacgacaagggcaaggaggugcuggugcuguggggcauccaccaccccagcaccaccgccgaccagcagagcaucuaccagaacgccgacgccuacguguucgugggcaccagcagauacagcaagaaguucaagcccgagaucgccaucagacccaaggugagagaccaggagggcagaaugaacuacuacuggacccugguggagcccggcgacaagaucaccuucgaggccaccggcaaccugguggugcccagauacgccuucgccauggagagaaacgccggcagcggcaucaucaucagcgacacccccgugcacgacugcaacaccaccugccagacccccaagggcgccaucaacaccagccugcccuuccagaacauccaccccaucaccaucggcaagugccccaaguacgugaagagcaccaagcugagacuggccaccggccugagaaacgugcccagcauccagagcagaggccuguucggcgccaucgccggcuucaucgagggcggcuggaccggcaugguggacggcugguacggcuaccaccaccagaacgagcagggcagcggcuacgccgccgaccugaagagcacccagaacgccaucgacaagaucaccaacaaggugaacagcgugaucgagaagaugaacacccaguucaccgccgugggcaaggaguucaaccaccuggagaagagaaucgagaaccugaacaagaagguggacgacggcuuccuggacaucuggaccuacaacgccgagcugcuggugcugcuggagaacgagagaacccuggacuaccacgacagcaacgugaagaaccuguacgagaaggugagaaaccagcugaagaacaacgccaaggagaucggcaacggcugcuucgaguucuaccacaagugcgacaacaccugcauggagagcgugaagaacggcaccuacgacuaccccaaguacagcgaggaggccaagcugaacagagaggagaucgacggcgugaagcuggagagcaccagaaucuaccagauccuggccaucuacagcaccguggccagcagccuggugcugguggugagccugggcgccaucagcuucuggaugugcagcaacggcagccugcagugcagaaucugcaucuga

SEQ ID NO: 168457 - RNA, 1701 nt, Artificial Sequence
  derived and/or modified CDS sequence (opt4) from hemagglutinin__InfluenzaA__AFF57132
augaaggccauccugguggugcugcuguacaccuucgccaccgccaacgccgacacccugugcaucggcuaccacgccaacaacagcaccgacaccguggacaccgugcuggagaagaacgugaccgugacccacagcgugaaccugcuggaggacaagcacaacggcaagcugugcaagcugagaggcguggccccccugcaccugggcaagugcaacaucgccggcuggauccugggcaaccccgagugcgagagccugagcaccgccagcagcuggagcuacaucguggagaccagcagcagcgacaacggcaccugcuaccccggcgacuucaucgacuacgaggagcugagagagcagcugagcagcgugagcagcuucgagagauucgagaucuuccccaagaccagcagcuggcccaaccacgacagcaacaagggcgugaccgccgccugcccccacgccggcgccaagggcuucuacaagaaccugaucuggcuggugaagaagggcaacagcuaccccaagcugagcaagagcuacaucaacgacaagggcaaggaggugcuggugcuguggggcauccaccaccccagcaccaccgccgaccagcagagcaucuaccagaacgccgacaccuacguguucgugggcaccagcagauacagcaagaaguucaagcccgagaucgccaucagacccaaggugagagaccaggagggcagaaugaacuacuacuggacccugguggagcccggcgacaagaucaccuucgaggccaccggcaaccugguggugcccagauacgccuucgccauggagagaaacgccggcagcggcaucaucaucagcgacacccccgugcacgacugcaacaccaccugccagacccccaagggcgccaucaacaccagccugcccuuccagaacauccaccccaucaccaucggcaagugccccaaguacgugaagagcaccaagcugagacuggccaccggccugagaaacgugcccagcauccagagcagaggccuguucggcgccaucgccggcuucaucgagggcggcuggaccggcaugguggacggcugguacggcuaccaccaccagaacgagcagggcagcggcuacgccgccgaccugaagagcacccagaacgccaucgacaagaucaccaacaaggugaacagcgugaucgagaagaugaacacccaguucaccgccgugggcaaggaguucaaccaccuggagaagagaaucgagaaccugaacaagaagguggacgacggcuuccuggacaucuggaccuacaacgccgagcugcuggugcugcuggagaacgagagaacccuggacuaccacgacagcaacgugaagaaccuguacgagaaggugagaaaccagcugaagaacaacgccaaggagaucggcaacggcugcuucgaguucuaccacaagugcgacaacaccugcauggagagcgugaagaacgagaccuacgacuaccccaaguacagcgaggaggccaagcugaacagagaggagaucgacggcgugaagcuggagagcaccagaaucuaccagauccuggccaucuacagcaccguggccagcagccuggugcugguggugagccugggcgccaucagcuucuggaugugcagcaacggcagccugcagugcagaaucugcaucuga

SEQ ID NO: 168458 - RNA, 1701 nt, Artificial Sequence
  derived and/or modified CDS sequence (opt4) from hemagglutinin__InfluenzaA__AFF57136
augaaggccauccugguggugcugcuguacaccuucgccaccgccaacgccgacacccugugcaucggcuaccacgccaacaacagcaccgacaccguggacaccgugcuggagaagaacgugaccgugacccacagcgugaaccugcuggaggacaagcacaacggcaagcugugcaagcugagaggcguggccccccugcaccugggcaagugcaacaucgccggcuggauccugggcaaccccgagugcgagagccugagcaccgccagcagcuggagcuacaucguggagaccagcagcagcgacaacggcaccugcuaccccggcgacuucaucgacuacgaggagcugagagagcagcugagcagcgugagcagcuucgagagauucgagaucuuccccaagaccagcagcuggcccaaccacgacagcaacaagggcgugaccgccgccugcccccacgccggcgccaagagcuucuacaagaaccugaucuggcuggugaagaagggcaacagcuaccccaagcugagcaagagcuacaucaacgacaagggcaaggaggugcuggugcuguggggcauccaccaccccagcaccagcgccgaccagcagagccuguaccagaacgccgacgccuacguguucgugggcagcagcagauacagcaagaaguucaagcccgagaucgccaucagacccaaggugagagacagagagggcagaaugaacuacuacuggacccugguggagcccggcgacaagaucaccuucgaggccaccggcaaccugguggugcccagauacgccuucgccauggagagaaacgccggcagcggcaucaucaucagcgacacccccguguacgacugcaacaccaccugccagacccccaagggcgccaucaacaccagccugcccuuccagaacauccaccccaucaccaucggcaagugccccaaguacgugaagagcaccaagcugagacuggccaccggccugagaaacgugcccagcauccagagcagaggccuguucggcgccaucgccggcuucaucgagggcggcuggaccggcaugguggacggcugguacggcuaccaccaccagaacgagcagggcagcggcuacgccgccgaccugaagagcacccagaacgccaucgacgagaucaccaacaaggugaacagcgugaucgagaagaugaacacccaguucaccgccgugggcaaggaguucaaccaccuggagaagagaaucgagaaccugaacaagaagguggacgacggcuuccuggacaucuggaccuacaacgccgagcugcuggugcugcuggagaacgagagaacccuggacuaccacgacagcaacgugaagaaccuguacgagaaggugagaagccagcugaagaacaacgccaaggagaucggcaacggcugcuucgaguucuaccacaagugcgacaacaccugcauggagagcgugaagaacggcaccuacgacuaccccaaguacagcgaggaggccaagcugaacagagaggagaucgacggcgugaagcuggagagcaccagaaucuaccagauccuggccaucuacagcaccguggccagcagccuggugcugguggugagccugggcgccaucagcuucuggaugugcagcaacggcagccugcagugcagaaucugcaucuga

SEQ ID NO: 168459 - RNA, 1701 nt, Artificial Sequence
  derived and/or modified CDS sequence (opt4) from hemagglutinin__InfluenzaA__AFF57144
augaaggccauccugguggugcugcuguacaccuucgccaccgccaacgccgacacccugugcaucggcuaccacgccaacaacagcaccgacaccguggacaccgugcuggagaagaacgugaccgugacccacagcgugaaccugcuggaggacaagcacaacggcaagcugugcaagcugagaggcguggccccccugcaccugggcaagugcaacaucgccggcuggauccugggcaaccccgagugcgagagccugagcaccgccagcagcuggagcuacaucguggagaccagcagcagcgacaacggcaccugcuaccccggcgacuucaucgacuacgaggagcugagagagcagcugagcagcgugagcagcuucgagagauucgagaucuuccccaagaccagcagcuggcccaaccacgacagcaacaagggcgugaccgccgccugcccccacgccggcgccaagagcuucuacaagaaccugaucuggcuggugaagaagggcaacagcuaccccaagcugagcaagagcuacaucaacgacaagggcaaggaggugcuggugcuguggggcauccaccaccccagcaccagcgacgaccagcagagccuguaccagaacgaggacgccuacguguucgugggcagcagcagauacagcaagaaguucaagcccgagaucgccaucagacccaaggugagagacagagagggcagaaugaacuacuacuggacccugguggagcccggcgacaagaucaccuucgaggccaccggcaaccugguggugcccagauacgccuucgccauggagagaaacgccggcagcggcaucaucaucagcgacacccccgugcacgacugcaacaccaccugccagacccccaagggcgccaucaacaccagccugcccuuccagaacauccaccccaucaccaucggcaagugccccaaguacgugaagagcaccaagcugagacuggccaccggccugagaaacgugcccagcauccagagcagaggccuguucggcgccaucgccggcuucaucgagggcggcuggaccggcaugguggacggcugguacggcuaccaccaccagaacgagcagggcagcggcuacgccgccgaccugaagagcacccagaacgccaucgacgagaucaccaacaaggugaacagcgugaucgagaagaugaacacccaguucaccgccgugggcaaggaguucaaccaccuggagaagagaaucgagaaccugaacaagaagguggacgacggcuuccuggacaucuggaccuacaacgccgagcugcuggugcugcuggagaacgagagaacccuggacuaccacgacagcaacgugaagaaccuguacgagaaggugagaagccagcugaagaacaacgccaaggagaucggcaacggcugcuucgaguucuaccacaagugcgacaacaccugcauggagagcgugaagaacggcaccuacgacuaccccaaguacagcgaggaggccaagcugaacagagaggagaucgacggcgugaagcuggagagcaccagaaucuaccagauccuggccaucuacagcaccguggccagcagccuggugcugguggugagccugggcgccaucagcuucuggaugugcagcaacggcagccugcagugcagaaucugcaucuga

SEQ ID NO: 168460 - RNA, 1701 nt, Artificial Sequence
  derived and/or modified CDS sequence (opt4) from hemagglutinin__InfluenzaA__AFF57148
augaaggccauccugguggugcugcuguacaccuucgccaccgccaacgccgacacccugugcaucggcuaccacgccaacaacagcaccgacaccguggacacccugcuggagaagaacgugaccgugacccacagcgugaaccugcuggaggacaagcacaacggcaagcugugcaagcugagaggcguggccccccugcaccugggcaagugcaacaucgccggcuggauccugggcaaccccgagugcgagagccugagcaccgccagcagcuggagcuacaucguggagaccagcagcagcgacaacggcaccugcuaccccggcgacuucaucgacuacgaggagcugagagagcagcugagcagcgugagcagcuucgagagauucgagaucuuccccaagaccagcagcuggcccaaccacgacagcaacaagggcgugaccgccgccugcccccacgccggcgccaagagcuucuacaagaaccugaucuggcuggugaagaagggcaacagcuaccccaagcugagcaagagcuacaucaacgacaagggcaaggaggugcuggugcuguggggcauccaccaccccagcaccagcgacgaccagcagagccuguaccagaacgaggacgccuacguguucgugggcagcagcagauacagcaagaaguucaagcccgagaucgccaucagacccaaggugagagacagagagggcagaaugaacuacuacuggacccugguggagcccggcgacaagaucaccuucgaggccaccggcaaccugguggugcccagauacgccuucgccauggagagaaacgccggcagcggcaucaucaucagcgacacccccgugcacgacugcaacaccaccugccagacccccaagggcgccaucaacaccagccugcccuuccagaacauccaccccaucaccaucggcaagugccccaaguacgugaagagcaccaagcugagacuggccaccggccugagaaacgugcccagcauccagagcagaggccuguucggcgccaucgccggcuucaucgagggcggcuggaccggcaugguggacggcugguacggcuaccaccaccagaacgagcagggcagcggcuacgccgccgaccugaagagcacccagaacgccaucgacgagaucaccaacaaggugaacagcgugaucgagaagaugaacacccaguucaccgccgugggcaaggaguucaaccaccuggagaagagaaucgagaaccugaacaagaagguggacgacggcuuccuggacaucuggaccuacaacgccgagcugcuggugcugcuggagaacgagagaacccuggacuaccacgacagcaacgugaagaaccuguacgagaaggugagaagccagcugaagaacaacgccaaggagaucggcaacggcugcuucgaguucuaccacaagugcgacaacaccugcauggagagcgugaagaacggcaccuacgacuaccccaaguacagcgaggaggccaagcugaacagagaggagaucgacggcgugaagcuggagagcaccagaaucuaccagauccuggccaucuacagcaccguggccagcagccuggugcugguggugagccugggcgccaucagcuucuggaugugcagcaacggcagccugcagugcagaaucugcaucuga

SEQ ID NO: 168461 - RNA, 1701 nt, Artificial Sequence
  derived and/or modified CDS sequence (opt4) from hemagglutinin__InfluenzaA__AFF57160
augaaggccauccugguggugcugcuguacaccuucgccaccgccaacgccgacacccugugcaucggcuaccacgccaacaacagcaccgacaccguggacaccgugcuggagaagaacgugaccgugacccacagcgugaaccugcuggaggacaagcacaacggcaagcugugcaagcugagaggcguggccccccugcaccugggcaagugcaacaucgccggcuggauccugggcaaccccgagugcgagagccugagcaccgccagcagcuggagcuacaucguggagaccagcagcagcgacaacggcaccugcuaccccggcgacuucaucgacuacgaggagcugagagagcagcugagcagcgugagcagcuucgagagauucgagaucuuccccaagaccagcagcuggcccaaccacgacagcaacaagggcgugaccgccgccugcccccacgccggcgccaagagcuucuacaagaaccugaucuggcuggugaagaagggcaacagcuaccccaagcugagcgagagcuacaucaacgacaagggcaaggaggugcuggugcuguggggcauccaccaccccagcaccagcgccgaccagcagagccuguaccagaacgaggacgccuacguguucgugggcagcagcagauacagcaagaaguucaagcccgagaucgccaucagacccaaggugagagacagagagggcagaaugaacuacuacuggacccugguggagcccggcgacaagaucaccuucgaggccaccggcaaccugguggugcccagauacgccuucgccauggagagaaacgccggcagcggcaucaucaucagcgacacccccgugcacgacugcaacaccaccugccagacccccaagggcgccaucaacaccagccugcccuuccagaacauccaccccaucaccaucggcaagugccccaaguacgugaagagcaccaagcugagacuggccaccggccugagaaacgugcccagcauccagagcagaggccuguucggcgccaucgccggcuucaucgagggcggcuggaccggcaugguggacggcugguacggcuaccaccaccagaacgagcagggcagcggcuacgccgccgaccugaagagcacccagaacgccaucgacgagaucaccaacaaggugaacagcgugaucgagaagaugaacacccaguucaccgccgugggcaaggaguucaaccaccuggagaagagaaucgagaaccugaacaagaagguggacgacggcuuccuggacaucuggaccuacaacgccgagcugcuggugcugcuggagaacgagagaacccuggacuaccacgacagcaacgugaagaaccuguacgagaaggugagaagccagcugaagaacaacgccaaggagaucggcaacggcugcuucgaguucuaccacaagugcgacaacaccugcauggagagcgugaagaacggcaccuacgacuaccccaaguacagcgaggaggccaagcugaacagagaggagaucgacggcgugaagcuggagagcaccagaaucuaccagauccuggccaucuacagcaccguggccagcagccuggugcugguggugagccugggcgccaucagcuucuggaugugcagcaacggcagccugcagugcagaaucugcaucuga

SEQ ID NO: 168462 - RNA, 1701 nt, Artificial Sequence
  derived and/or modified CDS sequence (opt4) from hemagglutinin__InfluenzaA__AFF57164
augaaggccauccugguggugcugcuguacaccuucgccaccgccaacgccgacacccugugcaucggcuaccacgccaacaacagcaccgacaccguggacaccgugcuggagaagaacgugaccgugacccacagcgugaaccugcuggaggacaagcacaacgagaagcugugcaagcugagaggcguggccccccugcaccugggcaagugcaacaucgccggcuggauccugggcaaccccgagugcgagagccugagcaccgccagcagcuggagcuacaucguggagaccagcagcagcgacaacggcaccugcuaccccggcgacuucaucgacuacgaggagcugagagagcagcugagcagcgugagcagcuucgagagauucgagaucuuccccaagaccagcagcuggcccaaccacgacagcaacaagggcgugaccgccgccugcccccacgccggcgccaagagcuucuacaagaaccugaucuggcuggugaagaagggcaacagcuaccccaagcugagcaagagcuacaucaacgacaagggcaaggaggugcuggugcuguggggcauccaccaccccagcaccagcgccgaccagcagagccuguaccagaacgccgacgccuacguguucgugggcagcagcagauacagcaagaaguucaagcccgagaucgccaucagacccaaggugagagacagagagggcagaaugaacuacuacuggacccugguggagcccggcgacaagaucaccuucgaggccaccggcaaccugguggugcccagauacgccuucgccauggagagaaacgccggcagcggcaucaucaucagcgacacccccgugcacgacugcaacaccaccugccagacccccaagggcgccaucaacaccagccugcccuuccagaacauccaccccaucaccaucggcaagugccccaaguacgugaagagcaccaagcugagacuggccaccggccugagaaacgugcccagcauccagagcagaggccuguucggcgccaucgccggcuucaucgagggcggcuggaccggcaugguggacggcugguacggcuaccaccaccagaacgagcagggcagcggcuacgccgccgaccugaagagcacccagaacgccaucgacgagaucaccaacaaggugaacagcgugaucgagaagaugaacacccaguucaccgccgugggcaaggaguucaaccaccuggagaagagaaucgagaaccugaacaagaagguggacgacggcuuccuggacaucuggaccuacaacgccgagcugcuggugcugcuggagaacgagagaacccuggacuaccacgacagcaacgugaagaaccuguacgagaaggugagaagccagcugaagaacaacgccaaggagaucggcaacggcugcuucgaguucuaccacaagugcgacaacaccugcauggagagcgugaagaacggcaccuacgacuaccccaaguacagcgaggaggccaagcugaacagagaggagaucgacggcgugaagcuggagagcaccagaaucuaccagauccuggccaucuacagcaccguggccagcagccuggugcugguggugagccugggcgccaucagcuucuggaugugcagcaacggcagccugcagugcagaaucugcaucuga

SEQ ID NO: 168463 - RNA, 1701 nt, Artificial Sequence; identical to SEQ ID NO: 168462
  derived and/or modified CDS sequence (opt4) from hemagglutinin__InfluenzaA__AFF57168

SEQ ID NO: 168464 - RNA, 1701 nt, Artificial Sequence
  derived and/or modified CDS sequence (opt4) from hemagglutinin__InfluenzaA__AFF57172
augaaggccauccugguggugcugcuguacaccuucgccaccgccaacgccgacacccugugcaucggcuaccacgccaacaacagcaccgacaccguggacaccgugcuggagaagaacgugaccgugacccacagcgugaaccugcuggaggacaagcacaacggcaagcugugcaagcugagaggcguggccccccugcaccugggcaagugcaacaucgccggcuggauccugggcaaccccgagugcgagagccugagcaccgccagcagcuggagcuacaucguggagaccagcagcagcgacaacggcaccugcuaccccggcgacuucaucgacuacgaggagcugagagagcagcugagcagcgugagcagcuucgagagauucgagaucuuccccaagaccagcagcuggcccaaccacgacagcaacaagggcgugaccgccgccugcccccacgccggcgccaagagcuucuacaagaaccugaucuggcuggugaagaagggcaacagcuaccccaagcugagcaagagcuacaucaacgacaagggcaaggaggugcuggugcuguggggcauccaccaccccagcaccagcgccgaccagcagagccuguaccagaacgaggacgccuacguguucgugggcagcagcagauacagcaagaaguucaagcccgagaucgccaucagacccaaggugagagacagagagggcagaaugaacuacuacuggacccugguggagcccggcgacaagaucaccuucgaggccaccggcaaccugguggugcccagauacgccuucgccauggagagaaacgccggcagcggcaucaucaucagcgacacccccgugcacgacugcaacaccaccugccagacccccaagggcgccaucaacaccagccugcccuuccagaacauccaccccaucaccaucggcaagugccccaaguacgugaagagcaccaagcugagacuggccaccggccugagaaacgugcccagcauccagagcagaggccuguucggcgccaucgccggcuucaucgagggcggcuggaccggcaugguggacggcugguacggcuaccaccaccagaacgagcagggcagcggcuacgccgccgaccugaagagcacccagaacgccaucgacgagaucaccaacaaggugaacagcgugaucgagaagaugaacacccaguucaccgccgugggcaaggaguucaaccaccuggagaagagaaucgagaaccugaacaagaagguggacgacggcuuccuggacaucuggaccuacaacgccgagcugcuggugcugcuggagaacgagagaacccuggacuaccacgacagcaacgugaagaaccuguacgagaaggugagaagccagcugaagaacaacgccaaggagaucggcaacggcugcuucgaguucuaccacaagugcgacaacaccugcauggagagcgugaagaacggcaccuacgacuaccccaaguacagcgaggaggccaagcugaacagagaggagaucgacggcgugaagcuggagagcaccagaaucuaccagauccuggccaucuacagcaccguggccagcagccuggugcugguggugagccugggcgccaucagcuucuggaugugcagcaacggcagccugcagugcagaaucugcaucuga

SEQ ID NO: 168465 - RNA, 1701 nt, Artificial Sequence
  derived and/or modified CDS sequence (opt4) from hemagglutinin__InfluenzaA__AFF57176
augaaggccauccugguggugcugcuguacaccuucgccaccgccaacgccgacacccugugcaucggcuaccacgccaacaacagcaccgacaccguggacaccgugcuggagaagaacgugaccgugacccacagcgugaaccugcuggaggacaagcacaacggcaagcugugcaagcugagaggcguggccccccugcaccugggcaagugcaacaucgccggcuggauccugggcaaccccgagugcgagagccugagcaccgccagcagcuggagcuacaucguggagaccagcagcagcgacaacggcaccugcuaccccggcgacuucaucgacuacgaggagcugagagagcagcugagcagcgugagcagcuucgagagauucgagaucuuccccaagaccagcagcuggcccaaccacgacagcaacaagggcgugaccgccgccugcccccacgccggcgccaagagcuucuacaagaaccugaucuggcuggugaagaaggagaacagcuaccccaagcugagcaagagcuacaucaacgacaagggcaaggaggugcuggugcuguggggcauccaccaccccagcaccagcgccgaccagcagagccuguaccagaacgccgacgccuacguguucgugggcagcagcagauacagcaagaaguucaagcccgagaucgccaucagacccaaggugagagacagagagggcagaaugaacuacuacuggacccugguggagcccggcgacaagaucaccuucgaggccaccggcaaccugguggugcccagauacgccuucgccauggagagaaacgccggcagcggcaucaucaucagcgacacccccgugcacgacugcaacaccaccugccagacccccaagggcgccaucaacaccagccugcccuuccagaacauccaccccaucaccaucggcaagugccccaaguacgugaagagcaccaagcugagacuggccaccggccugagaaacgugcccagcauccagagcagaggccuguucggcgccaucgccggcuucaucgagggcggcuggaccggcaugguggacggcugguacggcuaccaccaccagaacgagcagggcagcggcuacgccgccgaccugaagagcacccagaacgccaucgacgagaucaccaacaaggugaacagcgugaucgagaagaugaacacccaguucaccgccgugggcaaggaguucaaccaccuggagaagagaaucgagaaccugaacaagaagguggacgacggcuuccuggacaucuggaccuacaacgccgagcugcuggugcugcuggagaacgagagaacccuggacuaccacgacagcaacgugaagaaccuguacgagaaggugagaagccagcugaagaacaacgccaaggagaucggcaacggcugcuucgaguucuaccacaagugcgacaacaccugcauggagagcgugaagaacggcaccuacgacuaccccaaguacagcgaggaggccaagcugaacagagaggagaucgacggcgugaagcuggagagcaccagaaucuaccagauccuggccaucuacagcaccguggccagcagccuggugcugguggugagccugggcgccaucagcuucuggaugugcagcaacggcagccugcagugcagaaucugcaucuga

SEQ ID NO: 168466 - RNA, 1701 nt, Artificial Sequence
  derived and/or modified CDS sequence (opt4) from hemagglutinin__InfluenzaA__AFF57184
augaaggccauccugguggugcugcuguacaccuucgccaccgccaacgccgacacccugugcaucggcuaccacgccaacaacagcaccgacaccguggacaccgugcuggagaagaacgugaccgugacccacagcgugaaccugcuggaggacaagcacaacggcaagcugugcaagcugagaggcguggccccccugcaccugggcaagugcaacaucgccggcuggauccugggcaaccccgagugcgagagccugagcaccgccagcagcuggagcuacaucguggagaccagcagcagcgacaacggcaccugcuaccccggcgacuucaucgacuacgaggagcugagagagcagcugagcagcgugagcagcuucgagagauucgagaucuuccccaagaccagcagcuggcccaaccacgacagcaacaagggcgugaccgccgccugcccccacgccggcgccaagagcuucuacaagaaccugaucuggcuggugaagaaggagaacagcuaccagaagcugagcaagagcuacaucaacgacaagggcaaggaggugcuggugcuguggggcauccaccaccccagcaccagcgccgaccagcagagccuguaccagaacgccgacgccuacguguucgugggcagcagcagauacagcaagaaguucaagcccgagaucgccaucagacccaaggugagagacagagagggcagaaugaacuacuacuggacccugguggagcccggcgacaagaucaccuucgaggccaccggcaaccugguggugcccagauacgccuucgccauggagagaaacgccggcagcggcaucaucaucagcgacacccccgugcacgacugcaacaccaccugccagacccccaagggcgccaucaacaccagccugcccuuccagaacauccaccccaucaccaucggcaagugccccaaguacgugaagagcaccaagcugagacuggccaccggccugagaaacgugcccagcauccagagcagaggccuguucggcgccaucgccggcuucaucgagggcggcuggaccggcaugguggacggcugguacggcuaccaccaccagaacgagcagggcagcggcuacgccgccgaccugaagagcacccagaacgccaucgacgagaucaccaacaaggugaacagcgugaucgagaagaugaacacccaguucaccgccgugggcaaggaguucaaccaccuggagaagagaaucgagaaccugaacaagaagguggacgacggcuuccuggacaucuggaccuacaacgccgagcugcuggugcugcuggagaacgagagaacccuggacuaccacgacagcaacgugaagaaccuguacgagaaggugagaagccagcugaagaacaacgccaaggagaucggcaacggcugcuucgaguucuaccacaagugcgacaacaccugcauggagagcgugaagaacggcaccuacgacuaccccaaguacagcgaggaggccaagcugaacagagaggagaucgacggcgugaagcuggagagcaccagaaucuaccagauccuggccaucuacagcaccguggccagcagccuggugcugguggugagccugggcgccaucagcuucuggaugugcagcaacggcagccugcagugcagaaucugcaucuga

SEQ ID NO: 168467 - RNA, 1701 nt, Artificial Sequence; identical to SEQ ID NO: 168459
  derived and/or modified CDS sequence (opt4) from hemagglutinin__InfluenzaA__AFF57188

SEQ ID NO: 168468 - RNA, 1707 nt, Artificial Sequence
  derived and/or modified CDS sequence (opt4) from hemagglutinin__InfluenzaA__AFF60787
auggagaagaucgugcugcuguucgccaucgugagccuggugaagagcgaccagaucugcaucggcuaccacgccaacaacagcaccgagcagguggacaccaucauggagaagaacgugaccgugacccacgcccaggacauccuggagaagacccacaacggcaagcugugcgaccuggacggcgugaagccccugauccugagagacugcagcguggccggcuggcugcugggcaaccccaugugcgacgaguucaucaacgugcccgaguggagcuacaucguggagaaggccaaccccgugaacgaccugugcuaccccggcgacuucaacgacuacgaggagcugaagcaccugcugagcagaaucaaccacuucgagaagauccagaucauccccaagagcagcuggagcagccacgaggccagccugggcgugagcagcgccugccccuaccagggcaagagcagcuucuucagaaacgugguguggcugaucaagaagaacagcaccuaccccaccaucaagagaagcuacaacaacaccaaccaggaggaccugcuggugcuguggggcauccaccaccccaacgacgccgccgagcagaccaagcuguaccagaaccccaccaccuacaucagcgugggcaccagcacccugaaccagagacuggugcccagaaucgccaccagaagcgaggugaacggccagagcggcagaauggaguucuucuggaccauccugaagcccaacgacgccaucaacuucgagagcaacggcaacuucaucgcccccgaguacgccuacaagaucgugaagaagggcgacagcaccaucaugaagagcgagcuggaguacggcaacugcaacaccaagugccagacccccaugggcgccaucaacagcagcaugcccuuccacaacauccacccccugaccaucggcgagugccccaaguacgugaagagcaacagacuggugcuggccaccggccugagaaacagcccccagagagagagaagaagaaagaagagaggccuguucggcgccaucgccggcuucaucgagggcggcuggcagggcaugguggacggcugguacggcuaccaccacagcaacgagcagggcagcggcuacgccgccgacaaggagagcacccagaaggccaucgacggcgugaccaacaaggugaacagcaucaucgacaagaugaacacccaguucgaggccgugggcagagaguucaacaaccuggagagaagaaucgagaaccugaacaagaagauggaggacggcuuccuggacguguggaccuacaacgccgagcugcuggugcugauggagaacgagagaacccuggacuuccacgacagcaacgugaagaaccuguacgacaaggugagacugcagcugagagacaacgccaaggagcugggcaacggcugcuucgaguucuaccacaagugcgacaacgagugcauggagagcgugagaaacggcaccuacgacuacccccaguacagcgaggaggccagacugaagagagaggagaucagcggcgugaagcuggagagcaucggcaucuaccagauccugagcaucuacagcaccguggccagcagccuggcccuggccaucaugguggccggccugagccuguggaugugcagcaacggcagccugcagugcagaaucugcaucuga

SEQ ID NO: 168469 - RNA, 1701 nt, Artificial Sequence
  derived and/or modified CDS sequence (opt4) from hemagglutinin__InfluenzaA__AFG29042
augaaggccauccugguggugcugcuguacaccuucgccaccgccaacgccgacacccugugcaucggcuaccacgccaacaacagcaccgacaccguggacaccgugcuggagaagaacgugaccgugacccacagcgugaaccugcuggaggacaagcacaacggcaagcugugcaagcugagaggcguggccccccugcaccugggcaagugcaacaucgccggcuggauccugggcaaccccgagugcgagagccugagcaccgccagcagcuggagcuacaucguggagaccuucagcagcgacaacggcaccugcuaccccggcgacuucaucgacuacgaggagcugagagagcagcugagcagcgugagcagcuucgagagauucgagaucuuccccaagaccagcagcuggcccaaccacgacagcaacaagggcgugaccgccgccugcccccacgccggcgccaagagcuucuacaagaaccugaucuggcuggugaagaagggcaacagcuaccccaagcugagcaagagcuacaucaacgacaagggcaaggaggugcuggugcuguggggcauccaccaccccagcaccagcgccgaccagcagagccuguaccagaacgccgacgccuacguguucgugggcaccagcagauacagcaagaaguucaagcccgagaucgccaucagacccaaggugagagaccaggagggcagaaugaacuacuacuggacccugaucgagcccggcgacaagaucaccuucgaggccaccggcaaccugguggugcccagauacgccuucgccauggagagaaacgccggcagcggcaucaucaucagcgacacccccgugcacgacugcaacaccaccugccagacccccaagggcgccaucaacaccagccugcccuuccagaacauccaccccaucaccaucggcaagugccccaaguacgugaagagcaccaagcugagacuggccaccggccugagaaacgugcccagcauccagagcagaggccuguucggcgccaucgccggcuucaucgagggcggcuggaccggcaugguggacggcugguacggcuaccaccaccagaacgagcagggcagcggcuacgccgccgaccugaagagcacccagaacgccaucgacgagaucaccaacaaggugaacagcgugaucgagaagaugaacacccaguucaccgccgugggcaaggaguucaaccaccuggagaagagaaucgagaaccugaacaagaagguggacgacggcuuccuggacaucuggaccuacaacgccgagcugcuggugcugcuggagaacgagagaacccuggacuaccacgacagcaacgugaagaaccuguacgagaaggugagaagccagcugaagaacaacgccaaggagaucggcaacggcugcuucgaguucuaccacaagugcgacaacaccugcauggagagcgugaagaacggcaccuacgacuaccccaaguacagcgaggaggccaagcugaacagagaggagaucgacggcgugaagcuggagagcaccagaaucuaccagauccuggccaucuacagcaccguggccagcagccuggugcugguggugagccugggcgccaucagcuucuggaugugcagcaacggcagccugcagugcagaaucugcaucuga

SEQ ID NO: 168470 - RNA, 1701 nt, Artificial Sequence
  derived and/or modified CDS sequence (opt4) from hemagglutinin__InfluenzaA__AFG29044
augaaggccauccugguggugcugcuguacaccuucgccaccgccaacgccgacacccugugcaucggcuaccacgccaacaacagcaccgacaccguggacaccgugcuggagaagaacgugaccgugacccacagcgugaaccugcuggaggacaagcacaacggcaagcugugcaagcugagaggcguggccccccugcaccugggcaagugcaacaucgccggcuggauccugggcaaccccgagugcgagagccugagcaccgccagcagcuggagcuacaucguggagacccccaacagcgacaacggcaccugcuaccccggcgacuucaucgacuacgaggagcugagagagcagcugagcagcgugagcagcuucgagagauucgagaucuuccccaagaccagcagcuggcccaaccacgacagcaacaagggcgugaccgccgccugcccccacgccggcgccaagagcuucuacaagaaccugaucuggcuggugaagaagggcaacagcuaccccaagcugagcaagagcuacaucaacgacaagggcaaggaggugcuggugcuguggggcauccaccacccccccaccagcaccgaccagcagagccuguaccagaacgccgacgccuacguguucgugggcaccagcagauacagcaagaaguucaagcccgagaucgccaucagacccaaggugagaggccaggagggcagaaugaacuacuacuggacccugguggagcccggcgacaagaucaccuucgaggccaccggcaaccugguggugcccagauacgccuucgccauggagagaaacgccggcagcggcaucaucaucagcgacacccccgugcacgacugcaacaccaccugccagacccccaagggcgccaucaacaccagccugcccuuccagaacauccaccccaucaccaucggcaagugccccaaguacgugaagagcaccaagcugagacuggccaccggccugagaaacgugcccagcauccagagcagaggccuguucggcgccaucgccggcuucaucgagggcggcuggaccggcaugguggacggcugguacggcuaccaccaccagaacgagcagggcagcggcuacgccgccgaccugaagagcacccagaacgccaucgacaagaucaccaacaaggugaacagcgugaucgagaagaugaacacccaguucaccgccgugggcaaggaguucaaccaccuggagaagagaaucgagaaccugaacaagaagguggacgacggcuuccuggacaucuggaccuacaacgccgagcugcuggugcugcuggagaacgagagaacccuggacuaccacgacagcaacgugaagaaccuguacgagaaggugagaagccagcugaagaacaacgccaaggagaucggcaacggcugcuucgaguucuaccacaagugcgacaacaccugcauggagagcgugaagaacggcaccuacgacuaccccaaguacagcgaggaggccaagcugaacagagaggagaucgacggcgugaagcuggagagcaccagaaucuaccagauccuggccaucuacagcaccguggccagcagccuggugcugguggugagccugggcgccaucagcuucuggaugugcagcaacggcagccugcagugcagaaucugcaucuga

SEQ ID NO: 168471 - RNA, 1701 nt, Artificial Sequence; identical to SEQ ID NO: 162729
  derived and/or modified CDS sequence (opt4) from hemagglutinin__InfluenzaA__AFG31060

SEQ ID NO: 168472 - RNA, 1701 nt, Artificial Sequence; identical to SEQ ID NO: 165284
  derived and/or modified CDS sequence (opt4) from hemagglutinin__InfluenzaA__AFG31070

SEQ ID NO: 168473 - RNA, 1701 nt, Artificial Sequence; identical to SEQ ID NO: 162716
  derived and/or modified CDS sequence (opt4) from hemagglutinin__InfluenzaA__AFG31080

SEQ ID NO: 168474 - RNA, 1701 nt, Artificial Sequence
  derived and/or modified CDS sequence (opt4) from hemagglutinin__InfluenzaA__AFG31100
augaaggccauccugguggugcugcuguacaccuucgccaccgccaacgccgacacccugugcaucggcuaccacgccaacaacagcaccgacaccguggacaccgugcuggagaagaacgugaccgugacccacagcgugaaccugcuggaggacaagcacaacggcaagcugugcaagcugagaggcguggccccccugcaccugggcaagugcaacaucgccggcuggauccugggcaaccccgagugcgagagccugagcaccgccagcagcuggagcuacaucguggagaccagcagcagcgacaacggcaccugcuaccccggcgacuucaucgacuacgaggagcugagagagcagcugagcagcgugagcagcuucgagagauucgagaucuuccccaagaccagcagcuggcccaaccacgaccugaacaagggcgugaccgccgccugcccccacgccggcgccaagagcuucuacaagaaccugaucuggcuggugaagaagggcaacagcuaccccaagcugagcaagagcuacaucaacgacaagggcaaggaggugcuggugcuguggggcauccaccaccccagcaccagcgccgaccagcagagccuguaccagaacgccgacgccuacguguucgugggcaccagcagauacagcaagaaguucaagcccgagaucgccaucagacccaaggugagagaccaggagggcagaaugaacuacuacuggacccugguggagcccggcgacaagaucaccuucgaggccaccggcaaccugguggugcccagauacgccuucgccauggagagaaacgccggcagcggcaucaucaucagcgacacccccgugcacgacugcaacaccaccugccagacccccaagggcgccaucaacaccagccugcccuuccagaacauccaccccaucaccaucggcaagugccccaaguacgugaagagcaccaagcugagacuggccaccggccugagaaacgugcccagcauccagagcagaggccuguucggcgccaucgccggcuucaucgagggcggcuggaccggcaugguggacggcugguacggcuaccaccaccagaacgagcagggcagcggcuacgccgccgaccugaagagcacccagaacgccaucgacgagaucaccaacaaggugaacagcgugaucgagaagaugaacacccaguucaccgccgugggcaaggaguucaaccaccuggagaagagaaucgagaaccugaacaagaagguggacgacggcuuccuggacaucuggaccuacaacgccgagcugcuggugcugcuggagaacgagagaacccuggacuaccacgacagcaacgugaagaaccuguacgagaaggugagaagccagcugaagaacaacgccaaggagaucggcaacggcugcuucgaguucuaccacaagugcgacaacaccugcauggagagcgugaagaacggcaccuacgacuaccccaaguacagcgaggaggccaagcugaacagagaggagaucgacggcgugaagcuggagagcaccagaaucuaccagauccuggccaucuacagcaccguggccagcagccuggugcugaucgugagccugggcgccaucagcuucuggaugugcagcaacggcagccugcagugcagaaucugcaucuga

SEQ ID NO: 168475 - RNA, 1701 nt, Artificial Sequence; identical to SEQ ID NO: 162729
  derived and/or modified CDS sequence (opt4) from hemagglutinin__InfluenzaA__AFG31110

SEQ ID NO: 168476 - RNA, 1701 nt, Artificial Sequence; identical to SEQ ID NO: 162971
  derived and/or modified CDS sequence (opt4) from hemagglutinin__InfluenzaA__AFG31120

SEQ ID NO: 168477 - RNA, 1701 nt, Artificial Sequence; identical to SEQ ID NO: 162971
  derived and/or modified CDS sequence (opt4) from hemagglutinin__InfluenzaA__AFG31130

SEQ ID NO: 168478 - RNA, 1701 nt, Artificial Sequence; identical to SEQ ID NO: 162971
  derived and/or modified CDS sequence (opt4) from hemagglutinin__InfluenzaA__AFG31140

SEQ ID NO: 168479 - RNA, 1701 nt, Artificial Sequence; identical to SEQ ID NO: 163831
  derived and/or modified CDS sequence (opt4) from hemagglutinin__InfluenzaA__AFG31150

SEQ ID NO: 168480 - RNA, 1701 nt, Artificial Sequence; identical to SEQ ID NO: 163831
  derived and/or modified CDS sequence (opt4) from hemagglutinin__InfluenzaA__AFG31160

SEQ ID NO: 168481 - RNA, 1701 nt, Artificial Sequence; identical to SEQ ID NO: 162729
  derived and/or modified CDS sequence (opt4) from hemagglutinin__InfluenzaA__AFG31170

SEQ ID NO: 168482 - RNA, 1701 nt, Artificial Sequence; identical to SEQ ID NO: 162729
  derived and/or modified CDS sequence (opt4) from hemagglutinin__InfluenzaA__AFG31180

SEQ ID NO: 168483 - RNA, 1701 nt, Artificial Sequence; identical to SEQ ID NO: 162729
  derived and/or modified CDS sequence (opt4) from hemagglutinin__InfluenzaA__AFG31190

SEQ ID NO: 168484 - RNA, 1701 nt, Artificial Sequence; identical to SEQ ID NO: 162729
  derived and/or modified CDS sequence (opt4) from hemagglutinin__InfluenzaA__AFG31200

SEQ ID NO: 168485 - RNA, 1701 nt, Artificial Sequence; identical to SEQ ID NO: 162729
  derived and/or modified CDS sequence (opt4) from hemagglutinin__InfluenzaA__AFG31210

SEQ ID NO: 168486 - RNA, 1701 nt, Artificial Sequence; identical to SEQ ID NO: 162729
  derived and/or modified CDS sequence (opt4) from hemagglutinin__InfluenzaA__AFG31220

SEQ ID NO: 168487 - RNA, 1701 nt, Artificial Sequence; identical to SEQ ID NO: 165284
  derived and/or modified CDS sequence (opt4) from hemagglutinin__InfluenzaA__AFG31230

SEQ ID NO: 168488 - RNA, 1701 nt, Artificial Sequence; identical to SEQ ID NO: 162729
  derived and/or modified CDS sequence (opt4) from hemagglutinin__InfluenzaA__AFG31240

SEQ ID NO: 168489 - RNA, 1701 nt, Artificial Sequence; identical to SEQ ID NO: 162729
  derived and/or modified CDS sequence (opt4) from hemagglutinin__InfluenzaA__AFG31250

SEQ ID NO: 168490 - RNA, 1701 nt, Artificial Sequence; identical to SEQ ID NO: 162729
  derived and/or modified CDS sequence (opt4) from hemagglutinin__InfluenzaA__AFG31260

SEQ ID NO: 168491 - RNA, 1701 nt, Artificial Sequence; identical to SEQ ID NO: 162729
  derived and/or modified CDS sequence (opt4) from hemagglutinin__InfluenzaA__AFG31270

SEQ ID NO: 168492 - RNA, 1701 nt, Artificial Sequence; identical to SEQ ID NO: 162729
  derived and/or modified CDS sequence (opt4) from hemagglutinin__InfluenzaA__AFG31280

SEQ ID NO: 168493 - RNA, 1701 nt, Artificial Sequence; identical to SEQ ID NO: 162729
  derived and/or modified CDS sequence (opt4) from hemagglutinin__InfluenzaA__AFG31290

SEQ ID NO: 168494 - RNA, 1701 nt, Artificial Sequence
  derived and/or modified CDS sequence (opt4) from hemagglutinin__InfluenzaA__AFG31300
augaaggccauccugguggugcugcuguacaccuucgccaccgccaacgccgacacccugugcaucggcuaccacgccaacaacagcaccgacaccguggacaccgugcuggagaagaacgugaccgugacccacagcgugaaccugcuggaggacaagcacaacggcaagcugugcaagcugagaggcguggccccccugcaccugggcaagugcaacaucgccggcuggauccugggcaaccccgagugcgagagccugagcaccgccagcagcuggagcuacaucguggagaccagcagcagcgacaacggcaccugcuaccccggcgacuucaucgacuacgaggagcugagagagcagcugagcagcgugagcagcuucgagagauucgagaucuuccccaagaccagcagcuggcccaaccacgacagcaacaagggcgugaccgccgccugcccccacgccggcgccaagagcuucuacaagaaccugaucuggcuggugaagaagggcaacagcuaccccaagcugagcaagagcuacaucaacgacaagggcaaggaggugcuggugcuguggggcauccaccaccccagcaccagcgccgaccagcagagccuguaccagaacgccgacgccuacguguucgugggcaccagcagauacagcaagaaguucaagcccgagaucgccaucagacccaaggugagagaccaggagggcagaaugaacuacuacuggacccugguggagcccggcgacaagaucaccuucgaggccaccggcaaccugguggugcccagauacgccuucgccauggagagaaacgccggcagcggcaucaucaucagcgacacccccgugcacgacugcaacaccaccugccagacccccaagggcgccaucaacaccagccugcccuuccagaacaucaaccccaucaccaucggcaagugccccaaguacgugaagagcaccaagcugagacuggccaccggccugagaaacgugcccagcauccagagcagaggccuguucggcgccaucgccggcuucaucgagggcggcuggaccggcaugguggacggcugguacggcuaccaccaccagaacgagcagggcagcggcuacgccgccgaccugaagagcacccagaacgccaucgacgagaucaccaacaaggugaacagcgugaucgagaagaugaacacccaguucaccgccgugggcaaggaguucaaccaccuggagaagagaaucgagaaccugaacaagaagguggacgacggcuuccuggacaucuggaccuacaacgccgagcugcuggugcugcuggagaacgagagaacccuggacuaccacgacagcaacgugaagaaccuguacgagaaggugagaagccagcugaagaacaacgccaaggagaucggcaacggcugcuucgaguucuaccacaagugcgacaacaccugcauggagagcgugaagaacggcaccuacgacuaccccaaguacagcgaggaggccaagcugaacagagaggagaucgacggcgugaagcuggagagcaccagaaucuaccagauccuggccaucuacagcaccguggccagcagccuggugcugguggugagccugggcgccaucagcuucuggaugugcagcaacggcagccugcagugcagaaucugcaucuga

SEQ ID NO: 168495 - RNA, 1701 nt, Artificial Sequence; identical to SEQ ID NO: 165284
  derived and/or modified CDS sequence (opt4) from hemagglutinin__InfluenzaA__AFG31310

SEQ ID NO: 168496 - RNA, 1701 nt, Artificial Sequence; identical to SEQ ID NO: 162729
  derived and/or modified CDS sequence (opt4) from hemagglutinin__InfluenzaA__AFG31323

SEQ ID NO: 168497 - RNA, 1701 nt, Artificial Sequence; identical to SEQ ID NO: 162729
  derived and/or modified CDS sequence (opt4) from hemagglutinin__InfluenzaA__AFG31333

SEQ ID NO: 168498 - RNA, 1701 nt, Artificial Sequence; identical to SEQ ID NO: 162729
  derived and/or modified CDS sequence (opt4) from hemagglutinin__InfluenzaA__AFG31343

SEQ ID NO: 168499 - RNA, 1701 nt, Artificial Sequence; identical to SEQ ID NO: 162729
  derived and/or modified CDS sequence (opt4) from hemagglutinin__InfluenzaA__AFG31353

SEQ ID NO: 168500 - RNA, 1701 nt, Artificial Sequence; identical to SEQ ID NO: 162729
  derived and/or modified CDS sequence (opt4) from hemagglutinin__InfluenzaA__AFG31363

SEQ ID NO: 168501 - RNA, 1701 nt, Artificial Sequence; identical to SEQ ID NO: 162729
  derived and/or modified CDS sequence (opt4) from hemagglutinin__InfluenzaA__AFG31376

SEQ ID NO: 168502 - RNA, 1701 nt, Artificial Sequence; identical to SEQ ID NO: 162729
  derived and/or modified CDS sequence (opt4) from hemagglutinin__InfluenzaA__AFG31386

SEQ ID NO: 168503 - RNA, 1701 nt, Artificial Sequence; identical to SEQ ID NO: 162729
  derived and/or modified CDS sequence (opt4) from hemagglutinin__InfluenzaA__AFG31396

SEQ ID NO: 168504 - RNA, 1701 nt, Artificial Sequence; identical to SEQ ID NO: 162729
  derived and/or modified CDS sequence (opt4) from hemagglutinin__InfluenzaA__AFG31406

SEQ ID NO: 168505 - RNA, 1701 nt, Artificial Sequence; identical to SEQ ID NO: 162729
  derived and/or modified CDS sequence (opt4) from hemagglutinin__InfluenzaA__AFG31416

SEQ ID NO: 168506 - RNA, 1701 nt, Artificial Sequence; identical to SEQ ID NO: 162729
  derived and/or modified CDS sequence (opt4) from hemagglutinin__InfluenzaA__AFG31426

SEQ ID NO: 168507 - RNA, 1701 nt, Artificial Sequence; identical to SEQ ID NO: 162729
  derived and/or modified CDS sequence (opt4) from hemagglutinin__InfluenzaA__AFG31436

SEQ ID NO: 168508 - RNA, 1701 nt, Artificial Sequence; identical to SEQ ID NO: 162729
  derived and/or modified CDS sequence (opt4) from hemagglutinin__InfluenzaA__AFG31446

SEQ ID NO: 168509 - RNA, 1701 nt, Artificial Sequence; identical to SEQ ID NO: 162729
  derived and/or modified CDS sequence (opt4) from hemagglutinin__InfluenzaA__AFG31456

SEQ ID NO: 168510 - RNA, 1701 nt, Artificial Sequence; identical to SEQ ID NO: 162729
  derived and/or modified CDS sequence (opt4) from hemagglutinin__InfluenzaA__AFG31466

SEQ ID NO: 168511 - RNA, 1701 nt, Artificial Sequence; identical to SEQ ID NO: 163831
  derived and/or modified CDS sequence (opt4) from hemagglutinin__InfluenzaA__AFG31486

SEQ ID NO: 168512 - RNA, 1701 nt, Artificial Sequence; identical to SEQ ID NO: 162729
  derived and/or modified CDS sequence (opt4) from hemagglutinin__InfluenzaA__AFG31496

SEQ ID NO: 168513 - RNA, 1701 nt, Artificial Sequence; identical to SEQ ID NO: 162729
  derived and/or modified CDS sequence (opt4) from hemagglutinin__InfluenzaA__AFG31506

SEQ ID NO: 168514 - RNA, 1701 nt, Artificial Sequence; identical to SEQ ID NO: 162729
  derived and/or modified CDS sequence (opt4) from hemagglutinin__InfluenzaA__AFG31516

SEQ ID NO: 168515 - RNA, 1701 nt, Artificial Sequence; identical to SEQ ID NO: 162820
  derived and/or modified CDS sequence (opt4) from hemagglutinin__InfluenzaA__AFG31526

SEQ ID NO: 168516 - RNA, 1701 nt, Artificial Sequence; identical to SEQ ID NO: 162729
  derived and/or modified CDS sequence (opt4) from hemagglutinin__InfluenzaA__AFG31536

SEQ ID NO: 168517 - RNA, 1701 nt, Artificial Sequence; identical to SEQ ID NO: 165284
  derived and/or modified CDS sequence (opt4) from hemagglutinin__InfluenzaA__AFG31546

SEQ ID NO: 168518 - RNA, 1701 nt, Artificial Sequence; identical to SEQ ID NO: 165284
  derived and/or modified CDS sequence (opt4) from hemagglutinin__InfluenzaA__AFG31556

SEQ ID NO: 168519 - RNA, 1701 nt, Artificial Sequence; identical to SEQ ID NO: 162729
  derived and/or modified CDS sequence (opt4) from hemagglutinin__InfluenzaA__AFG31566

SEQ ID NO: 168520 - RNA, 1701 nt, Artificial Sequence; identical to SEQ ID NO: 162971
  derived and/or modified CDS sequence (opt4) from hemagglutinin__InfluenzaA__AFG31586

SEQ ID NO: 168521 - RNA, 1701 nt, Artificial Sequence; identical to SEQ ID NO: 162971
  derived and/or modified CDS sequence (opt4) from hemagglutinin__InfluenzaA__AFG31596

SEQ ID NO: 168522 - RNA, 1701 nt, Artificial Sequence; identical to SEQ ID NO: 162971
  derived and/or modified CDS sequence (opt4) from hemagglutinin__InfluenzaA__AFG31606

SEQ ID NO: 168523 - RNA, 1701 nt, Artificial Sequence; identical to SEQ ID NO: 162971
  derived and/or modified CDS sequence (opt4) from hemagglutinin__InfluenzaA__AFG31616

SEQ ID NO: 168524 - RNA, 1701 nt, Artificial Sequence; identical to SEQ ID NO: 162971
  derived and/or modified CDS sequence (opt4) from hemagglutinin__InfluenzaA__AFG31626

SEQ ID NO: 168525 - RNA, 1701 nt, Artificial Sequence; identical to SEQ ID NO: 162729
  derived and/or modified CDS sequence (opt4) from hemagglutinin__InfluenzaA__AFG31636

SEQ ID NO: 168526 - RNA, 1701 nt, Artificial Sequence; identical to SEQ ID NO: 162729
  derived and/or modified CDS sequence (opt4) from hemagglutinin__InfluenzaA__AFG31646

SEQ ID NO: 168527 - RNA, 1701 nt, Artificial Sequence; identical to SEQ ID NO: 163893
  derived and/or modified CDS sequence (opt4) from hemagglutinin__InfluenzaA__AFG31656

SEQ ID NO: 168528 - RNA, 1701 nt, Artificial Sequence; identical to SEQ ID NO: 163893
  derived and/or modified CDS sequence (opt4) from hemagglutinin__InfluenzaA__AFG31666

SEQ ID NO: 168529 - RNA, 1701 nt, Artificial Sequence
  derived and/or modified CDS sequence (opt4) from hemagglutinin__InfluenzaA__AFG71865
augaagaccaucaucgcccugagcuacaucuucugccuggcccugggccaggaccugcccggcaacgacaacagcaccgccacccugugccugggccaccacgccgugcccaacggcacccuggugaagaccaucaccaacgaccagaucgaggugaccaacgccaccgagcuggugcagagcagcagcaccggcaagaucugcaacaacccccacagaauccuggacggcaucgacugcacccugaucgacgcccugcugggcgacccccacugcgacguguuccagaacgagaccugggaccuguucguggagagaagcaaggccuucagcaacugcuaccccuacgacgugcccgacuacgccagccugagaagccugguggccagcagcggcacccuggaguucaucaccgagggcuucaccuggaccggcgugacccagaacggcggcagcaacgccugcaagagaggccccggcaucggcuucuucagcagacugaacuggcugaccaagagcggcagcaccuaccccgugcugaacgugaccaugcccaacaacgacaacuucgacaagcuguacaucuggggcgugcaccaccccagcaccaaccaggagcagaccagccuguacgugcaggccagcggcagagugaccgugagcaccagaagaagccagcagaccaucauccccaacaucggcagcagacccugggugagaggccugagcagcagaaucagcaucuacuggaccaucgugaagcccggcgacgugcuggugaucaacagcaacggcaaccugaucgcccccagaggcuacuucaagaugagaaccggcaagagcagcaucaugagaagcgacgcccccaucgacaccugcaucagcgagugcaucacccccaacggcagcauccccaacgacaagcccuuccagaacgugaacaagaucaccuacggcgccugccccaaguacgugaagcagaacacccugaagcuggccaccggcaugagaaacgugcccgagaagcagaccagaggccuguucggcgccaucgccggcuucaucgagaacggcugggagggcaugaucgacggcugguacggcuucagacaccagaacagcgagggcaccggccaggccgccgaccugaagagcacccaggccgccaucgaccagaucaacggcaagcugaacagagugaucgagaagaccaacgagaaguuccaccagaucgagaaggaguucagcgagguggagggcagaauccaggaccuggagaaguacguggaggacaccaagaucgaccuguggagcuacaacgccgagcugcugguggcccuggagaaccagcacaccaucgaccugaccgacagcgagaugaacaagcuguucgagaagaccagaagacagcugagagagaacgccgaggacaugggcaacggcugcuucaagaucuaccacaagugcgacaacgccugcaucgagagcaucagaaacggcaccuacgaccacgacguguacagagacgaggcccugaacaacagauuccagaucaagggcguggagcugaagagcggcuacaaggacuggauccuguggaucagcuucgccaucagcugcuuccugcugugcguggugcugcugggcuucaucaugugggccugccagagaggcaacaucagaugcaacaucugcaucuga

SEQ ID NO: 168530 - RNA, 1701 nt, Artificial Sequence; identical to SEQ ID NO: 161616
  derived and/or modified CDS sequence (opt4) from hemagglutinin__InfluenzaA__AFG71876

SEQ ID NO: 168531 - RNA, 1701 nt, Artificial Sequence
  derived and/or modified CDS sequence (opt4) from hemagglutinin__InfluenzaA__AFG71898
augaagaccaucaucgcccugagcuaccuguucugccuggccuucggccaggaccugcccggcaacgacaacagcaccgccacccugugccugggccaccacgccgugcccaacggcacccuggugaagaccaucaccgacgaccagaucgaggugaccaacgccaccgagcuggugcagagcagcagcaccggcaagaucugcaacaacccccacagaauccuggacggcaucgacugcacccugaucgacgcccugcugggcgacccccacugcgacguguuccagaacgagaccugggaccuguucguggagagaagcaaggccuucagcaacugcuaccccuacgacgugcccgacuacgccagccugagaagccugguggccagcagcggcacccuggaguucaccaccgagggcuucaccuggaccggcgugacccagaacggcggcagcaacgccugcaagagaggccccggcagcggcuucuucagcagacugaacuggcugaccaagagcggcagcaccuaccccgugcugaacgugaccaugagcaacaacgacaacuucgacaagcuguacaucuggggcgugcaccaccccagcaccaaccaggagcagaccagccuguacgugcaggccagcggcagagugaccgugagcaccagaagaagccagcagaccaucauccccaacaucggcagcagacccugggugagaggccugagcagcagaaucagcaucuacuggaccaucgugaagcccggcgacgugcuggugaucaacagcaacggcaaccugaucgcccccagaggcuacuucaagaugagaaccggcaagagcagcaucaugagaagcgacgcccccaucgacaccugcgugagcgagugcaucacccccaacggcagcauccccaacgacaagcccuuccagaacgugaacaagaucaccuacggcgccugccccaaguacgugaagcagaacacccugaagcuggccaccggcaugagaaacgugcccgagaagcagaccagaggccuguucggcgccaucgccggcuucaucgagaacggcugggagggcaugaucgacggcugguacggcuucagacaccagaacagcgagggcaccggccaggccgccgaccugaagagcacccaggccgccaucgaccagaucaacggcaagcugaacagagugaucgagaagaccaacgagaaguuccaccagaucgagaaggaguucagcgagguggagggcagaauccaggaccuggagaaguacguggaggacaccaagaucgaccuguggagcuacaacgccgagcugcugguggcccuggagaaccagcacaccaucgaccugaccgacagcgagaugaacaagcuguucgagaagaccagaagacagcugagagagaacgccgaggacaugggcaacggcugcuucaagaucuaccacaagugcgacaacgccugcaucgagagcaucagaaacggcaccuacgaccacgacguguacagagacgaggcccugaacaacagauuccagaucaagggcguggagcugaagagcggcuacaaggacuggauccuguggaucagcuucgccaucagcugcuuccugcugugcguggugcugcugggcuucaucaugugggccugccagagaggcaacaucagaugcaacaucugcaucuga

SEQ ID NO: 168532 - RNA, 1701 nt, Artificial Sequence
  derived and/or modified CDS sequence (opt4) from hemagglutinin__InfluenzaA__AFG71920
augaagaccaucaucgcccugagcuacaucuucugccuggcccugggccaggaccugcccggcaacgacaacagcaccgccacccugugccugggccaccacgccgugcccaacggcacccuggugaagaccaucaccaacgaccagaucgaggugaccaacgccaccgagcuggugcagagcagcagcaccggcaagaucugcaacaacccccacagaauccuggacggcaucaacugcacccugaucgacgcccugcugggcgacccccacugcgacguguuccaggacgagaccugggaccuguucguggagagaagcaaggccuucagcaacugcuaccccuacgacgugcccgacuacgccagccugagaagccugaucgccagcagcggcacccuggaguucaucaccgagggcuucaccuggaccggcgugacccagaacggcggcagcaacgccugcaagagaggccccggcagcggcuucuucagcagacugaacuggcugaccaagagcggcagcaccuaccccgugcugaacgugaccaugcccaacaacgacaacuucgacaagcuguacaucuggggcgugcaccaccccagcaccaaccaggagcagaccagccuguacgugcaggccagcggcagagugaccgugagcaccagaagaagccagcagaccaucauccccaacaucggcagcagacccugggugagaggccugagcagcagaaucagcaucuacuggaccaucgugaagcccggcgacgugcuggugaucaacagcaacggcaaccugaucgcccccagaggcuacuucaagaugagaaccggcaagagcagcaucaugagaagcgacgcccccaucgacaccugcaucagcgagugcaucacccccaacggcagcauccccaacgacaagcccuuccagaacgugaacaagaucaccuacggcgccugccccaaguacgugaagcagaacacccugaagcuggccaccggcaugagaaacgugcccgagaagcagaccagaggccuguucggcgccaucgccggcuucaucgagaacggcugggagggcaugaucgacggcugguacggcuucagacaccagaacagcgagggcaccggccaggccgccgaccugaagagcacccaggccgccaucgaccagaucaacggcaagcugaacagagugaucgagaagaccaacgagaaguuccaccagaucgagaaggaguucagcgagguggagggcagaauccaggaccuggagaaguacguggaggacaccaagaucgaccuguggagcuacaacgccgagcugcugguggcccuggagaaccagcacaccaucgaccugaccgacagcgagaugaacaagcuguucgagaagaccagaagacagcugagagagaacgccgaggacaugggcaacggcugcuucaagaucuaccacaagugcgacaacgccugcaucgagagcaucagaaacggcaccuacgaccacgacguguacagagacgaggcccugaacaacagauuccagaucaagggcguggagcugaagagcggcuacaaggacuggauccuguggaucagcuucgccaucagcugcuuccugcugugcguggugcugcugggcuucaucaugugggccugccagagaggcaacaucagaugcaacaucugcaucuga

SEQ ID NO: 168533 - RNA, 1701 nt, Artificial Sequence
  derived and/or modified CDS sequence (opt4) from hemagglutinin__InfluenzaA__AFG71931
augaagaccaucaucgcccugagcuacaucuucugccuggugaucggccaggaccugcccggcaacgagaacagcaccgccacccugugccugggccaccacgccgugcccaacggcacccuggugaagaccaucaccaacgaccagaucgaggugaccaacgccaccgagcuggugcagagcagcagcaccggcaagaucugcaacaacccccacagaauccuggacggcaucgacugcacccugaucgacgcccugcugggcgacccccacugcgacggcuuccagaacgagaccugggaccuguucguggagagaagcaaggccuucagcaacugcuaccccuacgacgugcccgacuacgccagccugagaagccugguggccagcagcggcacccuggaguucaucaccgagggcuucaccuggaccggcgugacccagaacggcggcagcaacgccugcaagagaggccccggcaucggcuucuucagcagacugaacuggcugaccaagagcggcagcaccuaccccgugcugaacgugaccaugcccaacaacgacaacuucgacaagcuguacaucuggggcgugcaccaccccagcaccaaccaggagcagaccagccuguacgugcaggccagcggcagagugaccgugagcaccagaagaagccagcagaccaucauccccaacaucggcagcagacccugggugagaggccugagcagcagaaucagcaucuacuggaccaucgugaagcccggcgacgugcuggugaucaacagcaacggcaaccugaucgcccccagaggcuacuucaagaugagaaccggcaagagcagcaucaugagaagcgacgcccccaucgacaccugcaucagcgagugcaucacccccaacggcagcauccccaacgacaagcccuuccagaacgugaacaagaucaccuacggcgccugccccaaguacgugaagcagaacacccugaagcuggccaccggcaugagaaacgugcccgagaagcagaccagaggccuguucggcgccaucgccggcuucaucgagaacggcugggagggcaugaucgacggcugguacggcuucagacaccagaacagcgagggcaccggccaggccgccgaccugaagagcacccaggccgccaucgaccagaucaacggcaagcugaacagagugaucgagaagaccaacgagaaguuccaccagaucgagaaggaguucagcgagguggagggcagaauccaggaccuggagaaguacguggaggacaccaagaucgaccuguggagcuacaacgccgagcugcugguggcccuggagaaccagcacaccaucgaccugaccgacagcgagaugaacaagcuguucgagaagaccagaagacagcugagagagaacgccgaggacaugggcaacggcugcuucaagaucuaccacaagugcgacaacgccugcaucgagagcaucagaaacggcaccuacgaccacgacguguacagagacgaggcccugaacaacagauuccagaucaagggcguggagcugaagagcggcuacaaggacuggauccuguggaucagcuucgccaucagcugcuuccugcugugcguggugcugcugggcuucaucaugugggccugccagagaggcaacaucagaugcaacaucugcaucuga

SEQ ID NO: 168534 - RNA, 1701 nt, Artificial Sequence
  derived and/or modified CDS sequence (opt4) from hemagglutinin__InfluenzaA__AFG71942
augaagaccaucaucgcccugagcuacaucuucuaccuggcccugagccaggaccugcccggcaacgacaacagcaaggccacccugugccugggccaccacgccgugcccaacggcacccuggugaagaccaucaccgacgaccagaccgaggugaccaacgccaccgagcuggugcagagcagcagcaccggcaagaucugcaacaacccccacagaauccuggacggcauggacugcacccugaucgacgcccugcugggcgacccccacugcgacguguuccagaacgagaccugggaccuguucguggagagaagcaaggccuucagcaacugcuaccccuacgacgugcccgacuacgccagccugagaagccugguggccagcagcggcacccuggaguucaucaccgagggcuucaccuggaccgaggugacccagaacggcggcagcaucgccugcaagagaggccccgacagcggcuucuucagcagacugaacuggcugaccaagagcggcagaaccuaccccgugcugaacgugaccaugcccaacaacgacaacuucgacaagcuguacaucuggggcgugcaccaccccagcaccgaccaggagcagaccaaccuguacgugcagaccagcggcagagugaccgugagcaccagaagaagccagcagaccaucauccccaacaucggcagcagacccugggugagaggccugagcagcagaaucagcaucuacuggaccaucgugaagcccggcgacgugcuggugaucaacagcaacggcaaccugaucgcccccagaggcuacuucaagaugagaaccggcaagagcagcaucaugagaagcgacgcccccaucgacaccugcaucagcgagugcaucacccccaacggcagcauccccaacgacaagcccuuccagaacgugaacaagaucaccuacggcgccugccccaaguacgugaagcagaacacccugaagcuggccaccggcaugagaaacgugcccgagaagcagaccagaggccuguucggcgccaucgccggcuucaucgagaacggcugggagggcaugaucgacggcugguacggcuucagacaccagaacagcgagggcaccggccaggccgccgaccugaagagcacccaggccgccaucgaccagaucaacggcaagcugaacagaaucaucgagaagaccaacgagaaguuccaccagaucgagaaggaguucagcgagguggagggcagaauccaggaccuggagaaguacguggaggacaccaagaucgaccuguggagcuacaacgccgagcugcugguggcccuggagaaccagcacaccaucgaccugaccgacagcgagaugaacaagcuguucgagaagaccagaagacagcugagagagaacgccgaggacaugggcaacggcugcuucaagaucuaccacaagugcgacaacgccugcaucgagagcaucagaaacggcaccuacgaccacgacguguacagagacgaggcccugaacaacagauuccagaucaagggcguggagcugaagagcggcuacaaggacuggauccuguggaucagcuucgccaucagcugcuuccugcugugcguggugcugcugggcuucaucaugugggccugccagagaggcaacaucagaugcaacaucugcaucuga

SEQ ID NO: 168535 - RNA, 1701 nt, Artificial Sequence
  derived and/or modified CDS sequence (opt4) from hemagglutinin__InfluenzaA__AFG71953
augaagaccaucaucgcccugagcuacaucuucugccuggugcugggccaggaccugcccggcaacgacaagagcaccgccacccugugccugggccaccacgccgugcccaacggcacccuggugaagaccaucaccaacgaccagaucgaggugaccaacgccaccgagcuggugcagagcagcagcaccggcaagaucugcaacaacccccacagaauccuggacggcaucgacugcacccugaucgacgcccugcugggcgacccccacugcgacggcuuccagaacgagaccugggaccuguucguggagagaagcaaggccuucagcaacugcuaccccuacgacgugcccgacuacgccagccugagaagccugguggccagcagcggcacccuggaguucaucaccgagggcuucaccuggaccggcgugacccagaacggcggcagcaacgccugcaagagaggccccggcagcggcuucuucagcagacugaacuggcugaccaagagcggcagcaccuaccccgugcugaacgugaccaugcccaacaacgacaacuucgacaagcuguacaucuggggcgugcaccaccccagcaccaaccaggagcagaccagccuguacgugcaggccagcggcagagugaccgugagcaccaagagaagccagcagaccaucauccccaacaucggcagcagacccugggugagaggccccagcagcagaaucagcaucuacuggaccaccgugaagcccggcgacauccugaucaucaacagcaacggcaaccugaucgcccccagaggcuacuucaagaugagaaccggcaagagcagcaucaugagaagcgacgcccccaucggcgccugcaucagcgagugcaucacccccaacggcagcauccccaacgacaagcccuuccagaacgugaacaagaucaccuacggcgccugccccaaguacgugaagcagaacacccugaagcuggccaccggcaugagaaacgugcccgagaagcagaccagaggccuguucggcgccaucgccggcuucaucgagaacggcugggagggcaugaucgacggcugguacggcuucagacaccagaacagcgagggcaccggccaggccgccgaccugaagagcacccaggccgccaucgaccagaucaacggcaagcugaacagagugaucgagaagaccaacgagaaguuccaccagaucgagaaggaguucagcgagguggagggcagaauccaggaccuggagaaguacguggaggacaccaagaucgaccuguggagcuacaacgccgagcugcugguggcccuggagaaccagcacaccaucgaccugaccgacagcgagaugaacaagcuguucgagaagaccagaagacagcugagagagaacgccgaggacaugggcaacggcugcuucaagaucuaccacaagugcgacaacgccugcaucggcagcaucagaaacggcaccuacgaccacgacguguacagagacgaggcccugaacaacagauuccagaucaagggcguggagcugaagagcggcuacaaggacuggauccuguggaucagcuucgccaucagcugcuuccugcugugcguggugcugcugggcgugaucaugugggccugccagaagggcaacaucagaugcaacaucugcaucuga

SEQ ID NO: 168536 - RNA, 1701 nt, Artificial Sequence; identical to SEQ ID NO: 160365
  derived and/or modified CDS sequence (opt4) from hemagglutinin__InfluenzaA__AFG71975

SEQ ID NO: 168537 - RNA, 1701 nt, Artificial Sequence
  derived and/or modified CDS sequence (opt4) from hemagglutinin__InfluenzaA__AFG71996
augaagaccaucaucgcccugagcuacaucuucugccuggugcugggccagaacuuccccggcaacgacaacagcaccgccacccugugccugggccaccacgccgugcccaacggcacccuggugaagaccaucaccaacgaccagaucgaggugaccaacgccaccgagcuggugcagagcagcagcaccggcaagaucugcaacaacccccacagaauccuggacggcaucgacugcacccugaucgacgcccugcugggcgacccccacugcgacggcuuccagaacgagaccugggaccuguucguggagagaagcaaggccuucagcaacugcuaccccuacgacgugcccgacuacgccagccugagaagccugguggccagcagcggcacccuggaguucaucaacgagggcuucaccuggaccggcgugacccagaacggcggcagcaacgccugcaagagaggccccgacaucggcuucuucagcagacugaacuggcuguacaagagcggcaacaccuaccccgugcugaacgugagcaugcccaacaacgacaacuucgacaagcuguacaucuggggcgugcaccaccccagcaccgaccaggagcagaccagccuguacgugcaggccagcggcagagugaccgugagcaccaagagaagccagcagaccaucauccccaacaucggcagcagacccugggugagaggccugagcagcagaaucagcaucuacuggaccaucgugaagcccggcgacauccuggugaucaacagcaacggcaaccugaucgcccccagaggcuacuucaagaugagaaccggcaagagcagcaucaugagaagcgacgccagcaucggcaccugcaucagcgagugcaucacccccaacggcagcauccccaacgacaagcccuuccagaacgugaacaagaucaccuacggcgccugccccaaguacgugaagcagaacacccugaagcuggccaccggcaugagaaacgugcccgagaagcagaccagaggcaucuucggcgccaucgccggcuucaucgagaacggcugggagggcaugaucgacggcugguacggcuucagacaccagaacagcgagggcaccggccaggccgccgaccugaagagcacccaggccgccaucgaccagaucaacggcaagcugaacagaaucaucgagaagaccaacgagaaguuccaccagaucgagaaggaguucagcgagguggagggcagaauccaggaccuggagaaguacguggaggacaccaagaucgaccuguggagcuacaacgccgagcugcugguggcccuggagaaccagcacaccaucgaccugaccgacagcgagaugaacaagcuguucgagaagaccagaagacagcugagagagaacgccgaggacaugggcaacggcugcuucaagaucuaccacaagugcgacaacgccugcaucggcagcaucagaaacggcaccuacgaccacgacguguacagagacgaggcccugaacaacagauuccagaucaagggcguggagcugaagagcggcuacaaggacuggauccuguggaucagcuucgccaucagcugcuuccugcugugcguggugcugcugggcuucaucaugugggccugccagaagggcaacaucagaugcaacaucugcaucuga

SEQ ID NO: 168538 - RNA, 1701 nt, Artificial Sequence
  derived and/or modified CDS sequence (opt4) from hemagglutinin__InfluenzaA__AFG72007
augaagaccaucaucgcccugagcuacaucuucugccuggugcugggcagagacuuccccagaaacgacaacagcaccgccacccugugccugggccaccacgccgugcccaacggcacccuggugaagaccaucaccaacgaccagaucgaggugaccaacgccaccgagcuggugcagagcagcagcaccggcaagaucugcaacaacccccacagaauccuggacggcauggacugcacccugaucgacgcccugcugggcgacccccacugcgacggccugcagaacggcaccugggaccuguucguggagagaagcaaggccuucagcaacugcuaccccuacgacgugcccgacuacgccagccugagaagccugguggccagcagcggcacccuggaguucaucaacgagggcuucaccuggaccggcgugacccagaacggcggcagcaacgccugcaagagaggccccgacagcggcuucuucagcagacugaacuggcuguacaagagcggcaacaccuaccccgugcugaacgugaccaugcccaacaacgacaacuucgacaagcuguacaucuggggcgugcaccaccccagcaccgaccaggaccagaccagccuguacgugcaggccagcggcagagugaccgugagcaccaagagaagccagcagaccgugauccccaacaucggccccagacccugggugagaggccugagcagcagaaucagcaucuacuggaccaucgugaagcccggcgacauccugcugaucaacagcaacggcaaccugaucgcccccagaggcuacuucaagaugagaaccggcaagagcagcaucaugagaagcgacgcccccaucggcaccugcaucagcgagugcaucacccccaacggcagcauccccaacgacaagcccuuccagaacgugaacaagaucaccuacggcgccugccccaaguacgugaagcagaacacccugaagcuggccaccggcaugagaaacgugcccgagaagcagaccagaggcaucuucggcgccaucgccggcuucaucgagaacggcugggagggcaugaucgacggcugguacggcuucagacaccagaacagcgagggcaccggccaggccgccgaccugaagagcacccaggccgccaucgaccagaucaacggcaagcugaacagagugaucgagaagaccaacgagaaguuccaccagaucgagaaggaguucagcgagguggagggcagaauccaggaccuggagaaguacguggaggacaccaagaucgaccuguggagcuacaacgccgagcugcugguggcccuggagaaccagcacaccaucgaccugaccgacagcgagaugaacaagcuguucgagaagaccagaagacagcugagagagaacgccgaggacaugggcaacggcugcuucaagaucuaccacagaugcgacaacgccugcaucggcagcaucagaaacggcaccuacgaccacgacguguacagagacgaggcccugaacaacagauuccagaucaagggcguggagcugaagagcggcuacaaggacuggauccuguggaucagcuucgccaucagcugcuuccugcugugcguggugcugcugggcuucaucaugugggccugccagaagggcaacaucagaugcaacaucugcaucuga

SEQ ID NO: 168539 - RNA, 1701 nt, Artificial Sequence
  derived and/or modified CDS sequence (opt4) from hemagglutinin__InfluenzaA__AFG72029
augaagaccaucaucgcccugagcuacaucuucugccugguguucggccagaaccugcccggcaacgacaacagcaccgccacccugugccugggccaccacgccgugcccaacggcacccuggugaagaccaucaccaacgaccagaucgaggugaccaacgccaccgagcuggugcagagcagcagcaccggcagaaucugcgacagcccccacagaauccuggacggcaagaacugcacccugaucgacgcccugcugggcgacccccacugcgacggcuuccagaacgagaagugggaccuguucguggagagaagcaaggccuucagcaacugcuaccccuacgacgugcccgacuacgccagccugagaagccugaucgccagcagcggcacccuggaguucaucaacgagggcuucaacuggaccggcgugacccagagcggcggcagcuacgccugcaagagaggcagcgacaacagcuucuucagcagacugaacuggcuguacgagagcgagagcaaguaccccgugcugaacgugaccaugcccaacaacggcaacuucgacaagcuguacaucuggggcgugcaccaccccagcaccgacaaggagcagaccaaccuguacgugagagccagcggcagagugaccgugagcaccaagagaagccagcagaccaucauccccaacaucggcagcagacccugggugagaggccugagcagcagaaucagcaucuacuggaccaucgugaagcccggcgacauccugcugaucaacagcaacggcaaccugaucgcccccagaggcuacuucaagaucagaaccggcaagagcagcaucaugagaagcgacgcccccaucggcaccugcagcagcgagugcaucacccccaacggcagcauccccaacgacaagcccuuccagaacgugaacaagaucaccuacggcgccugccccaaguacgugaagcagaacacccugaagcuggccaccggcaugagaaacgugcccgagaagcagaccagaggcaucuucggcgccaucgccggcuucaucgagaacggcugggagggcaugguggacggcugguacggcuucagacaccagaacagcgagggcaccggccaggccgccgaccugaagagcacccaggccgccaucgaccagaucaacggcaagcugaacagagugaucgagaagaccaacgagaaguuccaccagaucgagaaggaguucagcgagguggagggcagaauccaggaccuggagaaguacguggaggacaccaagaucgaccuguggagcuacaacgccgagcugcugguggcccuggagaaccagcacaccaucgaccugaccgacagcgagaugaacaagcuguucgagaagaccagaagacagcugagagagaacgccgaggacaugggcaacggcugcuucaagaucuaccacaagugcgacaacgccugcaucggcagcaucagaaacggcaccuacgaccacgacguguacagagacgaggcccugaacaacagauuccagaucaagggcguggagcugaagagcggcuacaaggacuggauccuguggaucagcuucgccaucagcugcuuccugcugugcguggugcugcugggcuucaucaugugggccugccagaagggcaacaucagaugcaacaucugcaucuga

SEQ ID NO: 168540 - RNA, 1701 nt, Artificial Sequence
  derived and/or modified CDS sequence (opt4) from hemagglutinin__InfluenzaA__AFG72040
augaagaccaucaucgcccugagcuacaucuucugccugguguucgcccagaaccugcccggcaacgacaacagcaccgccacccugugccugggccaccacgccgugcccaacggcacccuggugaagaccaucaccaacgaccagaucgaggugaccaacgccaccgagcuggugcagagcagcagcaccggcagaaucugcgacagcccccacagaauccuggacggcaagaacugcacccugguggacgcccugcugggcgacccccacugcgacggcuuccagaacgagaagugggaccuguucguggagagaagcaaggccuucagcaacugcuaccccuacgacgugcccgacuacgccagccugagaagccugguggccagcagcggcacccuggaguucaucaacgagagcuucaacuggaccggcgugacccagagcggcggcagcuacgccugcaagagaggcagcgacaacagcuucuucagcagacugaacuggcuguacgagagcgagagcaaguaccccgugcugaacgugaccaugcccaacaacggcaacuucgacaagcuguacaucuggggcgugcaccaccccagcaccgacaaggagcagaccaaccuguacgugagagccagcggcagagugaccgugagcaccaagagaagccagcagaccaucauccccaacaucggcagcagacccugggugagaggccugagcagcagaaucagcaucuacuggaccaucgugaagcccggcgacauccugcugaucaacagcaacggcaaccugaucgcccccagaggcuacuucaagaucagaaccggcaagagcagcaucaugagaagcgacgcccccaucggcaccugcagcagcgagugcaucacccccaacggcagcauccccaacgacaagcccuuccagaacgugaacaagaucaccuacggcgccugccccaaguacgugaagcagaacacccugaagcuggccaccggcaugagaaacgugcccgagaagcagaccagaggcaucuucggcgccaucgccggcuucaucgagaacggcugggagggcaugguggacggcugguacggcuucagacaccagaacagcgagggcaccggccaggccgccgaccugaagagcacccaggccgccaucgaccagaucaacggcaagcugaacagagugaucgagaagaccaacgagaaguuccaccagaucgagaaggaguucagcgagguggagggcagaauccaggaccuggagaaguacguggagaacaccaagaucgaccuguggagcuacaacgccgagcugcugguggcccuggagaaccagcacaccaucgaccugaccgacagcgagaugaacaagcuguucgagaagaccagaagacagcugagagagaacgccgaggacaugggcaacggcugcuucaagaucuaccacaagugcgacaacgccugcaucggcagcaucagaaacggcaccuacgaccacgacguguacagagacgaggcccugaacaacagauuccagaucaagggcguggagcugaagagcggcuacaaggacuggauccuguggaucagcuucgccaucagcugcuuccugcugugcguggugcugcugggcuucaucaugugggccugccagaagggcaacaucagaugcaacaucugcaucuga

SEQ ID NO: 168541 - RNA, 1701 nt, Artificial Sequence
  derived and/or modified CDS sequence (opt4) from hemagglutinin__InfluenzaA__AFG72051
augaagaccaucaucgcccugagcuacaucuucugccugguguucgcccagaaccugcccggcaacgacaacagcaccgccacccugugccugggccaccacgccgugcccaacggcacccuggugaagaccaucaccaacgaccagaucgaggugaccaacgccaccgagcuggugcagagcagcagcaccggcagaaucugcgacagcccccacagaauccuggacggcaagaacugcacccugguggacgcccugcugggcgacccccacugcgacggcuuccagaacgagaagugggaccuguucguggagagaagcaaggccuucagcaacugcuaccccuacgacgugcccgacuacgccagccugagaagccugguggccagcagcggcacccuggaguucaucaacgagagcuucaacuggaccggcgugacccagagcggcggcagcuacgccugcaagagaggcagcgacaacagcuucuucagcagacugaacuggcuguacgagagcgagagcaaguaccccgugcugaacgugaccaugcccaacaacggcaacuucgacaagcuguacaucuggggcgugcaccaccccagcaccgacaaggagcagaccaaccuguacgugagagccagcggcagagugaccgugagcaccaagagaaaccagcagaccgugauccccaacaucggcagcagacccugggugagaggccugagcagcagaaucagcaucuacuggaccaucgugaagcccggcgacauccugcugaucaacagcaacggcaaccugaucgcccccagaggcuacuucaagauccacaacggcaagagcagcaucaugagaagcgacgcccccaucggcaccugcagcagcgagugcaucacccccaacggcagcauccccaacgacaagcccuuccagaacgugaacaagaucaccuacggcgccugccccaaguacgugaagcagaacacccugaagcuggccaccggcaugagaaacgugcccgagaagcagaccagaggcaucuucggcgccaucgccggcuucaucgagaacggcugggagggcaugguggacggcugguacggcuucagacacagaaacagcgagggcaccggccaggccgccgaccugaagagcacccaggccgccaucgaccagaucaacggcaagcugaacagagugaucgagaagaccaacgagaaguuccaccagaucgagaaggaguucagcgagguggagggcagaauccaggaccuggagaaguacguggaggacaccaagaucgaccuguggagcuacaacgccgagcugcugguggcccuggagaaccagcacaccaucgaccugaccgacagcgagaugaacaagcuguucgagaagaccagaagacagcugagagagaacgccgaggacaugggcaacggcugcuucaagaucuaccacaagugcgacaacgccugcaucggcagcaucagaaacggcaccuacgaccacgacguguacagagacgaggcccugaacaacagauuccagaucaagggcguggagcugaagagcggcuacaaggacuggauccuguggaucagcuucgccaucagcugcuuccugcugugcguggugcugcugggcuucaucaugugggccugccagaagggcaacaucagaugcaacaucugcaucuga

SEQ ID NO: 168542 - RNA, 1701 nt, Artificial Sequence
  derived and/or modified CDS sequence (opt4) from hemagglutinin__InfluenzaA__AFG72085
augaagaccaucaucgcccugagcuacaucuucugccugguguucgcccagaagcugcccggcaacgacaacagcaccgccacccugugccugggccaccacgccgugcccaacggcacccuggugaagaccaucaccaacgaccagaucgaggugaccaacgccaccgagcuggugcagagcagcagcaccggcagaaucugcgacagcccccacagaauccuggacggcaagaacugcacccugaucgacgcccugcugggcgacccccacugcgacggcuuccagaacgagaagugggaccuguucguggagagaagcaaggccuacagcaacugcuaccccuacgacgugcccgacuacgccagccugagaagccugguggccagcagcggcacccuggaguucaucaacgaggacuucaacuggaucggcgugacccagagcggcggcagcugcgccugcaagagaggcagcgugaacagcuucuucagcagacugaacuggcugcacgagagcgagcagaaguaccccgcccugaacgugaccaugcccaacaacggcaaguucgacaagcuguacaucuggggcgugcaccaccccagcaccgacagagagcagaccaaccuguacgugagagccagcggcagagugaccgugagcaccaagagaagccagcagaccgugauccccaacaucggcagcagacccugggugagaggccugagcagcagaaucagcaucuacuggaccaucgugaagcccggcgacauccugcugaucaacagcaucggcaaccugaucgcccccagaggcuacuucaagaucagaaccggcaagagcagcaucaugagaagcgacgcccccaucggcaccugcagcagcgagugcaucacccccaacggcagcauccccaacgacaagcccuuccagaacgugaacaagaucaccuacggcgccugccccagauacgugaagcagaacacccugaagcuggccaccggcaugagaaacgugcccgagaagcagaccagaggcaucuucggcgccaucgccggcuucaucgagaacggcugggagggcaugguggacggcugguacggcuucagacaccagaacagcgagggcaccggccaggccgccgaccugaagagcacccaggccgccaucgaccagaucaacggcaagcugaacagacugaucgagaagaccaacgagaaguuccaccagaucgagaaggaguucagcgagguggagggcagaauccaggaccuggagaaguacguggaggacaccaagaucgaccuguggagcuacaacgccgagcugcugguggcccuggagaaccagcacaccaucgaccugaccgacagcgagaugaacaagcuguucgagaagaccagaaagcagcugagagagaacgccgaggacaugggcaacggcugcuucaagaucuaccacaagugcgacaacgccugcaucggcagcaucagaaacggcaccuacgaccacgacguguacagagacgaggcccugaacaacagauuccagaucaagggcguggagcugaagagcggcuacaaggacuggauccuguggaucagcuucgccaucagcugcuuccugcugugcguggugcugcugggcuucaucaugugggccugccagaagggcaacaucagaugcaacaucugcaucuga

SEQ ID NO: 168543 - RNA, 1701 nt, Artificial Sequence
  derived and/or modified CDS sequence (opt4) from hemagglutinin__InfluenzaA__AFG72107
augaagaccaucaucgcccugagcuacaucuucugccugguguucgcccagaagcugcccggcaacgacaacagcaccgccacccugugccugggccaccacgccgugcccaacggcacccuggugaagaccaucaccaacgaccagaucgaggugaccaacgccaccgagcuggugcagagcagcagcaccggcagaaucugcgacagcccccacagaauccuggacggcaagaacugcacccugaucgacgcccugcugggcgacccccacugcgacggcuuccagaacgagaagugggaccuguucguggagagaagcaaggccuucagcaacugcuaccccuacgacgugcccgacuacgccagccugagaagccugaucgccagcagcggcacccuggaguucaucaacgaggaguucaacuggaccggcgugacccagaacggcggcagcuacgccugcaagagaggcagcgugaacagcuucuucagcagacugaacuggcugcacgagagcgaguacaaguaccccgcccugaacgugaccaugcccaacaacggcagauucgacaagcuguacaucuggggcgugcaccaccccagcaccgacagagagcagaccaaccuguacgugagagccagcggcagagugaccgugagcaccaagagaagccagcagaccgugauccccaacaucggccccagacccugggugagaggccugagcagcagaaucagcaucuacuggaccaucgugaagcccggcgacauccugcugaucaacagcaccggcaaccugaucgcccccagaggcuacuucaagauccacaccggcaagagcagcaucaugagaagcgacgcccccaucggcaccugcagcagcgagugcaucacccccaacggcagcauccccaacgacaagcccuuccagaacgugaacaagaucaccuacggcgccugccccagauacgugaagcagaacacccugaagcuggccaccggcaugagaaacgugcccgagaagcagaccagaggcaucuucggcgccaucgccggcuucaucgagaacggcugggagggcaugguggacggcugguacggcuucagacaccagaacagcgagggcaccggccaggccgccgaccugaagagcacccaggccgccaucgaccagaucaacggcaagcugaacagacugaucgagaagaccaacgagaaguuccaccagaucgagaaggaguucagcgagguggagggcagaauccaggaccuggagaaguacguggaggacaccaagaucgaccuguggagcuacaacgccgagcugcugguggcccuggagaaccagcacaccaucgaccugaccgacagcgagaugaacaagcuguucgagaagaccagaaagcagcugagagagaacgccgaggacaugggcaacggcugcuucaagaucuaccacaagugcgacaacgccugcaucggcagcaucagaaacggcaccuacgaccacgacguguacagagacgaggccgugaacaacagauuccagaucaagggcguggagcugaagagcggcuacaaggacuggauccuguggaucagcuucgccaucagcugcuuccugcugugcgugauccugcugggcuucaucaugugggccugccagaagggcaacaucagaugcaacaucugcaucuga

SEQ ID NO: 168544 - RNA, 1701 nt, Artificial Sequence
  derived and/or modified CDS sequence (opt4) from hemagglutinin__InfluenzaA__AFG72118
augaagaccaucaucgcccugagcuacaucuucugccugguguucgcccagaagcugcccggcaacgacaacagcaccgccacccugugccugggccaccacgccgugcccaacggcacccuggugaagaccaucaccaacgaccagaucgaggugaccaacgccaccgagcuggugcagaacagcagcaccggcagaaucugcaacagcccccacagaauccuggacggcaagaacugcacccugaucgacgcccugcugggcgacccccacugcgacggcuuccagaacaaggagugggaccuguucguggagagaagcaaggccuacagcaacugcuaccccuacgacgugcccgacuacgccagccugagaagccugguggccagcagcggcacccuggaguucaucaacgaggacuucaacuggaccggcguggcccagagcggcggcagcuacgccugcaagagaggcagcgugaacagcuucuucagcagacugaacuggcugcacgagagcgaguacaaguaccccgcccugaacgugaccaugcccaacaacggcaaguucgacaagcuguacaucuggggcgugcaccaccccagcaccgacagagagcagaccaaccuguacgugagagccagcggcagagugaccgugagcaccaagagaagccagcagaccgugauccccaacaucggcagcagacccugggugagaggccugagcagcagaaucagcaucuacuggaccaucgugaagcccggcgacauccugcugaucaacagcaccggcaaccugaucgcccccagaggcuacuucaagaucagaaccggcaagagcagcaucaugagaagcgacgcccccaucggcaccugcagcagcgagugcaucacccccaacggcagcauccccaacgacaagcccuuccagaacgugaacagaaucaccuacggcgccugccccagauacgugaagcagaacacccugaagcuggccaccggcaugagaaacgugcccgagagacagaccagaggcaucuucggcgccaucgccggcuucaucgagaacggcugggagggcaugguggacggcugguacggcuucagacaccagaacagcgagggcaccggccaggccgccgaccugaagagcacccaggccgccaucgaccagaucaacggcaagcugaacagacugaucgagaagaccaacgagaaguuccaccagaucgagaaggaguucagcgagguggagggcagaauccaggaccuggagaaguacguggaggacaccaagaucgaccuguggagcuacaacgccgagcugcugguggcccuggagaaccagcacaccaucgaccugaccgacagcgagaugaacaagcuguucgagaagaccagaaagcagcugagagagaacgccgaggacaugggcaacggcugcuucaagaucuaccacaagugcgacaacgccugcaucggcagcaucagaaacggcaccuacaaccacgacguguacagagacgaggcccugaacaacagauuccagaucaagggcguggagcugaagagcggcuacaaggacuggauccuguggaucagcuucgccaucagcugcuuccugcugugcguggugcugcugggcuucaucaugugggccugccagaagggcaacaucagaugcaacaucugcaucuga

SEQ ID NO: 168545 - RNA, 1701 nt, Artificial Sequence
  derived and/or modified CDS sequence (opt4) from hemagglutinin__InfluenzaA__AFG72129
augaagaccaucaucgcccugagcuacaucuucugccugguguucgcccagaagcugcccggcaacgacaacagcaccgccacccugugccugggccaccacgccgugcccaacggcacccuggugaagaccaucaccaacgaccagaucgaggugaccaacgccaccgagcuggugcagagcagcagcaccggcagaaucugcgacagcccccacagaauccuggacggcaagaacugcacccugaucgacgcccugcugggcgacccccacugcgacggcuuccagaacaaggagugggaccuguucguggagagaagcaaggccuacagcaacugcuaccccuacgacgugcccgacuacgccagccugagaagccugguggccagcagcggcacccuggaguucaucaacgaggacuucaacuggaccggcguggcccagagcggcggcagcuacgccugcaagagaggcagcgugaacagcuucuucagcagacugaacuggcugcacgagagcgaguacaaguaccccgcccugaacgugaccaugcccaacaacggcaaguucgacaagcuguacaucuggggcgugcaccaccccagcaccgacagagagcagaccaaccuguacgugagagccagcggcagagugaccgugagcaccaagagaagccagcagaccgugauccccaacaucggcagcagacccugggugagaggccugagcagcggcaucagcaucuacuggaccaucgugaagcccggcgacauccugcugaucaacagcaccggcaaccugaucgcccccagaggcuacuucaagaucagaaccggcaagagcagcaucaugagaagcgacgcccccaucggcaccugcagcagcgagugcaucacccccaacggcagcauccccaacgacaagcccuuccagaacgugaacagaaucaccuacggcgccugccccagauacgugaagcagaacacccugaagcuggccaccggcaugagaaacgugcccgagaagcagaccagaggcaucuucggcgccaucgccggcuucaucgagaacggcugggagggcaugguggacggcugguacggcuucagacaccagaacagcgagggcaccggccaggccgccgaccugaagagcacccaggccgccaucaaccagaucaacggcaagcugaacagacugaucgagaagaccaacgagaaguuccaccagaucgagaaggaguucagcgagguggagggcagaauccaggaccuggagaaguacguggaggacaccaagaucgaccuguggagcuacaacgccgagcugcugguggcccuggagaaccagcacaccaucgaccugaccgacagcgagaugaacaagcuguucgagaagaccagaaagcagcugagagagaacgccgaggacaugggcaacggcugcuucaagaucuaccacaagugcgacaacgccugcaucggcagcaucagaaacggcaccuacgaccacgacguguacagagacgaggcccugaacaacagauuccagaucaagggcguggagcugaagagcggcuacaaggacuggauccuguggaucagcuucgccaucagcugcuuccugcugugcguggugcugcugggcuucaucaugugggccugccagaagggcaacaucagaugcaacaucugcaucuga

SEQ ID NO: 168546 - RNA, 1701 nt, Artificial Sequence
  derived and/or modified CDS sequence (opt4) from hemagglutinin__InfluenzaA__AFG72140
augaagaccaucaucgcccugagcuacaucuucugccugguguucgcccagaagcugcccggcaacgacaacagcaccgccacccugugccugggccaccacgccgugcccaacggcacccuggugaagaccaucaccaacgaccagaucgaggugaccaacgccaccgagcuggugcagagcagcagcaccggcagaaucugcgacagcccccacagaauccuggacggcaagaacugcacccugaucgacgcccugcugggcgacccccacugcgacggcuuccagaacaaggagugggaccuguucguggagagaagcaaggccuacagcaacugcuaccccuacgacgugcccgacuacgccagccugagaagccugguggccagcagcggcacccuggaguucaucaacgaggacuucaacuggaccggcguggcccagagcggcggcagcuacgccugcaagagaggcagcgugaacagcuucuucagcagacugaacuggcugcacgagagcgaguacaaguaccccgcccugaacgugaccaugcccaacaacggcaaguucgacaagcuguacaucuggggcgugcaccaccccagcaccgacagagagcagaccaaccuguacgugagagcccugggcagagugaccgugagcaccaagagaagccagcagaccgugauccccaacaucggcagcagacccugggugagaggccugagcagcagaaucagcaucuacuggaccaucgugaagcccggcgacauccugcugaucaacagcaccggcaaccugaucgcccccagaggcuacuucaagaucagaaccggcaagagcagcaucaugagaagcgacgcccccaucggcaccugcagcagcgagugcaucacccccaacggcagcauccccaacaacaagcccuuccagaacgugaacagaaucaccuacggcgccugccccagauacgugaagcagaacacccugaagcuggccaccggcaugagaaacgugcccgagaagcagaccagaggcaucuucggcgccaucgccggcuucaucgagaacggcugggagggcaugguggacggcugguacggcuucagacaccagaacagcgagggcaccggccaggccgccgaccugaagagcacccaggccgccaucgaccagaucaacggcaagcugaacagacugaucgagaagaccaacgagaaguuccaccagaucgagaaggaguucagcgagguggagggcagaauccaggaccuggagaaguacguggaggacaccaagaucgaccuguggagcuacaacgccgagcugcugguggcccuggagaaccagcacaccaucgaccugaccgacagcgagaugaacaagcuguucgagaagaccagaaagcagcugagagagaacgccgaggacaugggcaacggcugcuucaagaucuaccacaagugcgacaacgccugcaucggcagcaucagaaacggcaccuacgaccacgacguguacagagacgaggcccugaacaacagauuccagaucaagggcguggagcugaagagcggcuacaaggacuggauccuguggaucagcuucgccaucagcugcuuccugcugugcguggugcugcugggcuucaucaugugggccugccagaagggcaacaucagaugcaacaucugcaucuga

SEQ ID NO: 168547 - RNA, 1701 nt, Artificial Sequence
  derived and/or modified CDS sequence (opt4) from hemagglutinin__InfluenzaA__AFG72151
augaagaccaucaucgcccugagcuacauccugugccugguguucgcccagaagcugcccggcaacgacaacagcaccgccacccugugccugggccaccacgccgugcccaacggcacccuggugaagaccaucaccaacgaccagaucgaggugaccaacgccaccgagcuggugcagagcagcagcaccggcagaaucugcgacagcccccacagaauccuggacggcaagaacugcacccugaucgacgcccugcugggcgacccccacugcgacggcuuccagaacaaggagugggaccuguucguggagagaagcaaggccuacagcaacugcuaccccuacgacgugcccgacuacgccagccugagaagccugguggccagcagcggcacccuggaguucaccaacgaggacuucaacuggaccggcguggcccagagcggcgagagcuacgccugcaagagaggcagcgugaagagcuucuucagcagacugaacuggcugcacgagagcgacuacaaguaccccgcccugaacgugaccaugcccaacaacggcaaguucgacaagcuguacaucuggggcgugcaccaccccagcaccgacagagagcagaccagccuguacgugagagccagcggcagagugaccgugagcaccaagagaagccagcagaccgugauccccaacaucggcagcagacccugggugagaggccugagcagcagaaucagcaucuacuggaccaucgugaagcccggcgacauccugcugaucaacagcaccggcaaccugaucgcccccagaggcuacuucaagaucagaaccggcaagagcagcaucaugagaagcgacgcccccaucggcaccugcagcagcgagugcaucacccccaacggcagcauccccaacgacaagcccuuccagaacgugaacagaaucaccuacggcgccugccccagauacgugaagcagaacacccugaagcuggccaccggcaugagaaacgugcccgagaagcagaccagaggcaucuucggcgccaucgccggcuucaucgagaacggcugggagggcaugguggacggcugguacggcuucagacaccagaacagcgagggcaccggccaggccgccgaccugaagagcacccaggccgccaucgaccagaucaacggcaagcugaacagacugaucgagaagaccaacgagaaguuccaccagaucgagaaggaguucagcgagguggagggcagaauccaggaccuggagaaguacguggaggacaccaagaucgaccuguggagcuacaacgccgagcugcugguggcccuggagaaccagcacaccaucgaccugaccgacagcgagaugaacaagcuguucgagaagaccagaaagcagcugagagagaacgccgaggacaugggcaacggcugcuucaagaucuaccacaagugcgacaacgccugcaucggcagcaucagaaacggcaccuacgaccacgacguguacagagacgaggcccugaacaacagauuccagaucaagggcguggagcugaagagcggcuacaaggacuggauccuguggaucagcuucgccaucagcugcuuccugcugugcguggugcugcugggcuucaucaugugggccugccagaagggcaacaucagaugcaacaucugcaucuga

SEQ ID NO: 168548 - RNA, 1701 nt, Artificial Sequence
  derived and/or modified CDS sequence (opt4) from hemagglutinin__InfluenzaA__AFG72184
augaagaccaucaucgcccugagcuacauccugugccugguguucgcccagaagcugcccggcaacgacaacagcaccgccacccugugccugggccaccacgccgugcccaacggcacccuggugaagaccaucaccaacgaccagaucgaggugaccaacgccaccgagcuggugcagagcagcagcaccggcagaaucugcgacagcccccacagaauccuggacggcaagaacugcacccugaucgacgcccugcugggcgacccccacugcgacgacuuccagaacaaggagugggaccuguucguggagagaagcaaggccuacagcaacugcuaccccuacgacgugcccgacuacgccagccugagaagccugguggccagcagcggcacccuggaguucaucaacgaggacuucaacuggaccggcguggcccagagcggcgagagcuacgccugcaagagaggcagcgugaagagcuucuucagcagacugaacuggcugcacgagagcgaguacaaguaccccgcccugaacgugaccaugcccaacaacgacaaguucgacaagcuguacaucuggggcgugcaccaccccagcaccgagagagagcagaccagccuguacaucagagccagcggcagagugaccgugagcaccaagagaagccagcagaccgugauccccaacaucggcagcagacccugggugagaggccugagcagcagaaucagcaucuacuggaccaucgugaagcccggcgacauccugcugaucaacagcaccggcaaccugaucgcccccagaggcuacuucaagaucagaaccggcaagagcagcaucaugagaagcgacgcccccaucggcaccugcagcagcgagugcaucacccccaacggcagcauccccaacgacaagcccuuccagaacgugaacagaaucaccuacggcgccugccccagauacgugaagcagaacacccugaagcuggccaccggcaugagaaacgugcccgagaagcagaccagaggcaucuucggcgccaucgccggcuucaucgagaacggcugggagggcaugguggacggcugguacggcuucagacaccagaacagcgagggcaccggccaggccgccgaccugaagagcacccaggccgccaucgaccagaucaacggcaagcugaacagacugaucgagaagaccaacgagaaguuccaccagaucgagaaggaguucagcgagguggagggcagaauccaggaccuggagaaguacguggaggacaccaagaucgaccuguggagcuacaacgccgagcugcugguggcccuggagaaccagcacaccaucgaccugaccgacagcgagaugaacaagcuguucgagaagaccagaaagcagcugagagagaacgccgaggacaugggcaacggcugcuucaagaucuaccacaagugcgacaacgccugcaucggcagcaucagaaacggcaccuacgaccacgacguguacagagacgaggcccugaacaacagauuccagaucaagggcguggagcugaagagcggcuacaaggacuggauccuguggaucagcuucgccaucagcugcuuccugcugugcguggugcugcugggcuucaucaugugggccugccagaagggcaacaucagaugcaacaucugcaucuga

SEQ ID NO: 168549 - RNA, 1701 nt, Artificial Sequence; identical to SEQ ID NO: 168547
  derived and/or modified CDS sequence (opt4) from hemagglutinin__InfluenzaA__AFG72195

SEQ ID NO: 168550 - RNA, 1701 nt, Artificial Sequence
  derived and/or modified CDS sequence (opt4) from hemagglutinin__InfluenzaA__AFG72206
augaagaccaucaucgcccugagcuacauccugugccugguguucgcccagaagcugcccggcaacgacaacagcaccgccacccugugccugggccaccacgccgugcccaacggcacccuggugaagaccaucaccaacgaccagaucgaggugaccaacgccaccgagcuggugcagagcagcagcaccggcaagaucugcgacagcccccacagaauccuggacggcaagaacugcacccugaucgacgcccugcugggcgacccccacugcgacggcuuccagaacaaggagugggaccuguucguggagagaagcaaggccuacagcaacugcuaccccuacgacgugcccgacuacgccagccugagaagccugguggccagcagcggcacccuggaguucaucaacgaggacuucaacuggaccggcguggcccagagcggcgagagcuacgccugcaagagaggcagcgugaagagcuucuucagcagacugaacuggcugcacgagagcgacuacaaguaccccgcccugaacgugaccaugcccaacaacggcaaguucgacaagcuguacaucuggggcgugcaccaccccagcaccgacagagagcagaccagccuguacaucagagccagcggcagagugaccgugagcaccaagagaagccagcagaccgugauccccaacaucggcagcagacccugggugagaggccugagcagcagaaucagcaucuacuggaccaucgugaagcccggcgacauccugcugaucaacagcaccggcaaccugaucgcccccagaggcuacuucaagaucagaaccggcaagagcagcaucaugagaagcgacgcccccaucggcaccugcagcagcgagugcaucacccccaacggcagcauccccaacgacaagcccuuccagaacgugaacagaaucaccuacggcgccugccccagauacgugaagcagaacacccugaagcuggccaccggcaugagaaacgugcccgagaagcagaccagaggcaucuucggcgccaucgccggcuucaucgagaacggcugggagggcaugguggacggcugguacggcuucagacaccagaacagcgagggcaccggccaggccgccgaccugaagagcacccaggccgccaucgaccagaucaacggcaagcugaacagacugaucgagaagaccaacgagaaguuccaccagaucgagaaggaguucagcgagguggagggcagaauccaggaccuggagaaguacguggaggacaccaagaucgaccuguggagcuacaacgccgagcugcugguggcccuggagaaccagcacaccaucgaccugaccgacagcgagaugaacaagcuguucgagaagaccagaaagcagcugagagagaacgccgaggacaugggcaacggcugcuucaagaucuaccacaagugcgacaacgccugcaucggcagcaucagaaacggcaccuacgaccacgacguguacagagacgaggcccugaacaacagauuccagaucaagggcguggagcugaagagcggcuacaaggacuggauccuguggaucagcuucgccaucagcugcuuccugcugugcguggugcugcugggcuucaucaugugggccugccagaagggcaacaucagaugcaacaucugcaucuga

SEQ ID NO: 168551 - RNA, 1701 nt, Artificial Sequence
  derived and/or modified CDS sequence (opt4) from hemagglutinin__InfluenzaA__AFG72217
augaagaccaucaucgcccugagcuacauccugugccugguguucgcccagaagcugcccggcaacgacaacagcaccgccacccugugccugggccaccacgccgugcccaacggcacccuggugaagaccaucaccaacgaccagaucgaggugaccaacgccaccgagcuggugcagagcagcagcaccggcagaaucugcgacagcccccacagaauccuggacggcaagaacugcacccugaucgacgcccugcugggcgacccccacugcgacggcuuccagaacaaggagugggaccuguucguggagagaagcaaggccuacagcaacugcuaccccuacgacgugcccgacuacgccagccugagaagccugguggccagcagcggcacccuggaguucaucaacgaggacuucaacuggaccggcguggcccaggacggcggcagcuacgccugcaagagaggcagcgugaacagcuucuucagcagacugaacuggcugcacaagcuggaguacaaguaccccgcccugaacgugaccaugcccaacaacggcaaguucgacaagcuguacaucuggggcgugcaccaccccagcaccgacagcgaccagaccagccuguacgugagagccagcggcagagugaccgugagcaccaagagaagccagcagaccgugacccccaacaucggcagcagacccugggugagaggccugagcagcagaaucagcaucuacuggaccaucgugaagcccggcgacauccugcugaucagcagcaccggcaaccugaucgcccccagaggcuacuucaagaucagaaacggcaagagcagcaucaugagaagcgacgcccccaucggcaacugcagcagcgagugcaucacccccaacggcagcauccccaacgacaagcccuuccagaacgugaacagaaucaccuacggcgccugccccagauacgugaagcagaacacccugaagcuggccaccggcaugagaaacgugcccgagaagcagaccagaggcaucuucggcgccaucgccggcuucaucgagaacggcugggagggcaugguggacggcugguacggcuucagacaccagaacagcgagggcaccggccaggccgccgacaucaagagcacccaggccgccaucgaccagaucaacggcaagcugaacagacugaucgagaagaccaacgagaaguuccaccagaucgagaaggaguucagcgagguggagggcagaauccaggaccuggagaaguacguggaggacaccaagaucgaccuguggagcuacaacgccgagcugcugguggcccuggagaaccagcacaccaucgaccugaccgacagcgagaugaacaagcuguucgagaagaccagaaagcagcugagagagaacgccgaggacaugggcaacggcugcuucaagaucuaccacaagugcgacaacgccugcaucggcagcaucagaaacggcaccuacgaccacgacguguacagagacgaggcccugaacaacagauuccagaucaagggcguggagcugaagagcggcuacaaggaccugauccuguggaucagcuucgccaucagcugcuuccugcugugcguggugcugcugggcuucaucaugugggccugccagaagggcaacaucagaugcaacaucugcaucuga

SEQ ID NO: 168552 - RNA, 1701 nt, Artificial Sequence
  derived and/or modified CDS sequence (opt4) from hemagglutinin__InfluenzaA__AFG72228
augaagaccaucaucgcccugagcuacauccugugccugguguucgcccagaagcugcccggcaacgacaacagcaccgccacccugugccugggccaccacgccgugcccaacggcacccuggugaagaccaucaccaacgaccagaucgaggugaccaacgccaccgagcuggugcagagcagcagcaccggcagaaucugcgacagcccccacagaauccuggacggcaagaacugcacccugaucgacgcccugcugggcgacccccacugcgacggcuuccagaacaaggagugggaccuguucguggagagaagcaaggccuacagcaacugcuaccccuacgacgugcccgacuacgccagccugagaagccugguggccagcagcggcacccuggaguucaccaacgaggacuucaacuggaccggcguggcccagagcggcgagagcuacgccugcaagagaggcagcgugaagagcuucuucagcagacugaacuggcugcacgagagcgacuacaaguaccccgagcugaacgugaccaugcccaacaacggcaaguucgacaagcuguacaucuggggcgugcaccaccccagcaccgacagagagcagaccagccuguacgugagagccagcggcagagugaccgugagcaccaagagaagccagcagaccgugauccccaacaucggcagcagacccugggugagaggccugagcagcagaaucagcaucuacuggaccaucgugaagcccggcgacauccugcugaucaacagcaccggcaaccugaucgcccccagaggcuacuucaagaucagaaccggcaagagcagcaucaugagaagcgacgcccccaucggcaccugcagcagcgagugcaucacccccaacggcagcauccccaacgacaagcccuuccagaacgugaacagaaucaccuacggcgccugccccagauacgugaagcagaacacccugaagcuggccaccggcaugagaaacgugcccgagaagcagaccagaggcaucuucggcgccaucgccggcuucaucgagaacggcugggagggcaugguggacggcugguacggcuucagacaccagaacagcgagggcaccggccaggccgccgaccugaagagcacccaggccgccaucgaccagaucaacggcaagcugaacagacugaucgagaagaccaacgagaaguuccaccagaucgagaaggaguucagcgagguggagggcagaauccaggaccuggagaaguacguggaggacaccaagaucgaccuguggagcuacaacgccgagcugcugguggcccuggagaaccagcacaccaucgaccugaccgacagcgagaugaacaagcuguucgagaagaccagaaagcagcugagagagaacgccgaggacaugggcaacggcugcuucaagaucuaccacaagugcgacaacgccugcaucggcagcaucagaaacggcaccuacgaccacgacguguacagagacgaggcccugaacaacagauuccagaucaagggcguggagcugaagagcggcuacaaggacuggauccuguggaucagcuucgccaucagcugcuuccugcugugcguggugcugcugggcuucaucaugugggccugccagaagggcaacaucagaugcaacaucugcaucuga

SEQ ID NO: 168553 - RNA, 1701 nt, Artificial Sequence
  derived and/or modified CDS sequence (opt4) from hemagglutinin__InfluenzaA__AFG72239
augaagaccaucaucgcccugagcuacauccugugccuggugcuggcccagaagcugcccggcagcgacaacagcaccgccacccugugccugggccaccacgccgugcccaacggcacccuggugaagaccaucaccaacgaccagaucgaggugaccaacgccaccgagcuggugcagagcagcaccaccggcagaaucugcgacagcccccacagaauccuggacggcaagaacugcacccugaucgacgcccugcugggcgacccccacugcgacggcuuccagaacaaggagugggaccuguucguggagagaagcaaggccuacagcaacugcuaccccuacgacgugcccgacuacgccagccugagaagccugguggccagcagcggcacccuggaguucaccaacgaggacuucaacuggaccggcguggcccagagcggcgagagcuacgccugcaagagaggcagcgugaagagcuucuucagcagacugaacuggcugcacgagagcgacuacaaguaccccgcccugaacgugaccaugcccaacaacggcaaguucgacaagcuguacaucuggggcgugcaccaccccagcaccgacagagagcagaccagccuguacgugagagccagcggcagagugaccgugagcaccaagagaagccagcagaccgugauccccaacaucggcagcagacccugggugagaggccugagcagcagaaucagcaucuacuggaccaucgugaagcccggcgacauccugcugaucaacagcaccggcaaccugaucgcccccagaggcuacuucaagaucagaaccggcaagagcagcaucaugagaagcgacgcccccaucggcaccugcagcagcgagugcaucacccccaacggcagcauccccaacgacaagcccuuccagaacgugaacagaaucaccuacggcgccugccccagauacgugaagcagaacacccugaagcuggccaccggcaugagaaacgugcccgagaagcagaccagaggcaucuucggcgccaucgccggcuucaucgagaacggcugggagggcaugguggacggcugguacggcuucagacaccagaacagcgagggcaccggccaggccgccgaccugaagagcacccaggccgccaucgaccagaucaacggcaagcugaacagacugaucgagaagaccaacgagaaguuccaccagaucgagaaggaguucagcgagguggagggcagaauccaggaccuggagaaguacguggaggacaccaagaucgaccuguggagcuacaacgccgagcugcugguggcccuggagaaccagcacaccaucgaccugaccgacagcgagaugaacaagcuguucgagaagaccagaaagcagcugagagagaacgccgaggacaugggcaacggcugcuucaagaucuaccacaagugcgacaacgccugcaucggcagcaucagaaacggcaccuacgaccacgacguguacagagacgaggcccugaacaacagauuccagaucaagggcguggagcugaagagcggcuacaaggacuggauccuguggaucagcuucgccaucagcugcuuccugcugugcguggugcugcugggcuucaucaugugggccugccagaagggcaacaucagaugcaacaucugcaucuga

SEQ ID NO: 168554 - RNA, 1701 nt, Artificial Sequence; identical to SEQ ID NO: 168547
  derived and/or modified CDS sequence (opt4) from hemagglutinin__InfluenzaA__AFG72272

SEQ ID NO: 168555 - RNA, 1701 nt, Artificial Sequence
  derived and/or modified CDS sequence (opt4) from hemagglutinin__InfluenzaA__AFG72316
augaagaccaucaucgcccugagccacauccugugccugguguucgcccagaagcugcccggcaacgacaacagcaccgccacccugugccugggccaccacgccgugcccaacggcacccuggugaagaccaucaccaacgaccagaucgaggugaccaacgccaccgagcuggugcagagcagcagcaccggcagaaucugcgacagcccccacagaauccuggacggcaagaacugcacccugaucgacgcccugcugggcgacccccacugcgacggcuuccagaacaaggagugggaccuguucguggagagaagcaaggccuacagcaacugcuaccccuacgacgugcccgacuacgccagccugagaagccugguggccagcagcggcacccuggaguucaucaacgaggacuucaacuggaccggcguggcccaggacggcggcagcuacgccugcaagagaggcagcgugaacagcuucuucagcagacugaacuggcugcacaagcuggaguacaaguaccccgcccugaacgugaccaugcccaacaacggcaaguucgacaagcuguacaucuggggcgugcaccaccccagcaccgacagcgaccagaccagccuguacgugagagccagcggcagagugaccgugagcaccaagagaagccagcagaccgugacccccaacaucggcagcagacccugggugagaggccugagcagcagaaucagcaucuacuggaccaucgugaagcccggcgacauccugcugaucaacagcaccggcaaccugaucgcccccagaggcuacuucaagaucagaaacggcaagagcagcaucaugagaagcgacgugcccaucggcaacugcagcagcgagugcaucacccccaacggcagcauccccaacgacaagcccuuccagaacgugaacagaaucaccuacggcgccugccccagauacgugaagcagaacacccugaagcuggccaccggcaugagaaacgugcccgagaagcagaccagaggcaucuucggcgccaucgccggcuucaucgagaacggcugggagggcaugguggacggcugguacggcuucagacaccagaacagcgagggcaccggccaggccgccgaccugaagagcacccaggccgccaucgaccagaucaacggcaagcugaacagacugaucgagaagaccaacgagaaguuccaccagaucgagaaggaguucagcgagguggagggcagaauccaggaccuggagaaguacguggaggacaccaagaucgaccuguggagcuacaacgccgagcugcugguggcccuggagaaccagcacaccaucgaccugaccgacagcgagaugaacaagcuguucgagaagaccagaaagcagcugagagagaacgccgaggacaugggcaacggcugcuucaagaucuaccacaagugcgacaacgccugcaucggcagcaucagaaacggcaccuacgaccacgacguguacagagacgaggcccugaacaacagauuccagaucaagggcguggagcugaagagcggcuacaaggacuggauccuguggaucagcuucgccaucagcugcuuccugcugugcguggugcugcugggcuucaucaugugggccugccagaagggcaacaucagaugcaacaucugcaucuga

SEQ ID NO: 168556 - RNA, 1701 nt, Artificial Sequence
  derived and/or modified CDS sequence (opt4) from hemagglutinin__InfluenzaA__AFG72339
augaagaccaucaucgcccugagcuacauccugugccugguguucgcccagaagcugcccggcaacgacaacagcaccgccacccugugccugggccaccacgccgugcccaacggcacccuggugaagaccaucaccaacgaccagaucgaggugaccaacgccaccgagcuggugcagagcagcagcaccggcagaaucugcgacagcccccacagaauccuggacggcaagaacugcacccugaucgacgcccugcugggcgacccccacugcgacggcuuccagaacaaggagugggaccuguucguggagagaagcaaggccuacagcaacugcuaccccuacgacgugcccgacuacgugagccugagaagccugguggccagcagcggcacccuggaguucaucaacgaggacuucaacuggaccggcguggcccaggacggcggcagcuacaccugcaagagaggcagcgugaacagcuucuucagcagacugaacuggcugcacaagagcgaguacaaguaccccgcccugaacgugaccaugcccaacaacggcaaguucgacaagcuguacaucuggggcgugcaccaccccagcaccgacagcgaccagaccagccuguacgugagagccagcggcagagugaccgugagcaccaagagaagccagcagaccgugacccccaacaucggcagcagacccugggugagaggccugagcagcagaaucagcaucuacuggaccaucgugaagcccggcgacauccugcugaucaacagcaccggcaaccugaucgcccccagaggcuacuucaagaucagaaacggcaagagcagcaucaugagaagcgacgcccccaucggcaccugcagcagcgagugcaucacccccaacggcagcauccccaacgacaagcccuuccagaacgugaacagaaucaccuacggcgccugccccagauacgugaagcagaacacccugaagcuggccaccggcaugagaaacgugcccgagaagcagaccagaggcaucuucggcgccaucgccggcuucaucgagaacggcugggagggcaugguggacggcugguacggcuucagacaccagaacagcgagggcaccggccaggccgccgaccugaagagcacccaggccgccaucgaccagaucaacggcaagcugaacagacugaucgagaagaccaacgagaaguuccaccagaucgagaaggaguucagcgagguggagggcagaauccaggaccuggagaaguacguggaggacaccaagaucgaccuguggagcuacaacgccgagcugcugguggcccuggagaaccagcacaccaucgaccugaccgacagcgagaugaacaagcuguucgagaagaccagaaagcagcugagagagaacgccgaggacaugggcaacggcugcuucaagaucuaccacaagugcgacaacgccugcaucggcagcaucagaaacggcaccuacgaccacgacguguacagagacgaggcccugaacaacagauuccagaucaagggcguggagcugaagagcggcuacaaggacuggauccuguggaucagcuucgccaucagcugcuuccugcugugcguggugcugcugggcuucaucaugugggccugccagaagggcaacaucagaugcaacaucugcaucuga

SEQ ID NO: 168557 - RNA, 1701 nt, Artificial Sequence
  derived and/or modified CDS sequence (opt4) from hemagglutinin__InfluenzaA__AFG72350
augaagaccaucaucgcccugagcuacauccugugccugguguucgcccagaagcugcccggcaacgacaacagcaccgccacccugugccugggccaccacgccgugcccaacggcacccuggugaagaccaucaccaacgaccagaucgaggugaccaacgccaccgagcuggugcagagcagcagcaccggcagaaucugcgacagcccccacagaauccuggacggcaagaacugcacccugaucgacgcccugcugggcgacccccacugcgacggcuuccagaacaaggagugggaccuguucguggagagaagcaaggccuacagcaacugcuaccccuacgacgugcccgacuacgugagccugagaagccugguggccagcagcggcacccuggaguucaucaacgaggacuucaacuggaccggcguggcccaggacggcagaagcuacgccugcaagagaggcagcgugaacagcuucuucagcagacugaacuggcugcacaagagcgaguacaaguaccccgcccugaacgugaccaugcccaacaacggcaaguucgacaagcuguacaucuggggcgugcaccaccccagcaccgacagcgaccagaccagccuguacgugagagccagcggcagagugaccgugagcaccaagagaagccagcagaccgugacccccaacaucggcagcagacccugggugagaggccugagcagcagaaucagcaucuacuggaccaucgugaagcccggcgacauccugcugaucaacagcaccggcaaccugaucgcccccagaggcuacuucaagaucagaaacggcaagagcagcaucaugagaagcgacgcccccaucggcaucugcagcagcgagugcaucacccccaacggcagcauccccaacgacaagcccuuccagaacgugaacagaaucaccuacggcgccugccccagauacgugaagcagaacacccugaagcuggccaccggcaugagaaacgugcccgagaagcagaccagaggcaucuucggcgccaucgccggcuucaucgagaacggcugggagggcaugguggacggcugguacggcuucagacaccagaacagcgagggcaccggccaggccgccgaccugaagagcacccaggccgccaucgaccagaucaacggcaagcugaacagacugaucgagaagaccaacgagaaguuccaccagaucgagaaggaguucagcgagguggagggcagaauccaggaccuggagaaguacguggaggacaccaagaucgaccuguggagcuacaacgccgagcugcugguggcccuggagaaccagcacaccaucgaccugaccgacagcgagaugaacaagcuguucgagaagaccagaaagcagcugagagagaacgccgaggacaugggcaacggcugcuucaagaucuaccacaagugcgacaacgccugcaucggcagcaucagaaacggcaccuacgaccacgacguguacagagacgaggcccugaacaacagauuccagaucaagggcguggagcugaagagcggcuacaaggacuggauccuguggaucagcuucgccaucagcugcuuccugcugugcguggugcugcugggcuucaucaugugggccugccagaagggcaacaucagaugcaacaucugcaucuga

SEQ ID NO: 168558 - RNA, 1701 nt, Artificial Sequence
  derived and/or modified CDS sequence (opt4) from hemagglutinin__InfluenzaA__AFG72372
augaagaccaucaucgcccugagcuacauccugugccugguguucgcccagaagcugcccggcaacgacaacagcaccgccacccugugccugggccaccacgccgugcccaacggcacccuggugaagaccaucaccaacgaccagaucgaggugaccaacgccaccgagcuggugcagagcagcagcaccggcagaaucugcgacagcccccacagaauccuggacggcaagaacugcacccugaucgacgcccugcugggcgacccccacugcgacggcuuccagaacaaggagugggaccuguucguggagagaagcaaggccuacagcaacugcuaccccuacgacgugcccgacuacgccagccugagaagccugguggccagcagcggcacccuggaguucaucaacgaggacuucaacuggaccggcguggcccaggacggcaagagcuacaccugcaagagaggcagcgugaacagcuucuucagcagacugaacuggcugcacaagcuggaguacaaguaccccgcccugaacgugaccaugcccaacaacggcaaguucgacaagcuguacaucuggggcgugcaccaccccagcaccgacagcgaccagaccagccuguacgugagagccagcggcagagugaccgugagcaccaagagaagccagcagaccgugauccccaacaucggcagcagacccugggugagaggccugagcagcagaaucagcaucuacuggaccaucgugaagcccggcgacauccugcugaucaacagcaccggcaaccugaucgcccccagaggcuacuucaagaucagaaacggcaagagcagcaucaugagaagcgacgcccccaucggcaacugcagcagcgagugcaucacccccaacggcagcauccccaacgacaagcccuuccagaacgugaacagaaucaccuacggcgccugccccagauacgugaagcagaacacccugaagcuggccaccggcaugagaaacgugcccgagaagcagaccagaggcaucuucggcgccaucgccggcuucaucgagaacggcugggagggcaugguggacggcugguacggcuucagacaccagaacagcgagggcaccggccaggccgccgaccugaagagcacccaggccgccaucgaccagaucaacggcaagcugaacagacugaucgagaagaccaacgagaaguuccaccagaucgagaaggaguucagcgagguggagggcagaauccaggaccuggagaaguacguggaggacaccaagaucgaccuguggagcuacaacgccgagcugcugguggcccuggagaaccagcacaccaucgaccugaccgacagcgagaugaacaagcuguucgagagaaccagaaagcagcugagagagaacgccgaggacaugggcaacggcugcuucaagaucuaccacaagugcgacaacgccugcaucggcagcaucagaaacggcaccuacgaccacgacguguacagagacgaggcccugaacaacagauuccagaucaagggcguggagcugaagagcggcuacaaggacuggauccuguggaucagcuucgccaucagcugcuuccugcugugcguggugcugcugggcuucaucaugugggccugccagaagggcaacaucagaugcaacaucugcaucuga

SEQ ID NO: 168559 - RNA, 1701 nt, Artificial Sequence; identical to SEQ ID NO: 161084
  derived and/or modified CDS sequence (opt4) from hemagglutinin__InfluenzaA__AFG72383

SEQ ID NO: 168560 - RNA, 1701 nt, Artificial Sequence
  derived and/or modified CDS sequence (opt4) from hemagglutinin__InfluenzaA__AFG72394
augaagaccaucaucgcccugagcuacauccugugccugguguucgcccagaagcugcccggcaacgacaacagcaccgccacccugugccugggccaccacgccgugcccaacggcacccuggugaagaccaucaccaacgaccagaucgaggugaccaacgccaccgagcuggugcagagcagcagcaccggcagaaucugcgacagcccccacagaauccuggacggcaagaacugcacccugaucgacgcccugcugggcgacccccacugcgacggcuuccagaacaaggagugggaccuguucguggagagaagcaaggccuacagcaacugcuaccccuacgacgugcccgacuacgccagccugagaagccugguggccagcagcggcacccuggaguucaucaacgaggacuucaacuggaccggcguggcccaggacggcaagagcuacgccugcaagagaggcagcgugaacagcuucuucagcagacugaacuggcugcacaagcuggaguacaaguaccccgcccugaacgugaccaugcccaacaacggcaaguucgacaagcuguacaucuggggcgugcaccaccccagcaccgacagcgaccagaccagccuguacgugagagccagcggcagagugaccguggccaccaagagaagccagcagaccgugauccccaacaucggcuucagacccugggugagaggccagagcagcggcaucagcaucuacuggaccaucgugaagcccggcgacauccugcugaucaacagcaccggcaaccugaucgcccccagaggcuacuucaagaucagaaacggcaagagcagcaucaugagaagcgacgcccccaucggcaacugcagcagcgagugcaucacccccaacggcagcauccccaacgacaagcccuuccagaacgugaacagaaucaccuacggcgccugccccagauacgugaagcagaacacccugaagcuggccaccggcaugagaaacgugcccgagaagcagaccagaggcaucuucggcgccaucgccggcuucaucgagaacggcugggagggcaugguggacggcugguacggcuucagacaccagaacagcgagggcaccggccaggccgccgaccugaagagcacccaggccgccaucgaccagaucaacggcaagcugaacagacugaucgagaagaccaacgagaaguuccaccagaucgagaaggaguucagcgagguggagggcagaauccaggaccuggagaaguacguggaggacaccaagaucgaccuguggagcuacaacgccggccugcugguggcccuggagaaccagcacaccaucgaccugaccgacagcgagaugaacaagcuguucgagagaaccagaaagcagcugagagagaacgccgaggacaugggcaacggcugcuucaagaucuaccacaagugcgacaacgccugcaucggcagcaucagaaacggcaccuacgaccacgacguguacagagacgaggcccugaacaacagauuccagaucaagggcguggagcugaagagcggcuacaaggacuggauccuguggaucagcuucgccaucagcugcuuccugcugugcguggugcugcugggcuucaucaugugggccugccagaagggcaacaucagaugcaacaucugcaucuga

SEQ ID NO: 168561 - RNA, 1701 nt, Artificial Sequence
  derived and/or modified CDS sequence (opt4) from hemagglutinin__InfluenzaA__AFG72405
augaagaccaucaucgcccugagcuacauccugugccugguguucgcccagaagcugcccggcaacgacaacagcaccgccacccugugccugggccaccacgccgugcccaacggcacccuggugaagaccaucaccaacgaccagaucgaggugaccaacgccaccgagcuggugcagagcagcagcaccggcagaaucugcgacagcccccacagaauccuggacggcaagaacugcacccugaucgacgcccugcugggcgaccccaacugcgacggcuuccagaacaaggagugggaccuguucguggagagaagcaaggccuacagcaacugcuaccccuacgacgugcccgacuacgccagccugagaagccugguggccagcagcggcacccuggaguucaccaacgaggacuucaacuggaccggcguggcccaggacggcggcagcuacgccugcaagagaggcagcgugaagagcuucuucagcagacugaacuggcugcacaagcuggaguacaaguaccccgcccugaacgugaccaugcccaacaacggcaaguucgacaagcuguacaucuggggcgugcaccaccccagcaccgacagcgaccagaccagccuguacgugagagccagcggcagagugaccgugagcaccaagagaagccagcagaccgugacccccaacaucggcagcagacccugggugagaggccugagcagcagaaucagcaucuacuggaccaucgugaagcccggcgacauccugcugaucaacagcaccggcaaccugaucgcccccagaggcuacuucaagaucagaaacggcaagagcagcaucaugagaagcgacgcccccaucggcaccugcagcagcgagugcaucacccccaacggcagcauccccaacgacaagcccuuccagaacgugaacagaaucaccuacggcgccugccccagauacgugaagcagaacacccugaagcuggccaccggcaugagaaacgugcccgagaagcagaccagaggcaucuucggcgccaucgccggcuucaucgagaacggcugggagggcaugguggacggcugguacggcuucagacaccagaacagcgagggcaccggccaggccgccgaccugaagagcacccaggccgccaucaaccagaucaacggcaagcugaacagacugaucgagaagaccaacgagaaguuccaccagaucgagaaggaguucagcgagguggagggcagaauccaggaccuggagaaguacguggaggacaccaagaucgaccuguggagcuacaacgccgagcugcugguggcccuggagaaccagcacaccaucgaccugaccgacagcgagaugaacaagcuguucgagaagaccagaaagcagcugagagagaacgccgaggacaugggcaacggcugcuucaagaucuaccacaagugcgacaacgccugcaucggcagcaucagaaacggcaccuacgaccacgacguguacagagacgaggcccugaacaacagauuccagaucaagggcguggagcugaagagcggcuacaaggacuggauccuguggaucagcuucgccaucagcugcuuccugcugugcguggugcugcugggcuucaucaugugggccugccagaagggcaacaucagaugcaacaucugcaucuga

SEQ ID NO: 168562 - RNA, 1701 nt, Artificial Sequence
  derived and/or modified CDS sequence (opt4) from hemagglutinin__InfluenzaA__AFG72449
augaagaccaucaucgcccugagcuacauccugugccugguguucgcccagaagcugcccggcaacgacaacagcaccgccacccugugccugggccaccacgccgugcccaacggcacccuggugaagaccaucaccaacgaccagaucgaggugaccaacgccaccgagcuggugcagagcagcagcaccggcagaaucugcuacagcccccacagaauccuggacggcaacaacugcacccugaucgacgcccugcugggcgacccccacugcgacggcuuccagaacaaggagugggaccuguucguggagagaagcaaggccuacagcaacugcuaccccuacgacgugcccgacuacgccagccugagaagccugguggccagcagcggcacccuggaguucaucaacgaggacuucaacuggaccggcguggcccaggacggcaagagcuacgccugcaagagaggcagcgugaagggcuucuucagcagacugaacuggcugcacaagcuggaguacaaguaccccgcccugaacgugaccaugcccaacaacggcaaguucgacaagcuguacaucuggggcgugcaccaccccagcaccgacagcgaccagaccagccuguacgugagagccagcggcggcgugaccgugagcaccaagagaagccagcagaccgugauccccagcaucggcagcagacccugggugagaggccugagcagcagaaucagcaucuacuggaccaucgugaagcccggcgacauccugcugaucaacagcaccggcaaccugaucgcccccagaggcuacuucaagaucagaaacggcaagagcagcaucaugagaagcgacgcccccaucggcaacugcagcagcgagugcaucacccccaacggcagcauccccaacgacaagcccuuccagaacgugaacagaaucaccuacggcgccugccccagauacgugaagcagaacacccugaagcuggccaccggcaugagaaacgugcccgagaagcagaccagaggcaucuucggcgccaucgccggcuucaucgagaacggcugggagggcaugguggacggcugguacggcuucagacaccagaacagcgagggcaccggccaggccgccgaccugaagagcacccaggccgccaucgaccagaucaacggcaagcugaacagacugaucgagaagaccaacgagaaguuccaccagaucgagaaggaguucagcgagguggagggcagaauccaggaccuggagaaguacguggaggacaccaagaucgaccuguggagcuacaacgccgagcugcugguggcccuggagaaccagcacaccaucgaccugaccgacagcgagaugaacaagcuguucgagagaaccagaaagcagcugagagagaacgccgaggacaugggcaacggcugcuucaagaucuaccacaagugcgacaacgccugcaucggcagcaucagaaacggcaccuacgaccacgacguguacagagacgaggcccugaacaacagauuccagaucaagggcguggagcugaagagcggcuacaaggacuggauccuguggaucagcuucgccaucagcugcuuccugcugugcguggugcugcugggcuucaucaugugggccugccagaagggcaacaucagaugcaacaucugcaucuga

SEQ ID NO: 168563 - RNA, 1701 nt, Artificial Sequence; identical to SEQ ID NO: 161113
  derived and/or modified CDS sequence (opt4) from hemagglutinin__InfluenzaA__AFG72460

SEQ ID NO: 168564 - RNA, 1701 nt, Artificial Sequence
  derived and/or modified CDS sequence (opt4) from hemagglutinin__InfluenzaA__AFG72504
augaagaccaucaucgcccugagcuacauccugugccugguguucgcccagaagcugcccggcaacgacaacagcaccgccacccugugccugggccaccacgccgugcccaacggcacccuggugaagaccaucaccaacgaccagaucgaggugaccaacgccaccgagcuggugcagagcagcagcaccggcagaaucugcgacagcccccacagaauccuggacggcaagaacugcacccugaucgacgcccugcugggcgacccccacugcgacggcuuccagaacaaggagugggaccuguucguggagagaagcaaggccuacagcaacugcuaccccuacgacgugcccgacuacgccagccugagaagccugguggccagcagcggcacccuggaguucaucaacgaggacuucaacuggaccggcguggcccaggacggcaagagcuacgccugcaagagaggcagcgugaagagcuucuucagcagacugaacuggcugcacaagcuggaguacaaguaccccgcccugaacgugaccaugcccaacaacggcaaguucgacaagcuguacaucuggggcgugcaccaccccagcaccgacagcgaccagaccagccuguacgugagagccagcggcagagugaccgugagcaccaagagaagccagcagaccgugauccccaacaucggcuucagacccugggugagaggccugagcagcagaaucagcaucuacuggaccaucgugaagcccggcgacauccugcugaucaacagcaccggcaaccugaucgcccccagaggcuacuucaagaucagaaacggcaagagcagcaucaucagaagcgacgcccccaucggcaacugcagcagcgagugcaucacccccaacggcagcauccccaacgacaagcccuuccagaacgugaacagaaucaccuacggcgccugccccagauacgugaagcagaacacccugaagcuggccaccggcaugagaaacgugcccgagaagcagaccagaggcaucuucggcgccaucgccggcuucaucgagaacggcugggagggcaugguggacggcugguacggcuucagacaccagaacagcgagggcaccggccaggccgccgaccugaagagcacccaggccgccaucgaccagaucaacggcaagcugaacagacugaucgagaagaccaacgagaaguuccaccagaucgagaaggaguucagcgagguggagggcagaauccaggaccuggagaaguacguggaggacaccaagaucgaccuguggagcuacaacgccggccugcugguggcccuggagaaccagcacaccaucgaccugaccgacagcgagaugaacaagcuguucgagagaaccagaaagcagcugagagagaacgccgaggacaugggcaacggcugcuucaagaucuaccacaagugcgacaacgccugcaucggcagcaucagaaacggcaccuacgaccacgacguguacagagacgaggcccugaacaacagauuccagaucaagggcguggagcugaagagcggcuacaaggacuggauccuguggaucagcuucgccaucagcugcuuccugcugugcguggugcugcugggcuucaucaugugggccugccagaagggcaacaucagaugcaacaucugcaucuga

SEQ ID NO: 168565 - RNA, 1701 nt, Artificial Sequence
  derived and/or modified CDS sequence (opt4) from hemagglutinin__InfluenzaA__AFG72515
augaagaccaucaucgcccugagcuacauccugugccugguguucgcccagaagcugcccggcaacgacaacagcaccgccacccugugccugggccaccacgccgugcccaacggcacccuggugaagaccaucaccaacgaccagaucgaggugaccaacgccaccgagcuggugcagagcagccccaccggcagaaucugcgacagcccccacagaauccuggacggcaagaacugcacccugaucgacgcccugcugggcgacccccacugcgacggcuuccagaacaaggagugggaccuguucguggagagaagcaaggccuacagcaacugcuaccccuacgacgugcccgacuacgccagccugagaagccugguggccagcagcggcacccuggaguucaucaacgagaacuucaacuggaccggcguggcccaggacggcaagagcuacgccugcaagagaggcagcgugaacagcuucuucagcagacugaacuggcugcacaagcuggaguacaaguaccccgcccugaacgugaccaugcccaacaacggcaaguucgacaagcuguacaucuggggcgugcaccaccccagcaccgacagcgaccagaccagccuguacgugagagccagcggcagagugaccgugagcaccaagagaagccagcagaccgugauccccgacaucggcuacagacccugggugagaggccugagcagcagaaucagcaucuacuggaccaucgugaagcccggcgacauccugcugaucaacagcaccggcaaccugaucgcccccagaggcuacuucaagaucagaaacggcaagagcagcaucaugagaagcgacgcccccaucggcaacugcagcagcgagugcaucacccccaacggcagcauccccaacgacaagcccuuccagaacgugaacagaaucaccuacggcgccugccccagauacgugaagcagaacacccugaagcuggccaccggcaugagaaacgugcccgagaagcagaccagaggcaucuucggcgccaucgccggcuucaucgagaacggcugggagggcaugguggacggcugguacggcuucagacaccagaacagcgagggcaccggccaggccgccgaccugaagagcacccaggccgccaucgaccagaucaacggcaagcugaacagacugguggagaagaccaacgagaaguuccaccagaucgagaaggaguucagcgagguggagggcagaauccaggaccuggagaaguacguggaggacaccaagaucgaccuguggagcuacaacgccgagcugcugguggcccuggagaaccagcacaccaucgaccugaccgacagcgagaugaacaagcuguucgagagaaccagaaagcagcugagagagaacgccgaggacaugggcaacggcugcuucaagaucuaccacaagugcgacaacgccugcaucggcagcaucagaaacggcaccuacgaccacgacguguacagagacgaggcccugaacaacagauuccagaucaagggcguggagcugaagagcggcuacaaggacuggauccuguggaucagcuucgccaucagcugcuuccugcugugcguggugcugcugggcuucaucaugugggccugccagaagggcaacaucagaugcaacaucugcaucuga

SEQ ID NO: 168566 - RNA, 1701 nt, Artificial Sequence
  derived and/or modified CDS sequence (opt4) from hemagglutinin__InfluenzaA__AFG72526
augaagaccaucaucgcccugagcuacauccugugccugguguucgcccagaagcugcccggcaacgacaacagcaccgccacccugugccugggccaccacgccgugcccaacggcacccuggugaagaccaucaccaacgaccagaucgaggugaccaacgccaccgagcuggugcagagcagcagcaccggcagaaucugcgacagcccccacagaauccuggacggcaagaacugcacccugaucgacgcccugcugggcgacccccacugcgacggcuuccagaacaaggagugggaccuguucguggagagaagcaaggccuacagcagcugcuaccccuacgacgugcccgacuacgccagccugagaagccugguggccagcagcggcacccuggaguucaucaacgaggacuucaacuggaccggcguggcccaggacggcaagagcuacgccugcaagagaggcagcgugaacagcuucuucagcagacugaacuggcugcacaagcuggaguacaaguaccccgcccugaacgugaccaugcccaacaacggcaaguucgacaagcuguacaucuggggcgugcaccaccccagcaccgacagcgaccagaccagccuguacgugagagccagcggcagagugaucgugagcaccaagagaagccagcagaccgugauccccaacaucggcagcagacccugggugagaggccugagcagcagaaucagcaucuacuggaccaucgugaagcccggcgacauccugcugaucaacagcaccggcaaccugaucgcccccagaggcuacuucaagaucagaaccggcaagagcagcaucaugagaagcgacgcccccaucggcaacugcagcagcgagugcaucacccccaacggcagcauccccaacgacaagcccuuccagaacgugaacagaaucaccuacggcgccugccccagauacgugaagcagaacacccugaagcuggccaccggcaugagaaacgugcccgagaagcagaccagaggcaucuucggcgccaucgccggcuucaucgagaacggcugggagggcaugguggacggcugguacggcuucagacaccagaacagcgagggcaccggccaggccgccgaccugaagagcacccagaccgccaucaaccagaucaacggcaagcugaacagacugaucgagaagaccaacgagaaguuccaccagaucgagaaggaguucagcgagguggagggcagaauccaggaccuggagaaguacguggaggacaccaagaucgaccuguggagcuacaacgccgagcugcugguggcccuggagaaccagcacaccaucgaccugaccgacagcgagaugaacaagcuguucgagagaaccagaaagcagcugagagagaacgccgaggacaugggcaacggcugcuucaagaucuaccacaagugcgacaacgccugcaucggcagcaucagaaacggcaccuacgaccacgacguguacagagacgaggcccugaacaacagauuccagaucaagggcguggagcugaagagcggcuacaaggacuggauccuguggaucagcuucgccaucagcugcuuccugcugugcguggugcugcugggcuucaucaugugggccugccagaagggcaacaucagaugcaacaucugcaucuga

SEQ ID NO: 168567 - RNA, 1701 nt, Artificial Sequence
  derived and/or modified CDS sequence (opt4) from hemagglutinin__InfluenzaA__AFG72581
augaagaccaucaucgcccugagcuacauccugugccugguguucgcccagaagcugcccggcaacgacaacagcaccgccacccugugccugggccaccacgccgugcccaacggcacccuggugaagaccaucaccaacgaccagaucgaggugaccaacgccaccgagcuggugcagagcagcagcaccggcagaaucugcgacagcccccacagaauccuggacggcaagaacugcacccugaucgacgcccugcugggcgacccccacugcgacggcuuccagaacaaggagugggaccuguucguggagagaagcaaggccuacagcaacugcuaccccuacgacgugcccgacuacgccagccugagaagccugguggccagcagcggcacccuggaguucaucaacgaggacuucaacuggaccggcguggcccaggacggcaagagcuacgccugcaagagaggcagcgugaacagcuucuucagcagacugaacuggcugcacaagcuggaguacaaguaccccgcccugaacgugaccaugcccaacaacggcaaguucgacaagcuguacaucuggggcgugcaccaccccagcaccgacagcgaccagaccagccuguacgugagagccagcggcggcgugaccgugagcaccaagagaagccagcagaccgugauccccaacaucggcuacagacccugggugagaggccugagcagcagaaucagcaucuacuggaccaucgugaagcccggcgacauccugcugaucaacagcaccggcaaccugaucgcccccagaggcuacuucaagaucagaaacggcaagagcagcaucaugagaagcgacgcccccaucggcaacugcagcagcgagugcaucacccccaacggcagcaucagcaacgacaagcccuuccagaacgugaacagaaucaccuacggcgccugccccagauacgugaagcagaacacccugaagcuggccaccggcaugagaaacgugcccgagaagcagaccagaggcaucuucggcgccaucgccggcuucaucgagaacggcugggagggcaugguggacggcugguacggcuucagacaccagaacagcgagggcaccggccaggccgccgaccugaagagcacccaggccgccaucgaccagaucaacggcaagcugaacagacugaucgagaagaccaacgagaaguuccaccagaucgagaaggaguucagcgagguggagggcagaauccaggaccuggagaaguacguggaggacaccaagaucgaccuguggagcuacaacgccgagcugcugguggcccuggagaaccagcacaccaucgaccugaccgacagcgagaugaacaagcuguucgagagaaccagaaagcagcugagagagaacgccgaggacaugggcaacggcugcuucaagaucuaccacaagugcgacaacgccugcaucggcagcaucagaaacggcaccuacgaccacgacguguacagagacgaggcccugaacaacagauuccagaucaagggcguggagcugaagagcggcuacaaggacuggauccuguggaucagcuucgccaucagcugcuuccugcugugcguggugcugcugggcuucaucaugugggccugccagaagggcaacaucagaugcaacaucugcaucuga

SEQ ID NO: 168568 - RNA, 1701 nt, Artificial Sequence
  derived and/or modified CDS sequence (opt4) from hemagglutinin__InfluenzaA__AFG72603
augaagaccaucaucgcccugagcuacauccugugccugguguucgcccagaagcugcccggcaacgacaacagcaccgccacccugugccugggccaccacgccgugcccaacggcacccuggugaagaccaucaccaacgaccagaucgaggugaccaacgccaccgagcuggugcagagcagcagcaccggcagaaucugcgacagcccccacagaauccuggacggcaagaacugcacccugaucgacgcccugcugggcgacccccacugcgacggcuuccagaacaaggagugggaccuguucguggagagaagcaaggccuacagcaacugcuaccccuacgacgugcccgacuacgccagccugagaagccugguggccagcagcggcacccuggaguucaccaaggagggcuucaacuggaccggcguggcccaggacggcaagagcuacgccugcaagagaggcagcgugaacagcuucuucagcagacugaacuggcugcacaagcuggaguacaaguaccccgcccugaacgugaccaugcccaacaacgacaaguucgacaagcuguacaucuggggcgugcaccaccccagcaccgacagcgaccagaccagccuguacgugcaggccagcggcagagugaccgugagcaccaagagaagccagcagaccgugauccccaacaucggcagcagacccugggugagaggcaucagcagcagaaucagcaucuacuggaccaucgugaagcccggcgacauccugcugaucaacagcaccggcaaccugaucgcccccagaggcuacuucaagaucagaaacggcaagagcagcaucaugagaagcgacgcccccaucggcaacugcaagagcgagugcaucacccccaacggcagcauccccaacgacaagcccuuccagaacgugaacagaaucaccuacggcgccugccccagauacgugaagcagaacacccugaagcuggccaccggcaugagaaacgugcccgagaagcagaccagaggcaucuucggcgccaucgccggcuucaucgagaacggcugggagggcaugguggacggcugguacggcuucagacaccagaacagcgagggcaccggccaggccgccgaccugaagagcacccaggccgccaccgaccagaucaacggcaagcugaacagacugaucgagaagaccaacgagaaguuccaccagaucgagaaggaguucagcgagguggagggcagaauccaggaccuggagaaguacguggaggacaccaagaucgaccuguggagcuacaacgccgagcugcugguggcccuggagaaccagcacaccaucgaccugaccgacagcgagaugaacaagcuguucgagagaaccagaaagcagcugagagagaacgccgaggacaugggcaacggcugcuucaagaucuaccacaagugcgacaacgccugcaucggcagcaucagaaacggcaccuacgaccacgacguguacagagacgaggcccugaacaacagauuccagaucaagggcguggagcugaagagcggcuacaaggacuggauccuguggaucagcuucgccaucagcugcuuccugcugugcguggugcugcugggcuucaucaugugggccugccagaagggcaacaucagaugcaacaucugcaucuga

SEQ ID NO: 168569 - RNA, 1701 nt, Artificial Sequence
  derived and/or modified CDS sequence (opt4) from hemagglutinin__InfluenzaA__AFG72614
augaagaccaucaucgcccugagcuacauccugugccugguguucgcccagaagcugcccggcaacgacaacagcaccgccacccugugccugggccaccacgccgugcccaacggcacccuggugaagaccaucaccaacgaccagaucgaggugaccaacgccaccgagcuggugcagagcagcagcaccggcagaaucugcgacagcccccacagaauccuggacggcaagaacugcacccugaucgacgcccugcugggcgacccccacugcgacggcuuccagaacaaggagugggaccuguucguggagagaagcaaggccuacagcaacugcuaccccuacgacgugcccgacuacgccagccugagaagccugguggccagcagcggcacccuggaguucaccaacgagggcuucaacuggaccggcguggcccaggacggcaccagcuacagcugcaagagaggcagcgugaagagcuucuucagcagacugaacuggcugcacaagcuggaguacaaguaccccgcccugaacguggccaugcccaacaacgacaaguucgacaagcuguacaucuggggcgugcaccaccccagcaccgacagcgaccagaccagccuguacgugcaggccagcggcagagugaccgugagcaccaagagaagccagcagaccgugauccccaacaucggcagcagacccugggugagaggcgugagcagcagaaucagcaucuacuggaccaucgugaagcccggcgacauccugcugaucaacagcaccggcaaccugaucgcccccagaggcuacuucaagaucagaagcggcaagagcagcaucaugagaagcgacgcccccaucggcaacugcaacagcgagugcaucacccccaacggcagcauccccaacgacaagcccuuccagaacgugaacagaaucaccuacggcgccugccccagauacgugaagcagaacacccugaagcuggccaccggcaugagaaacgugcccgagaagcagaccagaggcaucuucggcgccaucgccggcuucaucgagaacggcugggagggcaugguggacggcugguacggcuucagacaccagaacagcgagggcaccggccaggccgccgaccugaagagcacccaggccgccaucaaccagaucaacggcaagcugaacagacugaucgagaagaccaacgagaaguuccaccagaucgagaaggaguucagcgagguggagggcagaauccaggaccuggagaaguacguggaggacaccaagaucgaccuguggagcuacaacgccgagcugcugguggcccuggagaaccagcacaccaucgaccugaccgacagcgagaugaacaagcuguucgagagaaccagaaagcagcugagagagaacgccgaggacaugggcaacggcugcuucaagaucuaccacaagugcgacaacgccugcaucggcagcaucagaaacggcaccuacgaccacgacguguacagagacgaggcccugaacaacagauuccagaucaagggcguggagcugaagagcggcuacaaggacuggauccuguggaucagcuucgccaucagcugcuuccugcugugcguggugcugcugggcuucaucaugugggccugccagaagggcaacaucagaugcaacaucugcaucuga

SEQ ID NO: 168570 - RNA, 1701 nt, Artificial Sequence
  derived and/or modified CDS sequence (opt4) from hemagglutinin__InfluenzaA__AFG72625
augaagaccaucaucgcccugagcuacauccugugccugguguucgcccagaagcugcccggcaacgacaacagcaccgccacccugugccugggccaccacgccgugcccaacggcacccuggugaagaccaucaccaacgaccagaucgaggugaccaacgccaccgagcuggugcagagcagcagcaccggcagaaucugcgacagcccccacagaauccuggacggcaagaacugcacccugaucgacgcccugcugggcgacccccacugcgacggcuuccagaacaaggagugggaccuguucguggagagaagcaaggccuacagcaacugcuaccccuacgacgugcccgacuacgccagccugagaagccugguggccagcagcggcacccuggaguucaccaacgagggcuucaacuggaccggcguggcccaggacggcaccagcuacgccugcaagagaggcagcgugaagagcuucuucagcagacugaacuggcugcacaagcuggaguacaaguaccccgcccugaacgugaccaugcccaacaacgacaaguucgacaagcuguacaucuggggcgugcaccaccccagcaccgacagcgaccagaccagccuguacgugcaggccagcggcagagugaccgugagcaccaagagaagccagcagaccgugauccccaacaucggcagcagacccugggugagaggcaucagcagcagaaucagcaucuacuggaccaucgugaagcccggcgacauccugcugaucaagagcaccggcaaccugaucgcccccagaggcuacuucaagaucagaagcggcaagagcagcaucaugagaagcgacgcccccaucggcaacugcaacagcgagugcaucacccccaacggcagcauccccaacgacaagcccuuccagaacgugaacagaaucaccuacggcgccugccccagauacgugaagcagaacacccugaagcuggccaccggcaugagaaacgugcccgagaagcagaccagaggcaucuucggcgccaucgccggcuucaucgagaacggcugggagggcaugguggacggcugguacggcuucagacaccagaacagcgagggcaccggccaggccgccgaccugaagagcacccaggccgccaucaaccagaucaacggcaagcugaacagacugaucgagaagaccaacgagaaguuccaccagaucgagaaggaguucagcgagguggagggcagaauccaggaccuggagaaguacguggaggacaccaagaucgaccuguggagcuacaacgccgagcugcugguggcccuggagaaccagcacaccaucgaccugaccgacagcgagaugaacaagcuguucgagagaaccagaaagcagcugagagagaacgccgaggacaugggcaacggcugcuucaagaucuaccacaagugcgacaacgccugcaucggcagcaucagaaacggcaccuacgaccacgacguguacagagacgaggcccugaacaacagauuccagaucaagggcguggagcugaagagcggcuacaaggacuggauccuguggaucagcuucgccaucagcugcuuccugcugugcguggugcugcugggcuucaucaugugggccugccagaagggcaacaucagaugcaacaucugcaucuga

SEQ ID NO: 168571 - RNA, 1701 nt, Artificial Sequence
  derived and/or modified CDS sequence (opt4) from hemagglutinin__InfluenzaA__AFG72636
augaagaccaucaucgcccugagcuacauccugugccugguguucgcccagaagcugcccggcaacgacaacagcaccgccacccugugccugggccaccacgccgugcccaacggcacccuggugaagaccaucaccaacgaccagaucgaggugaccaacgccaccgagcuggugcagagcagcagcaccggcagaaucugcgacagcccccacagaauccuggacggcaagaacugcacccugaucgacgcccugcugggcgacccccacugcgacggcuuccagaacaaggagugggaccuguucguggagagaagcaaggccuacagcaacugcuaccccuacgacgugcccgacuacgccagccugagaagccugguggccagcagcggcacccuggaguucaccaacgagggcuucaacuggaccggcguggcccaggacggcaagagcuacgccugcaagagaggcagcgugaagagcuucuucagcagacugaacuggcugcacaagcuggaguucaaguaccccgcccugaacgugaccaugcccaacaacgacaaguucgacaagcuguacaucuggggcgugcaccaccccagcaccgacagcgaccagaccagccuguacgugcaggccagcggcagagugaccgugagcaccaagagaagccagcagaccgugauccccaacaucggcagcagacccugggugagaggcaucagcagcagaaucagcaucuacuggaccaucgugaagcccggcgacauccugcugaucaacagcaccggcaaccugaucgcccccagaggcuacuucaagaucagaaacggcaagagcagcaucaugagaagcgacgcccccaucgacaacugcaacagcgagugcaucacccccaacggcagcauccccaacgacaagcccuuccagaacgugaacagaaucaccuacggcgccugccccagauacgugaagcagaacacccugaagcuggccaccggcaugagaaacgugcccgagaagcagaccagaggcaucuucggcgccaucgccggcuucaucgagaacggcugggagggcaugguggacggcugguacggcuucagacaccagaacagcgagggcaccggccaggccgccgaccugaagagcacccaggccgccaucgaccagaucaacggcaagcugaacagacugaucgagaagaccaacgagaaguuccaccagaucgagaaggaguucagcgagguggagggcagaauccaggaccuggagaaguacguggaggacaccaagaucgaccuguggagcuacaacgccgagcugcugguggcccuggagaaccagcacaccaucgaccugaccgacagcgagaugaacaagcuguucgagagaaccagaaagcagcugagagagaacgccgaggacaugggcaacggcugcuucaagaucuaccacaagugcgacaacgccugcaucggcagcaucagaaacggcaccuacgaccacgacguguacagagacgaggcccugaacaacagauuccagaucaagggcguggagcugaagagcggcuacaaggacuggauccuguggaucagcuucgccaucagcugcuuccugcugugcguggugcugcugggcuucaucaugugggccugccagaagggcaacaucagaugcaacaucugcaucuga

SEQ ID NO: 168572 - RNA, 1701 nt, Artificial Sequence
  derived and/or modified CDS sequence (opt4) from hemagglutinin__InfluenzaA__AFG72658
augaagaccaucaucgcccugagcuacauccugugccuggccuucgcccagaagcugcccggcaacgacaacagcaccgccacccugugccugggccaccacgccgugcccaacggcacccuggugaagaccaucaccaacgaccagaucgaggugaccaacgccaccgagcuggugcagagcagcagcaccggcagaaucugcgacagcccccacagaauccuggacggcaagaacugcacccugaucgacgcccugcugggcgacccccacugcgacggcuuccagaacaaggagugggaccuguucguggagagaagcaaggccuacagcaacugcuaccccuacgacgugcccgacuacgccagccugagaagccugguggccagcagcggcacccuggaguucaccaacgagggcuucaacuggaccggcguggcccaggacggcaagagcuacgccugcaagagaggcagcgugaacagcuucuucagcagacugaacuggcugcacaagcuggaguacaaguaccccgcccugaacgugaccaugcccaacaacgacaaguucgacaagcuguacaucuggggcgugcaccaccccagcaccgacagcgaccagaccagccuguacgugcaggccagcggcagagugaccgugagcaccaagagaagccagcagaccgugauccccaacaucggcagcagacccugggugagaggcaucagcagcagaaucagcaucuacuggaccaucgugaagcccggcgacauccugcugaucaacagcaccggcaaccugaucgcccccagaggcuacuucaagaucagaaacggcaagagcagcaucaugagaagcgacgcccccaucgacaacugcaacagcgagugcaucacccccaacggcagcauccccaacgacaagcccuuccagaacgugaacagaaucaccuacggcgccugccccagauacgugaagcagaacacccugaagcuggccaccggcaugagaaacgugcccgagaagcagaccagaggcaucuucggcgccaucgccggcuucaucgagaacggcugggagggcaugguggacggcugguacggcuucagacaccagaacagcgagggcaccggccaggccgccgaccugaagagcacccaggccgccaucgaccagaucaacggcaagcugaacagacugaucgagaagaccaacgagaaguuccaccagaucgagaaggaguucagcgagguggagggcagaauccaggaccuggagaaguacguggaggacaccaagaucgaccuguggagcuacaacgccgagcugcugguggcccuggagaaccagcacaccaucgaccugaccgacagcgagaugaacaagcuguucgagagaaccagaaagcagcugagagagaacgccgaggacaugggcaacggcugcuucaagaucuaccacaagugcgacaacgccugcaucggcagcaucagaaacggcaccuacgaccacgacguguacagagacgaggcccugaacaacagauuccagaucaagggcguggagcugaagagcggcuacaaggacuggauccuguggaucagcuucgccaucagcugcuuccugcugugcguggugcugcugggcuucaucaugugggccugccagaagggcaacaucagaugcaacaucugcaucuga

SEQ ID NO: 168573 - RNA, 1701 nt, Artificial Sequence
  derived and/or modified CDS sequence (opt4) from hemagglutinin__InfluenzaA__AFG72680
augaagaccaucaucgcccugagcuacauccugugccugguguucgcccagaagcugcccggcaacgacaacagcaccgccacccugugccugggccaccacgccgugcccaacggcacccuggugaagaccaucaccaacgaccagaucgaggugaccaacgccaccgagcuggugcagagcagcagcaccggcaucaucugcgacagcccccacagaauccuggacggcaagaacugcacccugaucgacgcccugcugggcgacccccacugcgacggcuuccagaacaaggagugggaccuguucguggagagaagcaaggccuacagcaacugcuaccccuacgacgugcccgacuacgccagccugagaagccugguggccagcagcggcacccuggaguucaccaacgagggcuucaacuggaccggcguggcccaggacggcaccagcuacgccugcaagagaggcagcgugaagagcuucuucagcagacugaacuggcugcacaagcuggaguacaaguaccccgcccugaacgugaccaugcccaacaacgacaaguucgacaagcuguacaucuggggcgugcaccaccccagcaccgacagcgaccagaccagccuguacgugcaggccagcggcagagugaccgugagcaccagaagaagccagcagaccgugauccccaacaucggcagcagacccugggugagaggcgugagcagcagaaucagcaucuacuggaccaucgugaagcccggcgacauccugcugaucaacagcaccggcaaccugaucgcccccagaggcuacuucaagaucagaagcggcaagagcagcaucaugagaagcgacgcccccaucggcaacugcaacagcgagugcaucacccccaacggcagcauccccaacgacaagcccuuccagaacgugaacagaaucaccuacggcgccugccccagauacgugaagcagaacacccugaagcuggccaccggcaugagaaacgugcccgagaagcagaccagaggcaucuucggcgccaucgccggcuucaucgagaacggcugggagggcaugguggacggcugguacggcuucagacaccagaacagcgagggcaccggccaggccgccgaccugaagagcacccaggccgccaucaaccagaucaacagaaagcugaacagacugaucgagaagaccaacgagaaguuccaccagaucgagaaggaguucagcgagguggagggcagaauccaggaccuggagaaguacguggaggacaccaagaucgaccuguggagcuacaacgccgagcugcugguggcccuggagaaccagcacaccaucgaccugaccgacagcgagaugaacaagcuguucgagagaaccagaaagcagcugagagagaacgccgaggacaugggcaacggcugcuucaagaucuaccacaagugcgacaacgccugcaucggcagcaucagaaacggcaccuacgaccacgacguguacagagacgaggcccugaacaacagauuccagaucaagggcguggagcugaagagcggcuacaaggacuggauccuguggaucagcuucgccaucagcugcuuccugcugugcguggugcugcugggcuucaucaugugggccugccagaagggcaacaucagaugcaacaucugcaucuga

SEQ ID NO: 168574 - RNA, 1701 nt, Artificial Sequence
  derived and/or modified CDS sequence (opt4) from hemagglutinin__InfluenzaA__AFG72691
augaagaccaucaucgcccugagcuacauccugugccugguguucgcccagaagcugcccggcaacgacaacagcaccgccacccugugccugggccaccacgccgugcccaacggcacccuggugaagaccaucaccaacgaccagaucgaggugaccaacgccaccgagcuggugcagagcagcagcaccggcagaaucugcgacagcccccacagaauccuggacggcaagaacugcacccugaucgacgcccugcugggcgacccccacugcgacggcuucaagaacaaggagugggaccuguucguggagagaagcaccgccuacagcaacugcuaccccuacgacgugcccgacuacgccagccugagaagccugguggccagcagcggcacccuggaguucaccaacgagggcuucaacuggaccggcguggcccaggacggcaccagcuacgccugcaagagaggcagcgugaagagcuucuucagcagacugaacuggcugcacaagcuggaguacaaguaccccgcccugaacgugaccaugcccaacaacgacaaguucgacaagcuguacaucuggggcgugcaccaccccagcaccgacagcgaccagaccagccuguacgugcaggccagcggcagagugaccgugagcaccaagagaagccagcagaccgugauccccaacaucggcagcagacccugggugagaggcgugagcagcagaaucagcaucuacuggaccaucgugaagcccggcgacauccugcugaucaacagcaccggcaaccugaucgcccccagaggcuacuucaagaucagaagcggcaagagcagcaucaugagaagcgacgcccccaucgacaacugcaacagcgagugcaucacccccaacggcagcauccccaacggcaagcccuuccagaacgugaacagaaucaccuacggcgccugccccagauacgugaagcagaacacccugaagcuggccaccggcaugagaaacgugcccgagaagcagaccagaggcaucuucggcgccaucgccggcuucaucgagaacggcugggagggcaugguggacggcugguacggcuucagacaccagaacagcgagggcaccggccaggccgccgaccugaagagcacccaggccgccaucaaccagaucaacggcaagcugaacagacugaucgagaagaccaacgagaaguuccaccagaucgagaaggaguucagcgagguggagggcagaauccaggaccuggagaaguacguggaggacaccaagaucgaccuguggagcuacaacgccgagcugcugguggcccuggagaaccagcacaccaucgaccugaccgacagcgagaugaacaagcuguucgagagaaccagaaagcagcugagagagaacgccgaggacaugggcaacggcugcuucaagaucuaccacaagugcgacaacgccugcaucggcagcaucagaaacggcaccuacgaccacgacguguacagagacgaggcccugaacaacagauuccagaucaagggcguggagcugaagagcggcuacaaggacuggauccuguggaucagcuucgccaucagcugcuuccugcugugcguggugcugcugggcuucaucaugugggccugccagaagggcaacaucagaugcaacaucugcaucuga

SEQ ID NO: 168575 - RNA, 1701 nt, Artificial Sequence
  derived and/or modified CDS sequence (opt4) from hemagglutinin__InfluenzaA__AFG72713
augaagaucaucaucgcccugagcuacauccugugccugguguucgcccagaagcugcccggcaacgacaacagcaccgccacccugugccugggccaccacgccgugcccaacggcacccuggugaagaccaucaccaacgaccagaucgaggugaccaacgccaccgagcuggugcagagcagcagcaccggcagaaucugcgacagcccccaccagauccuggacggcaagaacugcacccugaucgacgcccugcugggcgacccccacugcgacggcuucaagaacaaggagugggaccuguucguggagagaagcaccgccuacagcaacugcuaccccuacgacgugcccgacuacgccagccugagaagccugguggccagcagcggcacccuggaguucaccaacgagggcuucaacuggaccggcguggcccaggacggcaccagcuacgccugcaagagaggcagcgugaagagcuucuucagcagacugaacuggcugcacaagcuggaguacaaguaccccgcccugaacgugaccaugcccaacaacgacaaguucgacaagcuguacaucuggggcgugcaccaccccagcaccgacagcgaccagaccagccuguacgugcaggccagcggcagagugaccgugagcaccaagagaagccagcagaccgugauccccaacaucggcagcagacccugggugagaggcaucagcagcagaaucagcaucuacuggaccaucgugaagcccggcgacauccugcugaucagcagcaccggcaaccugaucgcccccagaggcuacuucaagaucagaagcggcaagagcagcaucaucagaagcgacgcccccaucgacaacugcaacagcgagugcaucacccccaacggcagcauccccaacgacaagcccuuccagaacgugaacagaaucaccuacggcgccugccccagauacgugaagcagaacacccugaagcuggccaccggcaugagaaacgugcccgagaagcagaccagaggcaucuucggcgccaucgccggcuucaucgagaacggcugggagggcaugguggacggcugguacggcuucagacaccagaacagcgagggcaccggccaggccgccgaccugaagagcacccaggccgccaucaaccagaucaacggcaagcugaacagacugaucgagaagaccaacgagaaguuccaccagaucgagaaggaguucagcgagguggagggcagaauccaggaccuggagaaguacguggaggacaccaagaucgaccuguggagcuacaacgccgagcugcugguggcccuggagaaccagcacaccaucgaccugaccgacagcgagaugaacaagcuguucgagagaaccagaaagcagcugagagagaacgccgaggacaugggcaacggcugcuucaagaucuaccacaagugcgacaacgccugcaucggcagcaucagaaacggcaccuacgaccacgacguguacagagacgaggcccugaacaacagauuccagaucaagggcguggagcugaagagcggcuacaaggacuggauccuguggaucagcuucgccaucagcugcuuccugcugugcguggugcugcugggcuucaucaugugggccugccagaagggcaacaucagaugcaacaucugcaucuga

SEQ ID NO: 168576 - RNA, 1701 nt, Artificial Sequence
  derived and/or modified CDS sequence (opt4) from hemagglutinin__InfluenzaA__AFG72724
augaagaccaucaucgcccugagcuacauccugugccugguguucgcccagaagcugcccggcaacgacaacagcaccgccacccugugccugggccaccacgccgugcccaacggcacccuggugaagaccaucaccaacgaccagaucgaggugaccaacgccaccgagcuggugcagagcagcagcaccggcagaaucugcgacagcccccacagaauccuggacggcaagaacugcacccugaucgacgcccugcugggcgacccccacugcgacggcuuccagaacaaggagugggaccuguucguggagagaagcaaggccuacagcaacugcuaccccuacgacgugcccgacuacgccagccugagaagccugguggccagcagcggcacccuggaguucaccaacgagggcuucaacuggaccggcguggcccaggacggcaccagcuacgccugcaagagaggcagcgugaagagcuucuucagcagacugaacuggcugcacaagcuggaguacaaguaccccgcccugaacgugaccaugcccaacaacgacaaguucgacaagcuguacaucuggggcgugcaccaccccagcaccgacagcgaccagaccagccuguacgugcaggccagcggcagagugaccgugagcaccaagagaagccagcagaccgugauccccaacaucggcagcagacccugggugagaggcgugagcagcagaaucagcaucuacuggaccaucgugaagcccggcgacauccugcugaucaacagcaccggcaaccugaucgcccccagaggcuacuucaagaucagaagcggcaagagcagcaucaugagaagcgacgcccccaucgacaacugcaacagcgagugcaucacccccaacggcagcauccccaacgacaagcccuuccagaacgugaacagaaucaccuacggcgccugccccagauacgugaagcagaacacccugaagcuggccaccggcaugagaaacgugcccgagaagcagaccagaggcaucuucggcgccaucgccggcuucaucgagaacggcugggagggcaugguggacggcugguacggcuucagacaccagaacagcgagggcaccggccaggccgccgaccugaagagcacccaggccgccaucaaccagaucaacggcaagcugaacagacugaucgagaagaccaacgagaaguuccaccagaucgagaaggaguucagcgagguggagggcagaauccaggaccuggagaaguacguggaggacaccaagaucgaccuguggagcuacaacgccgagcugcugguggcccuggagaaccagcacaccaucgaccugaccgacagcgagaugaacaagcuguucgagagaaccagaaagcagcugagagagaacgccgaggacaugggcaacggcugcuucaagaucuaccacaagugcgacaacgugugcaucggcagcaucagaaacggcaccuacgaccacgacguguacagagacgaggcccugaacaacagauuccagaucaagggcguggagcugaagagcggcuacaaggacuggauccuguggaucagcuucgccaucagcugcuuccugcugugcguggugcugcugggcuucaucaugugggccugccagaagggcaacaucagaugcaacaucugcaucuga

SEQ ID NO: 168577 - RNA, 1701 nt, Artificial Sequence
  derived and/or modified CDS sequence (opt4) from hemagglutinin__InfluenzaA__AFG72735
augaagaccaucaucgcccugagcuacauccugugccugguguucgcccagaagcugcccggcaacgacaacagcaccgccacccugugccugggccaccacgccgugcccaacggcacccuggugaagaccaucaccaacgaccagaucgaggugaccaacgccaccgagcuggugcagagcagcagcaccggcagaaucugcgacagcccccacagaauccuggacggcaagaacugcacccugaucgacgcccugcugggcgacccccacugcgacggcuucaagaacaaggagugggaccuguucguggagagaagcaccgccuacagcaacugcuaccccuacgacgugcccgacuacgccagccugagaagccugguggccagcagcggcacccuggaguucaccaacgagggcuucaacuggaccggcguggcccaggacggcaccagcuacgccugcaagagaggcagcgugaagagcuucuucagcagacugaacuggcugcacaagcuggaguacaaguaccccgcccugaccgugaccaugcccaacaacgacaaguucgacaagcuguacaucuggggcgugcaccaccccagcaccgacagcgaccagaccagcaucuacgugcaggccagcggcagagugaccgugagcaccaagagaagccagcagaccgugauccccaacaucggcagcagacccugggugagaggcgugagcagcagaaucagcaucuacuggaccaucgugaagcccggcgacauccugcugaucaacagcaccggcaaccugaucgcccccagaggcuacuucaagaucagaagcggcaagagcagcaucaugagaagcgacgcccccaucgacaacugcaacagcgagugcaucacccccaacggcagcauccccaacgacaagcccuuccagaacgugaacagaaucaccuacggcgccugccccagauacgugaagcagaacacccugaagcuggccaccggcaugagaaacgugcccgagaagcagaccagaggcaucuucggcgccaucgccggcuucaucgagaacggcugggagggcaugguggacggcugguacggcuucagacaccagaacagcgagggcaccggccaggccgccgaccugaagagcacccaggccgccaucaaccagaucaacggcaagcugaacagacugaucgagaagaccaacgagaaguuccaccagaucgagaaggaguucagcgagguggagggcagaauccaggaccuggagaaguacguggaggacaccaagaucgacaucuggagcuacaacgccgagcugcugguggcccuggagaaccagcacaccaucgaccugaccgacagcgagaugaacaagcuguucgagagaaccagaaagcagcugagagagaacgccgaggacaugggcaacggcugcuucaagaucuaccacaagugcgacaacgccugcaucggcagcaucagaaacggcaccuacgaccacgacguguacagagacgaggcccugaacaacagauuccagaucaagggcguggagcugaagagcggcuacaaggacuggauccuguggaucagcuucgccaucagcugcuuccugcugugcguggugcugcugggcuucaucaugugggccugccagaagggcaacaucagaugcaacaucugcaucuga

SEQ ID NO: 168578 - RNA, 1701 nt, Artificial Sequence
  derived and/or modified CDS sequence (opt4) from hemagglutinin__InfluenzaA__AFG72757
augaagaccaucaucgcccugagcuacauccugugccugguguucgcccagaagauccccggcaacgacaacagcaccgccacccugugccugggccaccacgccgugcccaacggcacccuggugaagaccaucaccaacgaccagaucgaggugaccaacgccaccgagcuggugcagagcagcagcaccggcagaaucugcgacagcccccacagaauccuggacggcgagaacugcacccugaucgacgcccugcugggcgacccccacugcgacggcuuccagaacaaggagugggaccuguucguggagagaagcaaggccuacagcaacugcuaccccuacgacgugcccgacuacgccagccugagaagccugguggccagcagcggcacccuggaguucaacaacgagagcuucaacuggaccggcguggcccagaacggcaccagcuacgccugcaagagaagcagcaucaagagcuucuucagcagacugaacuggcugcaccagcugaaguacaaguaccccgcccugaacgugaccaugcccaacaacgacaaguucgacaagcuguacaucuggggcgugcaccaccccagcaccgacagcgaccagaccagcaucuacgcccaggccagcggcagagugaccgugagcaccaagagaagccagcagaccgugauccccaacaucggcagcagacccugggugagaggcaucagcagcagaaucagcauccacuggaccaucgugaagcccggcgacauccugcugaucaacagcaccggcaaccugaucgcccccagaggcuacuucaagaucagaagcggcaagagcagcaucaugagaagcgacgcccccaucggcaagugcaacagcgagugcaucacccccaacggcagcauccccaacgacaagcccuuccagaacgugaacagaaucaccuacggcgccugccccagauacgugaagcagaacacccugaagcuggccaccggcaugagaaacgugcccgagaagcagaccagaggcaucuucggcgccaucgccggcuucaucgagaacggcugggagggcaugguggacggcugguacggcuucagacaccagaacagcgagggcaccggccaggccgccgaccugaagagcacccaggccgccaucaaccagaucaacggcaagcugaacagacugaucgagaagaccaacgagaaguuccaccagaucgagaaggaguucagcgagguggagggcagaauccaggaccuggagaaguacguggaggacaccaagaucgaccuguggagcuacaacgccgagcugcugguggcccuggagaaccagcacaccaucgaccugaccgacagcgagaugaacaagcuguucgagagaaccagaaagcagcugagagagaacgccgaggacaugggcaacggcugcuucaagaucuaccacaagugcgacaacgccugcaucggcagcaucagaaacggcaccuacgaccacgacguguacagagacgaggcccugaacaacagauuccagaucaagggcguggagcugaagagcggcuacaaggacuggauccuguggaucagcuucgccaucagcugcuuccugcugugcguggugcugcugggcuucaucaugugggccugccagaagggcaacaucagaugcaacaucugcaucuga

SEQ ID NO: 168579 - RNA, 1701 nt, Artificial Sequence
  derived and/or modified CDS sequence (opt4) from hemagglutinin__InfluenzaA__AFG72779
augaagaccaucaucgcccugagcuacauccugugccugguguucgcccagaagcugcccggcaacgacaacagcaccgccacccugugccugggccaccacgccgugcccaacggcacccuggugaagaccaucaccaacgaccagaucgaggugaccaacgccaccgagcuggugcagagcagcagcaccggcagaaucugcgacagcccccacagaauccuggacggcgagaacugcacccugaucgacgcccugcugggcgacccccacugcgacggcuuccagaacaaggagugggaccuguucguggagagaagcaaggccuacagcaacugcuaccccuacgacgugcccgacuacgccagccugagaagccugguggccagcagcggcacccuggaguucaacaacgagagcuucaacuggaccggcguggcccagaacggcaccagcagcgccugcaagagaagaagcaucaagagcuucuucagcagacugaacuggcugcaccagcugaaguacaaguaccccgcccugaacgugaccaugcccaacaacgacaaguucgacaagcuguacaucuggggcgugcaccaccccagcaccgacagcgaccagaccagccuguacgcccaggccagcggcagagugaccgugagcaccagaagaagccagcagaccgugauccccaacaucggcagcagacccugggugagaggcgugagcagcggcaucagcaucuacuggaccaucgugaagcccggcgacauccugcugaucaacagcaccggcaaccugaucgcccccagaggcuacuucaagaucagaagcggcaagagcagcaucaugagaagcgacgcccccaucggcaagugcaacagcgagugcaucacccccaacggcagcauccccaacgacaagcccuuccagaacgugaacagaaucaccuacggcgccugccccagauacgugaagcagaacacccugaagcuggccaccggcaugagaaacgugcccgagaagcagaccagaggcaucuucggcgccaucgccggcuucaucgagaacggcugggagggcaugguggacggcugguacggcuucagacaccagaacagcgagggcaccggccaggccgccgaccugaagagcacccaggccgccaucaaccagaucaacggcaagcugaacagacugaucgagaagaccaacgagaaguuccaccagaucgagaaggaguucagcgagguggagggcagaauccaggaccuggagaaguacguggaggacaccaagaucgaccuguggagcuacaacgccgagcugcugguggcccuggagaaccagcacaccaucgaccugaccgacagcgagaugaacaagcuguucgagagaaccagaaagcagcugagagagaacgccgaggacaugggcaacggcugcuucaagaucuaccacaagugcgacaacgccugcaucggcagcaucagaaacggcaccuacgaccacgacguguacagagacgaggcccugaacaacagauuccagaucaagggcguggagcugaagagcggcuacaaggacuggauccuguggaucagcuucgccaucagcugcuuccugcugugcguggugcugcugggcuucaucaugugggccugccagaagggcaacaucagaugcaacaucugcaucuga

SEQ ID NO: 168580 - RNA, 1701 nt, Artificial Sequence
  derived and/or modified CDS sequence (opt4) from hemagglutinin__InfluenzaA__AFG72801
augaagaccaucaucgcccugagcuacauccugugccugguguucgcccagaagcugcccggcaacgacaacagcaccgccacccugugccugggccaccacgccgugagcaacggcacccuggugaagaccaucaccaacgaccagaucgaggugaccaacgccaccgagcuggugcagagcagcagcaccggcagaaucugcgacagcccccaccagauccuggacggcgagaacugcacccugaucgacgcccugcugggcgacccccacugcgacggcuuccagaacaaggagugggaccuguucguggagagaagcaaggccuacagcaacugcuaccccuacgacgugcccgacuacgccagccugagaagccugguggccagcagcggcacccuggaguucaacaacgagagcuucaacuggaccggcguggcccagaacggcaccagcagcgccugcaagagaagaagcaacaagagcuucuucagcagacugaacuggcugcaccagcugaaguacaaguaccccgcccugaacgugaccaugcccaacaacgagaaguucgacaagcuguacaucuggggcgugcaccaccccagcaccgacagcgaccagaucagcaucuacgcccagagcagcggcagagugaccgugagcaccaagagaagccagcagaccgugauccccaacaucggcagcagccccugggugagaggcgugagcagcagaaucagcaucuacuggaccaucgugaagcccggcgacauccugcugaucaacagcaccggcaaccugaucgcccccagaggcuacuucaagaucagaagcggcaagagcagcaucaugagaagcgacgcccccaucggcaagugcaacagcgagugcaucacccccaacggcagcauccccaacgacaagcccuuccagaacgugaacagaaucaccuacggcgccugccccagauacgugaagcagaacacccugaagcuggccaccggcaugagaaacgugcccgagaagcagaccagaggcaucuucggcgccaucgccggcuucaucgagaacggcugggagggcaugguggacggcugguacggcuucagacaccagaacagcgagggcaccggccaggccgccgaccugaagagcacccaggccgccaucaaccagaucaacggcaagcugaacagacugaucgagaagaccaacgagaaguuccaccagaucgagaaggaguucagcgagguggagggcagaauccaggaccuggagaaguacguggaggacaccaagaucgaccuguggagcuacaacgccgagcugcugguggcccuggagaaccagcacaccaucgaccugaccgacagcgagaugaacaagcuguucgagagaaccaagaagcagcugagagagaacgccgaggacaugggcaacggcugcuucaagaucuaccacaagugcgacaacgccugcaucggcagcaucagaaacggcaccuacgaccacgacguguacagagacgaggcccugaacaacagauuccagaucaagggcguggagcugaagagcggcuacaaggacuggauccuguggaucagcuucgccaucagcugcuuccugcugugcguggugcugcugggcuucaucaugugggccugccagaagggcaacaucagaugcaacaucugcaucuga

SEQ ID NO: 168581 - RNA, 1701 nt, Artificial Sequence
  derived and/or modified CDS sequence (opt4) from hemagglutinin__InfluenzaA__AFG72812
augaagaccaucaucgcccugagcuacauccugugccugguguucgcccagaagcugcccggcaacgacaacagcaccgccacccugugccugggccaccacgccgugcccaacggcacccuggugaagaccaucaccaacgaccagaucgaggugaccaacgccaccgagcuggugcagagcagcagcaccggcagaaucugcgacagcccccaccagauccuggacggcgagaacugcacccugaucgacgcccugcugggcgacccccacugcgacggcuuccagaacaaggagugggaccuguucguggagagaagcaaggccuacagcaacugcuaccccuacgacgugcccgacuacgugagccugagaagccugguggccagcagcggcacccuggaguucaacaacgagagcuucaacuggaccggcguggcccagaacggcaccagcagcgccugcaagagaagaagcaacaagagcuucuucagcagacugaacuggcugcaccagcugaaguacaaguaccccgcccugaacgugaccaugcccaacaacgagaaguucgacaagcuguacaucuggggcgugcaccaccccggcaccgacagcgaccagaucagccuguacgcccaggccagcggcagagugaccgugagcaccaagagaagccagcagaccgugauccccaacaucggcagcagacccugggugagaggcgugagcagcagaaucagcaucuacuggaccaucgugaagcccggcgacauccugcugaucaacagcaccggcaaccugaucgcccccagaggcuacuucaagaucagaagcggcaagagcagcaucaugagaagcgacgcccccaucggcaagugcaacagcgagugcaucacccccaacggcagcauccccaacgacaagcccuuccagaacgugaacagaaucaccuacggcgccugccccagauacgugaagcagaacacccugaagcuggccaccggcaugagaaacgugcccgagaagcagaccagaggcaucuucggcgccaucgccggcuucaucgagaacggcugggagggcaugauggacggcugguacggcuucagacaccugaacagcgagggcaccggccaggccgccgaccugaagagcacccaggccgccaucaaccagaucaacggcaagcugaacagacugaucgagaagaccaacgagaaguuccaccagaucgagaaggaguucagcgagguggagggcagaauccaggaccuggagaaguacguggaggacaccaagaucgaccuguggagcuacaacgccgagcugcugguggcccuggagaaccagcacaccaucgaccugaccgacagcgagaugaacaagcuguucgagagaaccaagaagcagcugagagagaacgccgaggacaugggcaacggcugcuucaagaucuaccacaagugcgacaacgccugcaucggcagcaucagaaacggcaccuacgaccacgacguguacagagacgaggcccugaacaacagauuccagaucaagggcguggagcugaagagcggcuacaaggacuggauccuguggaucagcuucgccaucagcugcuuccugcugugcaucgugcugcugggcuucaucaugugggccugccagaagggcaacaucagaugcaacaucugcaucuga

SEQ ID NO: 168582 - RNA, 1701 nt, Artificial Sequence
  derived and/or modified CDS sequence (opt4) from hemagglutinin__InfluenzaA__AFG72823
augaagaccaucaucgcccugagcuacauccugugccugguguucgcccagaagcugcccggcaacgacaacagcaccgccacccugugccugggccaccacgccgugcccaacggcaccaucgugaagaccaucaccaacgaccagaucgaggugaccaacgccaccgagcuggugcagagcagcagcaccggcggcaucugcgacagcccccaccagauccuggacggcgagaacugcacccugaucgacgcccugcugggcgacccccagugcgacggcuuccagaacaagaagugggaccuguucguggagagaagcaaggccuacagcaacugcuaccccuacgacgugcccgacuacgccagccugagaagccugguggccagcagcggcacccuggaguucaacaacgagagcuucaacuggaccggcgugacccagaacggcaccagcagcgccugcaagagaagaagcaacaagagcuucuucagcagacugaacuggcugacccaccugaaguacaaguaccccgcccugaacgugaccaugcccaacaacgagaaguucgacaagcuguacaucuggggcgugcugcaccccggcaccgacagcgaccagaucagccuguacgcccaggccagcggcagaaucaccgugagcaccaagagaagccagcagaccgugauccccaacaucggcagcagacccagagugagaggcgugagcagcagaaucagcaucuacuggaccaucgugaagcccggcgacauccugcugaucaacagcaccggcaaccugaucgcccccagaggcuacuucaagaucagaagcggcaagagcagcaucaugagaagcgacgcccccaucggcaagugcaacagcgagugcaucacccccaacggcagcauccccaacgacaagcccuuccagaacgugaacagaaucaccuacggcgccugccccagauacaucaagcagaacacccugaagcuggccaccggcaugagaaacgugcccgagaagcagaccagaggcaucuucggcgccaucgccggcuucaucgagaacggcugggagggcaugguggacggcugguacggcuucagacaccagaacagcgagggcaccggccaggccgccgaccugaagagcacccaggccgccaucaaccagaucaacggcaagcugaacagacugaucggcaagaccaacgagaaguuccaccagaucgagaaggaguucagcgagguggagggcagaauccaggaccuggagaaguacguggaggacaccaagaucgaccuguggagcuacaacgccgagcugcugguggcccuggagaaccagcacaccaucgaccugaccgacagcgagaugaacaagcuguucgagagaaccaagaagcagcugagagagaacgccgaggacaugggcaacggcugcuucaagaucuaccacaagugcgacaacgccugcaucggcagcaucagaaacggcaccuacgaccacgacguguacagagacgaggcccugaacaacagauuccagaucaagggcguggagcugaagagcggcuacaaggacuggauccuguggaucagcuucgccaucagcugcuuccugcugugcguggcccugcugggcuucaucaugugggccugccagaagggcaacaucagaugcaacaucugcaucuga

SEQ ID NO: 168583 - RNA, 1701 nt, Artificial Sequence
  derived and/or modified CDS sequence (opt4) from hemagglutinin__InfluenzaA__AFG72834
augaagaccaucaucgcccugagcuacauccugugccugguguucgcccagaagcugcccggcaacgacaacagcaccgccacccugugccugggccaccacgccgugcccaacggcacccuggugaagaccaucaccaacgaccagaucgaggugaccaacgccaccgagcuggugcagagcagcagcaccggcagaaucugcgacagcccccaccagauccuggacggcgagaacugcacccugaucgacgcccugcugggcgacccccacugcgacggcuuccagaacaaggagugggaccuguucguggagagaagcaaggccuacagcaacugcuaccccuacgacgugcccgacuacgugagccugagaagccugguggccagcagcggcacccuggaguucaacaacgagagcuucaacuggaccggcguggcccagaacggcaccagcagcgccugcaagagaagaagcaacaagagcuucuucagcagacugaacuggcugcaccagcugaaguacaaguaccccgcccugaacgugaccaugcccaacaacgagaaguucgacaagcuguacaucuggggcgugcaccaccccggcaccgacagcgaccagaucagccuguacgcccaggccagcggcagagugaccgugagcaccaagagaagccagcagaccgugauccccaacaucggcagcagacccugggugagaggcgugagcagcagaaucagcaucuacuggaccaucgugaagcccggcgacauccugcugaucaacagcaccggcaaccugaucgcccccagaggcuacuucaagauccagagcggcaagagcagcaucaugagaagcgacgcccccaucggcaagugcaacagcgagugcaucacccccaacggcagcauccccaacgacaagcccuuccagaacgugaacagaaucaccuacggcgccugccccagauacgugaagcagaacacccugaagcuggccaccggcaugagaaacgugcccgagaagcagaccagaggcaucuucggcgccaucgccggcuucaucgagaacggcugggagggcaugauggacggcugguacggcuucagacaccagaacagcgagggcaccggccaggccgccgaccugaagagcacccaggccgccaucaaccagaucaacggcaagcugaacagacugaucgagaagaccaacgagaaguuccaccagaucgagaaggaguucagcgagguggagggcagaauccaggaccuggagaaguacguggaggacaccaagaucgaccuguggagcuacaacgccgagcugcugguggcccuggagaaccagcacaccaucgaccugaccgacagcgagaugaacaagcuguucgagagaaccaagaagcagcugagagagaacgccgaggacaugggcaacggcugcuucaagaucuaccacaagugcgacaacgccugcaucggcagcaucagaaacggcaccuacgaccacgacguguacagagacgaggcccugaacaacagauuccagaucaagggcguggagcugaagagcggcuacaaggacuggauccuguggaucagcuucgccaucagcugcuuccugcugugcaucgugcugcugggcuucaucaugugggccugccagaagggcaacaucagaugcaacaucugcaucuga

SEQ ID NO: 168584 - RNA, 1701 nt, Artificial Sequence
  derived and/or modified CDS sequence (opt4) from hemagglutinin__InfluenzaA__AFG72845
augaagaccaucaucgcccugagcuacauccugugccugguguucgcccagaagcugcccggcaacgacaacagcaccgccacccugugccugggccaccacgccgugcccaacggcacccuggugaagaccaucaccaacgaccagaucgaggugaccaacgccaccgagcuggugcagagcagcagcaccagcagaaucugcgacagcccccaccagauccuggacggcgagaacugcacccugaucgacgcccugcugggcgacccccacugcgacggcuuccagaacaaggagugggaccuguucguggagagaagcaaggccuacagcaacugcuaccccuacgacgugcccgacuacgugagccugagaagccugguggccagcagcggcacccuggaguucaacaacgagagcuucaacuggaccggcguggcccagaacggcaccagcagcgccugcaagagaagaagcgacaagagcuucuucagcagacugaacuggcugcaccagcugagauacaaguaccccgcccugaacgugaccaugcccaacaacgagaaguucgacaagcuguacaucuggggcgugcaccaccccggcaccgacagcgaccagaucagccuguacgcccaggccagcggcagagugaccaucagcaccaagagaagccagcagaccgugauccccaacaucggcagcagacccugggugagaggcgugagcagcagaaucagcauccacuggaccaucgugaagcccggcgacauccugcugaucaacagcaccggcaaccugaucgcccccagaggcuacuucaagaucagaagcggcaagagcagcaucaugagaagcgacgcccccaucggcaagugcaacagcgagugcaucacccccaacggcagcauccccaacgacaagcccuuccagaacgugaacagaaucaccuacggcgccugccccagauacgugaagcagaagacccugaagcuggccaccggcaugagaaacgugcccgagaagcagaccagaggcaucuucggcgccaucgccggcuucaucgagaacggcugggagggcaugauggacggcugguacggcuucagacaccagaacagcgagggcaccggccaggccgccgaccugaagagcacccaggccgccaucaaccagaucaacggcaagcugaacagacugaucgagaagaccaacgagaaguuccaccagaucgagaaggaguucagcgagguggagggcagaauccaggaccuggagaaguacguggaggacaccaagaucgaccuguggagcuacaacgccgagcugcugguggcccuggagaaccagcacaccaucgaccugaccgacagcgagaugaacaagcuguucgagagaaccaagaagcagcugagagagaacgccgaggacaugggcaacggcugcuucaagaucuaccacaagugcgacaacgccugcaucggcagcaucagaaacggcaccuacgaccacgacguguacagagacgaggcccugaacaacagauuccagaucaagggcguggagcugaagagcggcuacaaggacuggauccuguggaucagcuucgccaucagcugcuuccugcugugcaucgugcugcugggcuucaucaugugggccugccagaagggcaacaucagaugcaacaucugcaucuga

SEQ ID NO: 168585 - RNA, 1701 nt, Artificial Sequence
  derived and/or modified CDS sequence (opt4) from hemagglutinin__InfluenzaA__AFG72856
augaagaccaucaucgcccugagcuacauccugugccugguguucgcccagaagcugcccggcaacgacaacagcaccgccacccugugccugggccaccacgccgugcccaacggcaccaucgugaagaccaucaccaacgaccagaucgaggugaccaacgccaccgagcuggugcagagcagcagcaccggcggcaucugcgacagcccccaccagauccuggacggcgagaacugcacccugaucgacgcccugcugggcgacccccagugcgacggcuuccagaacaagaagugggaccuguucguggagagaagcaaggccuacagcaacugcuaccccuacgacgugcccgacuacgccagccugagaagccugaucgccagcagcggcacccuggaguucaccaacgagagcuucaacuggaccggcgugacccagaacggcaccagcagcgccugcaagagaagaagcaacaagagcuucuucagcagacugaacuggcugacccaccugaaguacaaguaccccgcccugaacgugaccaugcccaacaacgagaaguucgacaagcuguacaucuggggcgugcaccaccccggcaccgacagcgaccagaucagccuguacgcccaggccagcggcagaaucaccgugagcaccaagagaagccagcagaccgugauccccaacaucggcagcagacccagagugagagacaucagcagcagaaucagcaucuacuggaccaucgugaagcccggcgacauccugcugaucaacagcaccggcaaccugaucgcccccagaggcuacuucaagaucagaagcggcaagagcagcaucaugagaagcgacgcccccaucggcaagugcaacagcgagugcaucacccccaacggcagcauccccaacgacaagcccuuccagaacgugaacagaaucaccuacggcgccugccccagauacgugaagcagaacacccugaagcuggccaccggcaugagaaacgugcccgagaagcagaccagaggcaucuucggcgccaucgccggcuucaucgagaacggcugggagggcaugguggacggcugguacggcuucagacaccagaacagcgagggcaccggccaggccgccgaccugaagagcacccaggccgccaucaaccagaucaacggcaagcugaacaagcugaucggcaagaccaacgagaaguuccaccagaucgagaaggaguucagcgagguggagggcagaauccaggaccuggagaaguacguggaggacaccaagaucgaccuguggagcuacaacgccgagcugcugguggcccuggagaaccagcacaccaucgaccugaccgacagcgagaugaacaagcuguucgagagaaccaagaagcagcugagagagaacgccgaggacaugggcaacggcugcuucaagaucuaccacaagugcgacaacgccugcaucggcagcaucagaaacggcaccuacgaccacgacguguacagagacgaggcccugaacaacagauuccagaucaagggcguggagcugaagagcggcuacaaggacuggauccuguggaucagcuucgccaucagcugcuuccugcugugcguggugcugcugggcuucaucaugugggccugccagaagggcaacaucagaugcaacaucugcaucuga

SEQ ID NO: 168586 - RNA, 1701 nt, Artificial Sequence
  derived and/or modified CDS sequence (opt4) from hemagglutinin__InfluenzaA__AFG72867
augaagaccaucaucgcccugagcuacauccugugccugguguucgcccagaagcugcccggcaacgacaacagcaccgccacccugugccugggccaccacgccgugcccaacggcacccuggugaagaccaucaccaacgaccagaucgaggugaccaacgccaccgagcuggugcagagcagcagcaccggcagaaucugcgacagcccccaccagauccuggacggcgagaacugcacccugaucgacgcccugcugggcgacccccacugcgacggcuuccagaacaaggagugggaccuguucguggagagaagcaaggccuacagcaacugcuaccccuacgacgugcccgacuacgugagccugagaagccugguggccagcagcggcacccuggaguucaacaacgagagcuucaacuggaccggcguggcccagaacggcaccagcagcgccugcaagagaagaagcaacaagagcuucuucagcagacugaacuggcugcaccagcugaagaacaaguaccccgcccugaacgugaccaugcccaacaacgagaaguucgacaagcuguacaucuggggcgugcaccaccccggcaccgacagcgaccagaucagccuguacgcccaggccagcggcagagugaccgugagcaccaagagaagccagcagaccgugauccccaacaucggcagcagacccagagugagagacaucagcagcagaaucagcaucuacuggaccaucgugaagcccggcgacauccugcugaucaacagcaccggcaaccugaucgcccccagaggcuacuucaagaucagaagcggcaagagcagcaucaugagaagcgacgcccccaucggcaagugcaacagcgagugcaucacccccaacggcagcauccccaacgacaagcccuuccagaacgugaacagaaucaccuacggcgccugccccagauacgugaagcagaacacccugaagcuggccaccggcaugagaaacgugcccgagaagcagaccagaggcaucuucggcgccaucgccggcuucaucgagaacggcugggagggcaugauggacggcugguacggcuucagacaccagaacagcgagggcaccggccaggccgccgaccugaagagcacccaggccgccaucaaccagaucaacggcaagcugaacagacugaucgagaagaccaacgagaaguuccaccagaucgagaaggaguucagcgagguggagggcagaauccaggaccuggagaaguacguggaggacaccaagaucgaccuguggagcuacaacgccgagcugcugguggcccuggagaaccagcacaccaucgaccugaccgacagcgagaugaacaagcuguucgagagaaccaagaagcagcugagagagaacgccgaggacaugggcaacggcugcuucaagaucuaccacaagugcgacaacgccugcaucggcagcaucagaaacggcaccuacgaccacgacguguacagagacgaggcccugaacaacagauuccagaucaagggcguggagcugaagagcggcuacaaggacuggauccuguggaucagcuucgccaucagcugcuuccugcugugcaucgugcugcugggcuucaucaugugggccugccagaagggcaacaucagaugcaacaucugcaucuga

SEQ ID NO: 168587 - RNA, 1701 nt, Artificial Sequence
  derived and/or modified CDS sequence (opt4) from hemagglutinin__InfluenzaA__AFG72922
augaagaccaucaucgcccugagcuacauccugugccugguguucgcccagaagcugcccggcgacgacaacagcaccgccacccugugccugggccaccacgccgugcccaacggcaccaucgugaagaccaucaccaacgaccagaucgaggugaccaacgccaccgagcuggugcagagcagcagcaccggcgagaucugcgacagcccccaccagauccuggacggcgagaacugcacccugaucgacgcccugcugggcgacccccagugcgacggcuuccagaacaagaagugggaccuguucguggagagaagcaaggccuacagcaacugcuaccccuacgacgugcccgacuacgccagccugagaagccugguggccagcagcggcacccuggaguucaacaacgagagcuucaacuggaccggcgugacccagaacggcaccagcagcagcugcaucagaaagagcaacaacagcuucuucagcagacugaacuggcugacccaccugaaguucaaguaccccgcccugaacgugaccaugcccaacaacgagcaguucgacaagcuguacaucuggggcgugcaccaccccggcaccgacaacgaccagaucuuccuguacgcccaggccagcggcagaaucaccgugagcaccaagagaagccagcagaccgugauccccaacaucggcagcagacccagagugagaaacauccccagcagaaucagcaucuacuggaccaucgugaagcccggcgacauccugcugaucaacagcaccggcaaccugaucgcccccagaggcuacuucaagaucagaagcggcaagagcagcaucaugagaagcgacgcccccaucggcaagugcaacagcgagugcaucacccccaacggcagcauccccaacgacaagcccuuccagaacgugaacagaaucaccuacggcgccugccccagauacgugaagcagaacacccugaagcuggccaccggcaugagaaacgugcccgagaagcagaccagaggcaucuucggcgccaucgccggcuucaucgagaacggcugggagggcaugguggacggcugguacggcuucagacaccagaacagcgagggcagaggccaggccgccgaccugaagagcacccaggccgccaucgaccagaucaacggcaagcugaacagacugaucggcaagaccaacgagaaguuccaccagaucgagaaggaguucagcgagguggagggcagaauccaggaccuggagaaguacguggaggacaccaagaucgaccuguggagcuacaacgccgagcugcugguggcccuggagaaccagcacaccaucgaccugaccgacagcgagaugaacaagcuguucgagaagaccaagaagcagcugagagagaacgccgaggacaugggcaacggcugcuucaagaucuaccacaagugcgacaacgccugcaucggcagcaucagaaacggcaccuacgaccacgacguguacagagacgaggcccugaacaacagauuccagaucaagggcguggagcugaagagcggcuacaaggacuggauccuguggaucagcuucgccaucagcugcuuccugcugugcguggcccugcugggcuucaucaugugggccugccagaagggcaacaucagaugcaacaucugcaucuga

SEQ ID NO: 168588 - RNA, 1701 nt, Artificial Sequence
  derived and/or modified CDS sequence (opt4) from hemagglutinin__InfluenzaA__AFG72933
augaagaccaucaucgcccugagcuacauccugugccugguguucgcccagaagcugcccggcaacgacaacagcaccgccacccugugccugggccaccacgccgugcccaacggcaccaucgugaagaccaucaccaacgaccagaucgaggugaccaacgccaccgagcuggugcagagcagcagcaccggcgagaucugcgacagcccccaccagauccuggacggcgagaacugcacccugaucgacgcccugcugggcgacccccagugcgacggcuuccagaacaagaagugggaccuguucguggagagaagcaaggccuacagcaacugcuaccccuacgacgugcccgacuacgccagccugagaagccugguggccagcagcggcacccuggaguucaacaacgagagcuucaacuggaccggcgugacccagaacggcaccagcagcgccugcgugagaagaagcaacaacagcuucuucagcagacugaacuggcugacccaccugaaguucaaguaccccgcccugaacgugaccaugcccaacaacgagcaguucgacaagcuguacaucuggggcgugcaccaccccggcaccgacaacgaccagaucuuccuguacgcccaggccagcggcagaaucaccgugagcaccaagagaagccagcagaccgugauccccaacaucggcagcagacccagagugagaaacauccccagcagaaucagcaucuacuggaccaucgugaagcccggcgacauccugcugaucaacagcaccggcaaccugaucgcccccagaggcuacuucaagaucagaagcggcaagagcagcaucaugagaagcgacgcccccaucggcaagugcaacagcgagugcaucacccccaacggcagcauccccaacgacaagcccuuccagaacgugaacagaaucaccuacggcgccugccccagauacgugaagcagaacacccugaagcuggccaccggcaugagaaacgugcccgagaagcagaccagaggcaucuucggcgccaucgccggcuucaucgagaacggcugggagggcaugguggacggcugguacggcuucagacaccagaacagcgagggcagaggccaggccgccgaccugaagagcacccaggccgccaucgaccagaucaacggcaagcugaacagacugaucggcaagaccaacgagaaguuccaccagaucgagaaggaguucagcgagguggagggcagaauccaggaccuggagaaguacguggaggacaccaagaucgaccuguggagcuacaacgccgagcugcugguggcccuggagaaccagcacaccaucgaccugaccgacagcgagaugaacaagcuguucgagaagaccaagaagcagcugagagagaacgccgaggacaugggcaacggcugcuucaagaucuaccacaagugcgacaacgccugcaucggcagcaucagaaacggcaccuacgaccacgacguguacagagacgaggcccugaacaacagauuccagaucaagggcguggagcugaagagcggcuacaaggacuggauccuguggaucagcuucgccaucagcugcuuccugcugugcguggcccugcugggcuucaucaugugggccugccagaagggcaacaucagaugcaacaucugcaucuga

SEQ ID NO: 168589 - RNA, 1701 nt, Artificial Sequence
  derived and/or modified CDS sequence (opt4) from hemagglutinin__InfluenzaA__AFG72955
augaagaccaucaucgcccugagcuacauccugugccugguguucgcccagaagcugcccggcaacgacaacagcaccgccacccugugccugggccaccacgccgugcccaacggcaccaucgugaagaccaucaccaacgaccagaucgaggugaccaacgccaccgagcuggugcagagcagcagcaccggcgagaucugcgacagcccccaccagauccuggacggcgagaacugcacccugaucgacgcccugcugggcgacccccagugcgacggcuuccagaacaagaagugggaccuguucguggagagaagcaaggccuacagcaacugcuaccccuacgacgugcccgacuacgccagccugagaagccugaucgccagcagcggcacccuggaguucaacaacgagagcuucaacuggaccggcgugacccagaacggcaccagcagcgccugcaucagaagaagcaacaacagcuucuucagcagacugaacuggcugacccaccugagauucaaguaccccgcccugaacgugaccaugcccaacaacgagcaguucgacaagcuguacaucuggggcgugcaccaccccggcaccgacaacgaccagaucuuccuguacgcccaggccagcggcagaaucaccgugagcaccaagagaagccagcagaccgugauccccaacaucggcagcagacccagagugagaaacauccccagcagaaucagcaucuacuggaccaucgugaagcccggcgacauccugcugaucaacagcaccggcaaccugaucgcccccagaggcuacuucaagaucagaagcggcaagagcagcaucaugagaagcgacgcccccaucggcaagugcaacagcgagugcaucacccccaacggcagcauccccaacgacaagcccuuccagaacgugaacagaaucaccuacggcgccugccccagauacgugaagcagaacacccugaagcuggccaccggcaugagaaacgugcccgagaagcagaccagaggcaucuucggcgccaucgccggcuucaucgagaacggcugggagggcaugguggacggcugguacggcuucagacaccagaacagcgagggcagaggccaggccgccgaccugaagagcacccaggccgccaucgaccagaucaacggcaagcugaacagacugaucggcaagaccaacgagaaguuccaccagaucgagaaggaguucagcgagguggagggcagaauccaggaccuggagaaguacguggaggacaccaagaucgaccuguggagcuacaacgccgagcugcugguggcccuggagaaccagcacaccaucgaccugaccgacagcgagaugaacaagcuguucgagaagaccaagaagcagcugagagagaacgccgaggacaugggcaacggcugcuucaagaucuaccacaagugcgacaacgccugcaucggcagcaucagaaacggcaccuacgaccacgacguguacagagacgaggcccugaacaacagauuccagaucaagggcguggagcugaagagcggcuacaaggacuggauccuguggaucagcuucgccaucagcugcuuccugcugugcguggcccugcugggcuucaucaugugggccugccagaagggcaacaucagaugcaacaucugcaucuga

SEQ ID NO: 168590 - RNA, 1701 nt, Artificial Sequence; identical to SEQ ID NO: 161700
  derived and/or modified CDS sequence (opt4) from hemagglutinin__InfluenzaA__AFG98808

SEQ ID NO: 168591 - RNA, 1701 nt, Artificial Sequence; identical to SEQ ID NO: 161700
  derived and/or modified CDS sequence (opt4) from hemagglutinin__InfluenzaA__AFG98819

SEQ ID NO: 168592 - RNA, 1701 nt, Artificial Sequence
  derived and/or modified CDS sequence (opt4) from hemagglutinin__InfluenzaA__AFG98830
augaagaccaucaucgcccugagcuacaucuucugccuggugcugggccaggaccugcccggcaacgacaagagcaccgccacccugugccugggccaccacgccgugcccaacggcacccuggugaagaccaucaccaacgaccagaucgaggugaccaacgccaccgagcuggugcagagcagcagcaccggcaagaucugcaacaacccccacagaauccuggacggcaucgacugcacccugaucgacgcccugcugggcgacccccacugcgacggcuuccagaacgagaccugggaccuguucguggagagaagcaaggccuucagcaacugcuaccccuacgacgugcccgacuacgccagccugagaagccugguggccagcagcggcacccuggaguucaucaccgagggcuucaccuggaccggcgugacccagaacggcggcagcagcgccugcaagagaggccccggcagcggcuucuucagcagacugaacuggcugaccaagagcggcagcaccuaccccgugcugaacgugaccaugcccaacaacgacaacuucgacaagcuguacaucuggggcgugcaccaccccagcaccaaccaggagcagaccagccuguacgugcaggccagcggcagagugaccgugagcaccagaagaagccagcagaccaucauccccaacaucggcagcagacccugggugagaggccugagcagcagaaucagcaucuacuggaccaucgugaagcccggcgacauccugaucaucaacagcaacggcaaccugaucgcccccagaggcuacuucaagaugagaaccggcaagagcagcaucaugagaagcgacgcccccaucgacaccugcaucagcgagugcaucacccccaacggcagcauccccaacgacaagcccuuccagaacgugaacaagaucaccuacggcgccugccccaaguacgugaagcagaacacccugaagcuggccaccggcaugagaaacgugcccgagaagcagaccagaggccuguucggcgccaucgccggcuucaucgagaacggcugggagggcaugaucgacggcugguacggcuucagacaccagaacagcgagggcaccggccaggccgccgaccugaagagcacccaggccgccaucgaccagaucaacggcaagcugaacagagugaucgagaagaccaacgagaaguuccaccagaucgagaaggaguucagcgagguggagggcagaauccaggaccuggagaaguacguggaggacaccaagaucgaccuguggagcuacaacgccgagcugcugguggcccuggagaaccagcacaccaucgaccugaccgacagcgagaugaacaagcuguucgagaagaccagaagacagcugagagagaacgccgaggacaugggcaacggcugcuucaagaucuaccacaagugcgacaacgccugcaucggcagcaucagaaacggcaccuacgaccacgacguguacagagacgaggcccugaacaacagauuccagaucaagggcguggagcugaagagcggcuacaaggacuggauccuguggaucagcuucgccaucagcugcuuccugcugugcguggugcugcugggcuucaucaugugggccugccagaagggcaacaucagaugcaacaucugcaucuga

SEQ ID NO: 168593 - RNA, 1701 nt, Artificial Sequence
  derived and/or modified CDS sequence (opt4) from hemagglutinin__InfluenzaA__AFG98841
augaagaccaucaucgcccugagcuacaucuucugccuggugcugggccaggaccugcccggcaacgacaagagcaccgccacccugugccugggccaccacgccgugcccaacggcacccuggugaagaccaucaccaacgaccagaucgaggugaccaacgccaccgagcuggugcagagcagcagcaccggcaagaucugcaacaacccccacagaauccuggacggcaucgacugcacccugaucgacgcccugcugggcgacccccacugcgacggcuuccagaacgagaccugggaccuguucguggagagaagcaaggccuucagcaacugcuaccccuacgacgugcccgacuacgccagccugagaagccugguggccagcagcggcacccuggaguucaucaccgagggcuucaccuggaccggcgugacccagaacggcggcagcaacgccugcaagagaggccccggcagcggcuucuucagcagacugaacuggcugaccaagagcggcagcaccuaccccgugcugaacgugaccaugcccaacaacgacaacuucgacaagcuguacaucuggggcgugcaccaccccagcaccaaccaggagcagaccagccuguacgugcaggccagcggcagagugaccgugagcaccagaagaagccagcagaccaucauccccaacaucggcagcagacccugggugagaggccugagcagcagaaucagcaucuacuggaccaucgugaagcccggcgacauccugaucaucaacagcaacggcaaccugaucgcccccagaggcuacuucaagaugagaaccggcaagagcagcaucaugagaagcgacgcccccaucggcaccugcaucagcgagugcaucacccccaacggcagcauccccaacgacaagcccuuccagaacgugaacaagaucaccuacggcgccugccccaaguacgugaagcagaacacccugaagcuggccaccggcaugagaaacgugcccgagaagcagaccagaggccuguucggcgccaucgccggcuucaucgagaacggcugggagggcaugaucgacggcugguacggcuucagacaccagaacagcgagggcaccggccaggccgccgaccugaagagcacccaggccgccaucgaccagaucaacggcaagcugaacagagugaucgagaagaccaacgagaaguuccaccagaucgagaaggaguucagcgagguggagggcagaauccaggaccuggagaaguacguggaggacaccaagaucgaccuguggagcuacaacgccgagcugcugguggcccuggagaaccagcacaccaucgaccugaccgacagcgagaugaacaagcuguucgagaagaccagaagacagcugagagagaacgccgaggacaugggcaacggcugcuucaagaucuaccacaagugcgacaacgccugcaucggcagcaucagaaacggcaccuacgaccacgacguguacagagacgaggcccugaacaacagauuccagaucaagggcguggagcugaagagcggcuacaaggacuggauccuguggaucagcuucgccaucagcugcuuccugcugugcguggugcugcugggcuucaucaugugggccugccagaagggcaacaucagaugcaacaucugcaucuga

SEQ ID NO: 168594 - RNA, 1701 nt, Artificial Sequence; identical to SEQ ID NO: 160365
  derived and/or modified CDS sequence (opt4) from hemagglutinin__InfluenzaA__AFG98852

SEQ ID NO: 168595 - RNA, 1701 nt, Artificial Sequence
  derived and/or modified CDS sequence (opt4) from hemagglutinin__InfluenzaA__AFG98863
augaagaccaucaucgcccugagcuacaucuucugccuggugcugggccaggaccugcccggcaacgacaacagcaccgccacccugugccugggccaccacgccgugcccaacggcacccuggugaagaccaucaccaacgaccagaucgaggugaccaacgccaccgagcuggugcagagcagcagcaccggcaagaucugcaacaacccccacagaauccuggacggcaucgacugcacccugaucgacgcccugcugggcgacccccacugcgacggcuuccagaacgagaccugggaccuguucguggagagaagcaaggccuucagcaacugcuaccccuacgacgugcccgacuacgccagccugagaagccugguggccagcagcggcacccuggaguucaucaacgagggcuucaccuggaccggcgugacccagaacggcggcagcagcgccugcaagagaggccccgacagcggcuucuucagcagacugaacuggcuguacaagagcggcagcaccuaccccgugcugaacgugaccaugcccaacaacgacaacuucgacaagcuguacaucuggggcgugcaccaccccagcaccaaccaggagcagaccagccuguacgugcaggccagcggcagagugaccgugagcaccaagagaagccagcagaccaucauccccaacaucggcagcagacccugggugagaggccugagcagcagaaucagcaucuacuggaccaucgugaagcccggcgacauccuggugaucaacagcaacggcaaccugaucgcccccagaggcuacuucaagaugagaaccggcaagagcagcaucaugagaagcgacgcccccaucggcaccugcaucagcgagugcaucacccccaacggcagcauccccaacgacaagcccuuccagaacgugaacaagaucaccuacggcgccugccccaaguacgugaagcagaacacccugaagcuggccaccggcaugagaaacgugcccgagaagcagaccagaggccuguucggcgccaucgccggcuucaucgagaacggcugggagggcaugaucgacggcugguacggcuucagacaccagaacagcgagggcaccggccaggccgccgaccugaagagcacccaggccgccaucgaccagaucaacggcaagcugaacagagugaucgagaagaccaacgagaaguuccaccagaucgagaaggaguucagcgagguggagggcagaauccaggaccuggagaaguacguggaggacaccaagaucgaccuguggagcuacaacgccgagcugcugguggcccuggagaaccagcacaccaucgaccugaccgacagcgagaugaacaagcuguucgagaagaccagaagacagcugagagagaacgccgaggacaugggcaacggcugcuucagaaucuaccacaagugcgacaacgccugcaucggcagcaucagaaacggcaccuacgaccacgacguguacagagacgaggcccugaacaacagauuccagaucaagggcguggagcugaagagcggcuacaaggacuggauccuguggaucagcuucgccaucagcugcuuccugcugugcguggugcugcugggcuucaucaugugggccugccagaagggcaacaucagaugcaacaucugcaucuga

SEQ ID NO: 168596 - RNA, 1701 nt, Artificial Sequence
  derived and/or modified CDS sequence (opt4) from hemagglutinin__InfluenzaA__AFG98874
augaagaccaucaucgcccugagcuacaucuucugccuggugcugggccaggacuuccccggcaacgacaacagcaccgccacccugugccugggccaccacgccgugcccaacggcacccuggugaagaccaucaccaacgaccagaucgaggugaccaacgccaccgagcuggugcagagcagcagcaccggcaagaucugcaacaacccccacagaauccuggacggcaucgacugcacccugaucgacgcccugcugggcgacccccacugcgacggcuuccagaacgagaccugggaccuguucguggagagaagcaaggccuucagcaacugcuaccccuacgacgugcccgacuacgccagccugagaagccugguggccagcagcggcacccuggaguucaucaacgagggcuucaccuggaccggcgugacccagaacggcggcagcaacgccugcaagagaggccccgacaacggcuucuucagcagacugaacuggcuguacaagagcggcagcaccuaccccgugcugaacgugaccaugcccaacaacgacaacuucgacaagcuguacaucuggggcgugcaccaccccagcaccgaccaggagcagaccagccuguacgugcaggccagcggcagagugaccgugagcaccaagagaagccagcagaccaucauccccaacaucggcagcagacccugggugagaggccugagcagcagaaucagcaucuacuggaccaucgugaagcccggcgacauccuggugaucaacagcaacggcaaccugaucgcccccagaggcuacuucaagaugagaaccggcaagagcagcaucaugagaagcgacgcccccaucggcaccugcaucagcgagugcaucacccccaacggcagcauccccaacgacaagcccuuccagaacgugaacaagaucaccuacggcgccugccccaaguacgugaagcagaacacccugaagcuggccaccggcaugagaaacgugcccgagaagcagaccagaggccuguucggcgccaucgccggcuucaucgagaacggcugggagggcaugaucgacggcugguacggcuucagacaccagaacagcgagggcaccggccaggccgccgaccugaagagcacccaggccgccaucgaccagaucaacggcaagcugaacagagugaucgagaagaccaacgagaaguuccaccagaucgagaaggaguucagcgagguggagggcagaauccaggaccuggagaaguacguggaggacaccaagaucgaccuguggagcuacaacgccgagcugcugguggcccuggagaaccagcacaccaucgaccugaccgacagcgagaugaacaagcuguucgagaagaccagaagacagcugagagagaacgccgaggacaugggcaacggcugcuucaagaucuaccacaagugcgacaacgccugcaucggcagcaucagaaacggcaccuacgaccacgacguguacagagacgaggcccugaacaacagauuccagaucaagggcguggagcugaagagcggcuacaaggacuggauccuguggaucagcuucgccaucagcugcuuccugcugugcguggugcugcugggcuucaucaugugggccugccagaagggcaacaucagaugcaacaucugcaucuga

SEQ ID NO: 168597 - RNA, 1701 nt, Artificial Sequence
  derived and/or modified CDS sequence (opt4) from hemagglutinin__InfluenzaA__AFG98885
augaagaccaucaucgcccugagcuacaucuucugccuggugcugggccaggacuuccccggcaacgacaacagcaccgccacccugugccugggccaccacgccgugcccaacggcacccuggugaagaccaucaccaacgaccagaucgaggugaccaacgccaccgagcuggugcagagcagcagcaccggcaagaucugcaacaacccccacagaauccuggacggcaucgacugcacccugaucgacgcccugcugggcgacccccacugcgacggcuuccagaacgagaccugggaccuguucguggagagaagcaaggccuucagcaacugcuaccccuacgacgugcccgacuacgccagccugagaagccugguggccagcagcggcacccuggaguucaucaacgagggcuucaccuggaccggcgugacccagaacggcggcagcaacgccugcaagagaggcaccgacagcggcuucuucagcagacugaacuggcuguacaagagcggcagcaccuaccccgugcugaacgugaccaugcccaacaacgacaacuucgacaagcuguacaucuggggcgugcaccaccccagcaccgaccaggagcagaccagccuguacgugcaggccagcggcagagugaccgugagcaccaagagaagccagcagaccaucauccccaacaucggcagcagacccugggugagaggccugagcagcagaaucagcaucuacuggaccaucgugaagcccggcgacauccuggugaucaacagcaacggcaaccugaucgcccccagaggcuacuucaagaugagaaccggcaagagcagcaucaugagaagcgacgcccccaucggcaccugcaucagcgagugcaucacccccaacggcagcauccccaacgacaagcccuuccagaacgugaacaagaucaccuacggcgccugccccaaguacgugaagcagaacacccugaagcuggccaccggcaugagaaacgugcccgagaagcagaccagaggccuguucggcgccaucgccggcuucaucgagaacggcugggagggcaugaucgacggcugguacggcuucagacaccagaacagcgagggcaccggccaggccgccgaccugaagagcacccaggccgccaucgaccagaucaacggcaagcugaacagagugaucgagaagaccaacgagaaguuccaccagaucgagaaggaguucagcgagguggagggcagaauccaggaccuggagaaguacguggaggacaccaagaucgaccuguggagcuacaacgccgagcugcugguggcccuggagaaccagcacaccaucgaccugaccgacagcgagaugaacaagcuguucgagaagaccagaagacagcugagagagaacgccgaggacaugggcaacggcugcuucaagaucuaccacaagugcgacaacgccugcaucggcagcaucagaaacggcaccuacgaccacgacguguacagagacgaggcccugaacaacagauuccagaucaagggcguggagcugaagagcggcuacaaggacuggauccuguggaucagcuucgccaucagcugcuuccugcugugcguggugcugcugggcuucaucaugugggccugccagaagggcaacaucagaugcaacaucugcaucuga

SEQ ID NO: 168598 - RNA, 1701 nt, Artificial Sequence
  derived and/or modified CDS sequence (opt4) from hemagglutinin__InfluenzaA__AFG98896
augaagaccaucaucgcccugagcuacaucuucugccuggugcugggccaggacuuccccggcaacgacaacagcaccgccacccugugccugggccaccacgccgugcccaacggcacccuggugaagaccaucaccaacgaccagaucgaggugaccaacgccaccgagcuggugcagagcagcagcaccggcaagaucugcaacaacccccacagaauccuggacggcaucaacugcacccugaucgacgcccugcugggcgacccccacugcgacggcuuccagaacgagaccugggaccuguucguggagagaagcaaggccuucagcaacugcuaccccuacgacgugcccgacuacgccagccugagaagccugguggccagcagcggcacccuggaguucaucaacgagggcuucaccuggaccggcgugacccagaacggcggcagcaacgccugcaagagaggccccgacagcggcuucuucagcagacugaacuggcuguacaagagcggcagcgccuaccccgugcugaacgugaccaugcccaacaacgacaacuucgacaagcuguacaucuggggcgugcaccaccccagcaccgaccaggagcagaccaaccuguacgugcagaccagcggcagagugaccgugagcaccaagagaagccagcagaccaucauccccaacaucggcagcagacccugggugagaggccugagcagcagaaucagcaucuacuggaccaucgugaagcccggcgacauccuggugaucaacagcaacggcaaccugaucgcccccagaggcuacuucaagaugagaaccggcaagagcagcaucaugagaagcgacgcccccaucggcaccugcaucagcgagugcaucacccccaacggcagcauccccaacgacaagcccuuccagaacgugaacaagaucaccuacggcgccugccccaaguacgugaagcagaacacccugaagcuggccaccggcaugagaaacgugcccgagaagcagaccagaggcaucuucggcgccaucgccggcuucaucgagaacggcugggagggcaugaucgacggcugguacggcuucagacaccagaacagcgagggcaccggccaggccgccgaccugaagagcacccaggccgccaucgaccagaucaacggcaagcugaacagagugaucgagaagaccaacgagaaguuccaccagaucgagaaggaguucagcgagguggagggcagaauccaggaccuggagaaguacguggaggacaccaagaucgaccuguggagcuacaacgccgagcugcugguggcccuggagaaccagcacaccaucgaccugaccgacagcgagaugaacaagcuguucgagaagaccagaagacagcugagagagaacgccgaggacaugggcaacggcugcuucaagaucuaccacaagugcgacaacgccugcaucggcagcaucagaaacggcaccuacgaccacgacguguacagagacgaggcccugaacaacagauuccagaucaagggcguggagcugaagagcggcuacaaggacuggauccuguggaucagcuucgccaucagcugcuuccugcugugcguggugcugcugggcuucaucaugugggccugccagaagggcaacaucagaugcaacaucugcaucuga

SEQ ID NO: 168599 - RNA, 1701 nt, Artificial Sequence
  derived and/or modified CDS sequence (opt4) from hemagglutinin__InfluenzaA__AFG98907
augaagaccaucaucgcccugagcuacaucuucugccuggugcugggccaggaccugcccggcaacgacaacagcaccgccacccugugccugggccaccacgccgugcccaacggcacccuggugaagaccaucaccaacgaccagaucgaggugaccaacgccaccgagcuggugcagagcagcagcaccggcaagaucugcaacaacccccacagaauccuggacggcaucaacugcacccugaucgacgcccugcugggcgacccccacugcgacggcuuccagaacgagaagugggaccuguucguggagagaagcaaggccuucagcaacugcuaccccuacgacgugcccgacuacgccagccugagaagccugguggccagcagcggcacccuggaguucaucaacgagggcuucaacuggaccggcgugacccagaacggcggcagcaacgccugcaagagaggccccgacugcggcuucuucagcagacugaacuggcuguacaagagcggcagcaccuaccccgugcugaacgugaccaugcccaacaacgacaacuucgacaagcuguacaucuggggcgugcaccaccccagcaccgaccaggagcagaccaaccuguacgugcaggccagcggcagagugaccgugagcaccaagagaagccagcagaccaucauccccaacaucggcagcagacccugggugagaggccugagcagcagaaucagcaucuacuggaccaucgugaagcccggcgacauccuggugaucaacagcaacggcaaccugaucgcccccagaggcuacuucaagaugagaaccggcaagagcagcaucaugagaagcgacgcccccaucggcaccugcaucagcgagugcaucacccccaacggcagcauccccaacgacaagcccuuccagaacgugaacaagaucaccuacggcgccugccccaaguacgugaagcagaacacccugaagcuggccaccggcaugagaaacgugcccgagaagcagaccagaggcaucuucggcgccaucgccggcuucaucgagaacggcugggagggcaugaucgacggcugguacggcuucagacaccagaacagcgagggcaccggccaggccgccgaccugaagagcacccaggccgccaucgaccagaucaacggcaagcugaacagagugaucgagaagaccaacgagaaguuccaccagaucgagaaggaguucagcgagguggagggcagaauccaggaccuggagaaguacguggaggacaccaagaucgaccuguggagcuacaacgccgagcugcugguggcccuggagaaccagcacaccaucgaccugaccgacagcgagaugaacaagcuguucgagaagaccagaagacagcugagagagaacgccgaggacaugggcaacggcugcuucaagaucuaccacaagugcgacaacgccugcaucggcagcaucagaaacggcaccuacaaccacgacguguacagagacgaggcccugaacaacagauuccagaucaagggcguggagcugaagagcggcuacaaggacuggauccuguggaucagcuucgccaucagcugcuuccugcugugcguggugcugcugggcuucaucaugugggccugccagaagggcaacaucagaugcaacaucugcaucuga

SEQ ID NO: 168600 - RNA, 1701 nt, Artificial Sequence
  derived and/or modified CDS sequence (opt4) from hemagglutinin__InfluenzaA__AFG98918
augaagaccaucaucgcccugagcuacaucuucugccuggugcugggccaggaccugcccggcaacgacaacagcaccgccacccugugccugggccaccacgccgugcccaacggcacccuggugaagaccaucaccaacgaccagaucgaggugaccaacgccaccgagcuggugcagagcagcagcaccggcaagaucugcaacaacccccacagaauccuggacggcaucaacugcacccugaucgacgcccugcugggcgacccccacugcgacggcuuccagaacgagaagugggaccuguucguggagagaagcaaggccuucagcaacugcuaccccuacgacgugcccgacuacgccagccugagaagccugguggccagcagcggcacccuggaguucaucaacgagggcuucaacuggaccggcgugacccagaacggcggcagcaacgccugcaagagaggccccgacagaggcuucuucagcagacugaacuggcuguacaagagcggcagcaccuaccccgugcugaacgugaccaugcccaacaacgacaacuucgacaagcuguacaucuggggcgugcaccaccccagcaccgaccaggagcagaccaaccuguacgugcaggccagcggcagagugaccgugagcaccaagagaagccagcagaccaucauccccaacaucggcagcagacccugggugagaggccugagcagcagaaucagcaucuacuggaccaucgugaagcccggcgacauccuggugaucaacagcaacggcaaccugaucgcccccagaggcuacuucaagaugagaaccggcaagagcagcaucaugagaagcgacgcccccaucggcaccugcaucagcgagugcaucacccccaacggcagcauccccaacgacaagcccuuccagaacgugaacaagaucaccuacggcgccugccccaaguacgugaagcagaacacccugaagcuggccaccggcaugagaaacgugcccgagaagcagaccagaggcaucuucggcgccaucgccggcuucaucgagaacggcugggagggcaugaucgacggcugguacggcuucagacaccagaacagcgagggcaccggccaggccgccgaccugaagagcacccaggccgccaucgaccagaucaacggcaagcugaacagagugaucgagaagaccaacgagaaguuccaccagaucgagaaggaguucagcgagguggagggcagaauccaggaccuggagaaguacguggaggacaccaagaucgaccuguggagcuacaacgccgagcugcugguggcccuggagaaccagcacaccaucgaccugaccgacagcgagaugaacaagcuguucgagaagaccagaagacagcugagagagaacgccgaggacaugggcaacggcugcuucaagaucuaccacaagugcgacaacgccugcaucggcagcaucagaaacggcaccuacaaccacgacguguacagagacgaggcccugaacaacagauuccagaucaagggcguggagcugaagagcggcuacaaggacuggauccuguggaucagcuucgccaucagcugcuuccugcugugcguggugcugcugggcuucaucaugugggccugccagaagggcaacaucagaugcaacaucugcaucuga

SEQ ID NO: 168601 - RNA, 1701 nt, Artificial Sequence
  derived and/or modified CDS sequence (opt4) from hemagglutinin__InfluenzaA__AFG98929
augaagaccgugaucgcccugagcuacaucuucugccuggugcugggccaggaccugcccggcaacgacaacagcaccgccacccugugccugggccaccacgccgugcccaacggcacccuggugaagaccaucaccaacgaccagaucgaggugaccaacgccaccgagcuggugcagagcagcagcaccggcaagaucugcaacaacccccacagaauccuggacggcaucaacugcacccugaucgacgcccugcugggcgacccccacugcgacggcuuccagaacgagaagugggaccuguucguggagagaagcaaggccuucagcaacugcuaccccuacgacgugcccgacuacgccagccugagaagccugguggccagcagcggcacccuggaguucaucaacgagggcuucaacuggaccggcgugacccagaacggcggcagcaacgccugcaagagaggccccgacaucggcuucuucagcagacugaacuggcuguacaagagcggcagcaccuaccccgugcugaacgugaccaugcccaacaacgacaacuucgacaagcuguacaucuggggcgugcaccaccccagcaccgaccaggagcagaccaaccuguacgugcaggccagcggcagagugaccgugagcaccaagagaagccagcagaccaucauccccaacaucggcagcagacccugggugagaggccugagcagcagaaucagcaucuacuggaccaucgugaagcccggcgacauccuggugaucaacagcaacggcaaccugaucgcccccagaggcuacuucaagaugagaaccggcaagagcagcaucaugagaagcgacgcccccaucggcaccugcaucagcgagugcaucacccccaacggcagcauccccaacgacaagcccuuccagaacgugaacaagaucaccuacggcgccugccccaaguacgugaagcagaacacccugaagcuggccaccggcaugagaaacgugcccgagaagcagaccagaggcaucuucggcgccaucgccggcuucaucgagaacggcugggagggcaugaucgacggcugguacggcuucagacaccagaacagcgagggcaccggccaggccgccgaccugaagagcacccaggccgccaucgaccagaucaacggcaagcugaacagagugaucgagaagaccaacgagaaguuccaccagaucgagaaggaguucagcgagguggagggcagaauccaggaccuggagaaguacguggaggacaccaagaucgaccuguggagcuacaacgccgagcugcugguggcccuggagaaccagcacaccaucgaccugaccgacagcgagaugaacaagcuguucgagaagaccagaagacagcugagagagaacgccgaggacaugggcaacggcugcuucaagaucuaccacaagugcgacaacgccugcaucggcagcaucagaaacggcaccuacaaccacgacguguacagagacgaggcccugaacaacagauuccagaucaagggcguggagcugaagagcggcuacaaggacuggauccuguggaucagcuucgccaucagcugcuuccugcugugcguggugcugcugggcuucaucaugugggccugccagaagggcaacaucagaugcaacaucugcaucuga

SEQ ID NO: 168602 - RNA, 1701 nt, Artificial Sequence
  derived and/or modified CDS sequence (opt4) from hemagglutinin__InfluenzaA__AFG98940
augaagaccaucaucgcccugagcuacaucuucugccuggugcugggccaggaccugcccggcaacgacaacagcaccgccacccugugccugggccaccacgccgugcccaacggcacccuggugaagaccaucaccaacgaccagaucgaggugaccaacgccaccgagcuggugcagagcagcagcaccggcaagaucugcaacaacccccacagaauccuggacggcaucaacugcacccugaucgacgcccugcugggcgacccccacugcgacggcuuccagaacgagaagugggaccuguucguggagagaagcaaggccuucagcaacugcuaccccuacgacgugcccgacuacgccagccugagaagccugguggccagcagcggcacccuggaguucaucaacgagggcuucaacuggaccggcgugacccagaacggcggcagcaacgccugcaagagaggccccgacagcggcuucuucagcagacugaacuggcuguacaagagcggcagcaccuaccccgugcugaacgugaccaugcccaacaaggacaacuucgacaagcuguacaucuggggcgugcaccaccccagcaccgaccaggagcagaccaaccuguacgugcaggccagcggcagagugaccgugagcaccaagagaagccagcagaccaucauccccaacaucggcagcagacccugggugagaggcaugagcagcagaaucagcaucuacuggaccaucgugaagcccggcgacauccuggugaucaacagcaacggcaaccugaucgcccccagaggcuacuucaagaugagaaccggcagaagcagcaucaugagaagcgacgcccccaucggcaccugcaucagcgagugcaucacccccaacggcagcauccccaacgacagacccuuccagaacgugaacaagaucaccuacggcgccugccccaaguacgugaagcagaacacccugaagcuggccaccggcaugagaaacgugcccgagaagcagaccagaggcaucuucggcgccaucgccggcuucaucgagaacggcugggagggcaugaucgacggcugguacggcuucagacaccagaacagcgagggcaccggccaggccgccgaccugaagagcacccaggccgccaucgaccagaucaacggcaagcugaacagagugaucgagaagaccaacgagaaguuccaccagaucgagaaggaguucagcgagguggagggcagaauccaggaccuggagaaguacguggaggacaccaagaucgaccuguggagcuacaacgccgagcugcugguggcccuggagaaccagcacaccaucgaccugaccgacagcgagaugaacaagcuguucgagaagaccagaagacagcugagagagaacgccgaggacaugggcaacggcugcuucaagaucuaccacaagugcgacaacgccugcaucgagagcaucagaaacggcaccuacaaccacgacguguacagagacgaggcccugaacaacagauuccagaucaagggcguggagcugaagagcggcuacaaggacuggauccuguggaucagcuucgccaucagcugcuuccugcugugcguggugcugcugggcuucaucaugugggccugccagaagggcaacaucagaugcaacaucugcaucuga

SEQ ID NO: 168603 - RNA, 1701 nt, Artificial Sequence
  derived and/or modified CDS sequence (opt4) from hemagglutinin__InfluenzaA__AFG98962
augaagaccaucaucgcccugagcuacaucuucugccuggugcuggcccaggaccugcccggcaacgacaacagcaccgccacccugugccugggccaccacgccgugcccaacggcacccuggugaagaccaucaccaacgaccagaucgaggugaccaacgccaccgagcuggugcagagcagcagcaccggcaagaucugcaacaacccccacagaauccuggacggcaucaacugcacccugaucgacgcccugcugggcgacccccacugcgacggcuuccagaacgagaagugggaccuguucguggagagaagcaaggccuucagcaacugcuaccccuacgacgugcccgacuacgccagccugagaagccugguggccagcagcggcacccuggaguucaucaacgagggcuucaacuggaccggcgugacccagaacggcggcagcaacgccugcaagagaggccccgacagcggcuucuucagcagacugaacuggcuguacaagagcggcagcaccuaccccgugcugaacgugaccaugcccaacaacgacaacuucgacaagcuguacaucuggggcgugcaccaccccagcaccgaccaggagcagaccaaccuguacgugcaggccagcggcagagugaccgugagcaccaagagaagccagcagaccaucauccccaacgugggcagcagacccugggugagaggccugagcagcagaaucagcaucuacuggaccaucgugaagcccggcgacauccuggugaucaacagcaacggcaaccugaucgcccccagaggcuacuucaagaugagaaccggcaagagcagcaucaugagaagcgacgcccccaucggcaccugcagcagcgagugcaucacccccaacggcagcauccccaacgacaagcccuuccagaacgugaacaagaucaccuacggcgccugccccaaguacgugaagcagaacacccugaagcuggccaccggcaugagaaacgugcccgagaagcagaccagaggcaucuucggcgccaucgccggcuucaucgagaacggcugggagggcaugaucgacggcugguacggcuucagacaccagaacagcgagggcaccggccaggccgccgaccugaagagcacccaggccgccaucgaccagaucaacggcaagcugaacagagugaucgagaagaccaacgagaaguuccaccagaucgagaaggaguucagcgagguggagggcagaauccaggaccuggagaaguacguggaggacaccaagaucgaccuguggagcuacaacgccgagcugcugguggcccuggagaaccagcacaccaucgaccugaccgacagcgagaugaacaagcuguucgagaagaccagaagacagcugagagagaacgccgaggacaugggcaacggcugcuucaagaucuaccacaagugcgacaacgccugcaucggcagcaucagaaacggcaccuacgaccacgacguguacagagacgaggcccugaacaacagauuccagaucaagggcguggagcugaagagcggcuacaaggacuggauccuguggaucagcuucgccaucagcugcuuccugcugugcguggugcugcugggcuucaucaugugggccugccagaagggcaacaucagaugcaacaucugcaucuga

SEQ ID NO: 168604 - RNA, 1701 nt, Artificial Sequence
  derived and/or modified CDS sequence (opt4) from hemagglutinin__InfluenzaA__AFG98973
augaagaccaucaucgcccugagcuacaucuucugccuggugcugggccaggacuuccccagaaacgacaacagcaccgccacccugugccugggccaccacgccgugcccaacggcacccuggugaagaccaucaccaacgaccagaucgaggugaccaacgccaacgagcuggugcagagcagcagcaccggcaagaucugcaacaacccccacagaauccuggacggcauggacugcacccugaucgacgcccugcugggcgacccccacugcgacggccugcagaacgagaccugggaccuguucguggagagaagcaaggccuucagcaacugcuaccccuacgacgugcccgacuacgccagccugagaagccugguggccagcagcggcacccuggaguucaucaacgagggcuucaccuggaccggcgugacccagaacggcggcagcaacgccugcaagagaggccccgacagaggcuucuucagcagacugaacuggcuguacaagagcggcaacaccuaccccgugcugaacgugaccaugcccaacaacgacaacuucgacaagcuguacaucuggggcgugcaccaccccagcaccgaccaggaccagaccagccuguacgugcaggccagcggcagagugaccgugagcaccaagagaagccagcagaccgugauccccaacaucggccccagacccugggugagaggccugagcagcggcaucagcaucuacuggaccaucgugaagcccggcgacauccugcugaucaacagcaacggcaaccugaucgcccccagaggcuacuucaagaugagaaccggcaagagcagcaucaugagaagcgacgcccccaucggcaccugcaucagcgagugcaucacccccaacggcagcauccccaacgacaagcccuuccagaacgugaacaagaucaccuacggcgccugccccaaguacgugaagcagaacacccugaagcuggccaccggcaugagaaacgugcccgagaagcagaccagaggcaucuucggcgccaucgccggcuucaucgagaacggcugggagggcaugaucgacggcugguacggcuucagacaccagaacagcgagggcaccggccaggccgccgaccugaagagcacccaggccgccaucgaccagaucaacggcaagcugaacagagugaucgagaagaccaacgagaaguuccaccagaucgagaaggaguucagcgagguggagggcagaauccaggaccuggagaaguacguggaggacaccaagaucgaccuguggagcuacaacgccgagcugcugguggcccuggagaaccagcacaccaucgaccugaccgacagcgagaugaacaagcuguucgagaagaccagaagacagcugagagagaacgccgaggacaugggcaacggcugcuucaagaucuaccacagaugcgacaacgccugcaucggcagcaucagaaacggcaccuacgaccacgacguguacagagacgaggcccugaacaacagauuccagaucaagggcguggagcugaagagcggcuacaaggacuggauccuguggaucagcuucgccaucagcugcuuccugcugugcguggugcugcugggcuucaucaugugggccugccagaagggcaacaucagaugcaacaucugcaucuga

SEQ ID NO: 168605 - RNA, 1701 nt, Artificial Sequence
  derived and/or modified CDS sequence (opt4) from hemagglutinin__InfluenzaA__AFG98984
augaagaccaucaucgcccugagcuacaucuucugccuggugcugggccaggacuuccccagaaacgacaacagcaccgccacccugugccugggccaccacgccgugcccaacggcacccuggugaagaccaucaccaacgaccagaucgaggugaccaacgccaccgagcuggugcagagcagcagcaccggcaagaucugcaacaacccccacagaauccuggacggcauggacugcacccugaucgacgcccugcugggcgacccccacugcgacggccugcagaacgagaccugggaccuguucguggagagaagcaaggccuucagcaacugcuaccccuacgacgugcccgacuacgccagccugagaagccugguggccagcagcggcacccuggaguucaucaacgagggcuucaccuggaccggcgugacccagaacggcggcagcaacgccugcaagagaggccccgacagaggcuucuucagcagacugaacuggcuguacaagagcggcaacaccuaccccgugcugaacgugaccaugcccaacaacgacaacuucgacaagcuguacaucuggggcgugcaccaccccagcaccgaccaggaccagaccagccuguacgugcaggccagcggcagagugaccgugagcaccaagagaagccagcagaccgugauccccaacaucggccccagacccugggugagaggccugagcagcggcaucagcaucuacuggaccaucgugaagcccggcgacauccugcugaucaacagcaacggcaaccugaucgcccccagaggcuacuucaagaugagaaccggcaagagcagcaucaugagaagcgacgcccccaucggcaccugcaucagcgagugcaucacccccaacggcagcauccccaacgacaagcccuuccagaacgugaacaagaucaccuacggcgccugccccaaguacgugaagcagaacacccugaagcuggccaccggcaugagaaacgugcccgagaagcagaccagaggcaucuucggcgccaucgccggcuucaucgagaacggcugggagggcaugaucgacggcugguacggcuucagacaccagaacagcgagggcaccggccaggccgccgaccugaagagcacccaggccgccaucgaccagaucaacggcaagcugaacagagugaucgagaagaccaacgagaaguuccaccagaucgagaaggaguucagcgagguggagggcagaauccaggaccuggagaaguacguggaggacaccaagaucgaccuguggagcuacaacgccgagcugcugguggcccuggagaaccagcacaccaucgaccugaccgacagcgagaugaacaagcuguucgagaagaccagaagacagcugagagagaacgccgaggacaugggcaacggcugcuucaagaucuaccacagaugcgacaacgccugcaucggcagcaucagaaacggcaccuacgaccacgacguguacagagacgaggcccugaacaacagauuccagaucaagggcguggagcugaagagcggcuacaaggacuggauccuguggaucagcuucgccaucagcugcuuccugcugugcguggugcugcugggcuucaucaugugggccugccagaagggcaacaucagaugcaacaucugcaucuga

SEQ ID NO: 168606 - RNA, 1704 nt, Artificial Sequence
  derived and/or modified CDS sequence (opt4) from hemagglutinin__InfluenzaA__AFG98995
augaagaccaucaucgcccugagcuacaucuucugccugguguucgcccaggaccugcccggcaacgacaacaacagcaccgccacccugugccugggccaccacgccgugcccaacggcacccuggugaagaccaucaccaacgaccagaucgaggugaccaacgccaccgagcuggugcagagcagcagcaccggcaagaucugcaacaacccccacagaauccuggacggcaucaacugcacccugaucgacgcccugcugggcgacccccacugcgacggcuuccagaacgagaagugggaccuguucguggagagaagcaaggccuucagcaacugcuaccccuacgacgugcccgacuacgccagccugagaagccugguggccagcagcggcacccuggaguucaucaacgagggcuucaacuggaccggcgugacccagaacggcggcagcaacgccugcaagagaggccccgacaucggcuucuucagcagacugaacuggcuguacaagagcggcagcaccuaccccgugcagaacgugaccaugcccaacaacgacaacagcgacaagcuguacaucuggggcgugcaccaccccagcaccgacaaggagcagaccgaccuguacgugcaggccagcggcaaggugaccgugagcaccaagagaagccagcagaccaucauccccaacgugggcagcagacccugggugagaggccugagcagcagaaucagcaucuacuggaccaucgugaagcccggcgacauccuggugaucaacagcaacggcaaccugaucgcccccagaggcuacuucaagaugagaaccggcaagagcagcaucaugagaagcgacgcccccaucggcaccugcagcagcgagugcaucacccccaacggcagcauccccaacgacaagcccuuccagaacgugaacaagaucaccuacggcgccugccccaaguacgugaagcagaacacccugaagcuggccaccggcaugagaaacgugcccgagaagcagaccagaggcaucuucggcgccaucgccggcuucaucgagaacggcugggagggcaugaucgacggcugguacggcuucagacaccagaacagcgagggcaccggccaggccgccgaccugaagagcacccaggccgccaucgaccagaucaacggcaagcugaacagagugaucgagaagaccaacgagaaguuccaccagaucgagaaggaguucagcgagguggagggcagaauccaggaccuggagaaguacguggaggacaccaagaucgaccuguggagcuacaacgccgagcugcugguggcccuggagaaccagcacaccaucgaccugaccgacagcgagaugaacaagcuguucgagaagaccagaagacagcugagagagaacgccgaggacaugggcaacggcugcuucaagaucuaccacaagugcgacaacgccugcaucggcagcaucagaaacggcaccuacgaccacgacguguacagagacgaggcccugaacaacagauuccagaucaagggcguggagcugaagagcggcuacaaggacuggauccuguggaucagcuucgccaucagcugcuuccugcugugcguggugcugcugggcuucaucaugugggccugccagaagggcaacaucagaugcaacaucugcaucuga

SEQ ID NO: 168607 - RNA, 1701 nt, Artificial Sequence
  derived and/or modified CDS sequence (opt4) from hemagglutinin__InfluenzaA__AFG99006
augaagaccaucaucgcccugagcuacaucuucugccuggugcugggccaggacuuccccagaaacgacaacagcaccgccacccugugccugggccaccacgccgugcccaacggcacccuggugaagaccaucaccaacgaccagaucgaggugaccaacgccaccgagcuggugcagagcagcagcaccggcaagaucugcaacaacccccacagaauccuggacggcauggacugcacccugaucgacgcccugcugggcgacccccacugcgacggccugcagaacgagaccugggaccuguucguggagagaagcaaggccuucagcaacugcuaccccuacgacgugcccgacuacgccagccugagaagccugguggccagcagcggcacccuggaguucaucaacgagggcuucaccuggaccggcgugacccagaacggcggcagcaacgccugcaagagaggccccgacagaggcuucuucagcagacugaacuggcuguacaagagcggcaacaccuaccccgugcugaacgugaccaugcccaacaacgacaacuucgacaagcuguacaucuggggcgugcaccaccccagcaccgaccaggaccagaccagccuguacgugcaggccagcggcagagugaccgugagcaccaagagaagccagcagaccgugauccccaacaucggccccagacccugggugagaggccugagcagcagaaucagcaucuacuggaccaucgugaagcccggcgacauccugcugaucaacagcaacggcaaccugaucgcccccagaggcuacuucaagaugagaaccggcaagagcagcaucaugagaagcgacgcccccaucggcaccugcaucagcgagugcaucacccccaacggcagcauccccaacgacaagcccuuccagaacgugaacaagaucaccuacggcgccugccccaaguacgugaagcagaacacccugaagcuggccaccggcaugagaaacgugcccgagaagcagaccagaggcaucuucggcgccaucgccggcuucaucgagaacggcugggagggcaugaucgacggcugguacggcuucagacaccagaacagcgagggcaccggccaggccgccgaccugaagagcacccaggccgccaucgaccagaucaacggcaagcugaacagagugaucgagaagaccaacgagaaguuccaccagaucgagaaggaguucagcgagguggagggcagaauccaggaccuggagaaguacguggaggacaccaagaucgaccuguggagcuacaacgccgagcugcugguggcccuggagaaccagcacaccaucgaccugaccgacagcgagaugaacaagcuguucgagaagaccagaagacagcugagagagaacgccgaggacaugggcaacggcugcuucaagaucuaccacagaugcgacaacgccugcaucggcagcaucagaaacggcaccuacgaccacgacguguacagagacgaggcccugaacaacagauuccagaucaagggcguggagcugaagagcggcuacaaggacuggauccuguggaucagcuucgccaucagcugcuuccugcugugcguggugcugcugggcuucaucaugugggccugccagaagggcaacaucagaugcaacaucugcaucuga

SEQ ID NO: 168608 - RNA, 1701 nt, Artificial Sequence; identical to SEQ ID NO: 160824
  derived and/or modified CDS sequence (opt4) from hemagglutinin__InfluenzaA__AFG99017

SEQ ID NO: 168609 - RNA, 1701 nt, Artificial Sequence
  derived and/or modified CDS sequence (opt4) from hemagglutinin__InfluenzaA__AFG99028
augaagaccaucaucgcccugagcuacaucuucugccugguguucgcccaggaccugcccggcaacgacaacagcaccgccacccugugccugggccaccacgccgugcccaacggcacccuggugaagaccaucaccaacgaccagaucgaggugaccaacgccaccgagcuggugcagagcagcagcaccggcaagaucugcggcaacccccacagaauccuggacggcaucaacugcacccugaucgacgcccugcugggcgacccccacugcgacggcuuccagaacgagaagugggaccuguucguggagagaagcaaggccuucagcaacugcuaccccuacgacgugcccgacuacgccagccugagaagccugguggccagcagcggcacccuggaguucaucaacgagggcuucaacuggaccggcgugacccagaacggcggcagcagcgccugcaagagaggccccgacaacggcuucuucagcagacugaacuggcuguacaagagcggcagcaccuaccccgugcagaacgugaccaugcccaacaacgacaacagcgacaagcuguacaucuggggcgugcaccaccccagcaccgacaaggagcagaccgaccuguacgugcaggccagcggcaaggugaccgugagcaccaagagaagccagcagaccgugauccccaacgugggcagcagacccugggugagaggccugagcagcagagugagcaucuacuggaccaucgugaagcccggcgacauccuggugaucaacagcaacggcaaccugaucgcccccagaggcuacuucaagaugagaaccggcaagagcagcaucaugagaagcgacgcccccaucggcaccugcagcagcgagugcaucacccccaacggcagcauccccaacgacaagcccuuccagaacgugaacaagaucaccuacggcgccugccccaaguacgugaagcagaacacccugaagcuggccaccggcaugagaaacgugcccgagaagcagaccagaggcaucuucggcgccaucgccggcuucaucgagaacggcugggagggcaugaucgacggcugguacggcuucagacaccagaacagcgagggcaccggccaggccgccgaccugaagagcacccaggccgccaucgaccagaucaacggcaagcugaacagagugaucgagaagaccaacgagaaguuccaccagaucgagaaggaguucagcgagguggagggcagaauccaggaccuggagaaguacguggaggacaccaagaucgaccuguggagcuacaacgccgagcugcugguggcccuggagaaccagcacaccaucgaccugaccgacagcgagaugaacaagcuguucgagaagaccagaagacagcugagagagaacgccgaggacaugggcaacggcugcuucaagaucuaccacaagugcgacaacgccugcaucggcagcaucagaaacggcaccuacgaccacgacguguacagagacgaggcccugaacaacagauuccagaucaagggcguggagcugaagagcggcuacaaggacuggauccuguggaucagcuucgccaucagcugcuuccugcugugcguggugcugcugggcuucaucaugugggccugccagaagggcaacaucagaugcaacaucugcaucuga

SEQ ID NO: 168610 - RNA, 1701 nt, Artificial Sequence
  derived and/or modified CDS sequence (opt4) from hemagglutinin__InfluenzaA__AFG99039
augaagaccaucaucgcccugagcuacaucuucugccugguguucgcccaggaccugcccggcaacgacaacagcaccgccacccugugccugggccaccacgccgugcccaacggcacccuggugaagaccaucaccaacgaccagaucgaggugaccaacgccaccgagcuggugcagagcagcagcaccggcaagaucugcgacaacccccacagaauccuggacggcaucaacugcacccugaucgacgcccugcugggcgacccccacugcgacggcuuccagaacgagaagugggaccuguucguggagagaagcaaggccuucagcaacugcuaccccuacgacgugcccgacuacgccagccugagaagccugguggccagcagcggcacccuggaguucaucaacgagggcuucaacuggaccggcgugacccagaacggcggcagcagcgccugcaagagaggccccgacaacggcuucuucagcagacugaacuggcuguacaagagcggcagcaccuaccccgugcagaacguggccaugcccaacaacgacaacagcgacaagcuguacaucuggggcgugcaccaccccagcaccgacaaggagcagaccgaccuguacgugcaggccagcggcaaggugaccgugagcaccaagagaagccagcagaccgugauccccaacgugggcagcagacccugggugagaggccugagcagcagagugagcaucuacuggaccaucgugaagcccggcgacauccuggugaucaacagcaacggcaaccugaucgcccccagaggcuacuucaagaugagaaccggcaagagcagcaucaugagaagcgacgcccccaucggcaccugcagcagcgagugcaucacccccaacggcagcauccccaacgacaagcccuuccagaacgugaacaagaucaccuacggcgccugccccaaguacgugaagcagaacacccugaagcuggccaccggcaugagaaacgugcccgagaagcagaccagaggcaucuucggcgccaucgccggcuucaucgagaacggcugggagggcaugaucgacggcugguacggcuucagacaccagaacagcgagggcaccggccaggccgccgaccugaagagcacccaggccgccaucgaccagaucaacggcaagcugaacagagugaucgagaagaccaacgagaaguuccaccagaucgagaaggaguucagcgagguggagggcagaauccaggaccuggagaaguacguggaggacaccaagaucgaccuguggagcuacaacgccgagcugcugguggcccuggagaaccagcacaccaucgaccugaccgacagcgagaugaacaagcuguucgagaagaccagaagacagcugagagagaacgccgaggacaugggcaacggcugcuucaagaucuaccacaagugcgacaacgccugcaucggcagcaucagaaacggcaccuacgaccacgacguguacagagacgaggcccugaacaacagauuccagaucaagggcguggagcugaagagcggcuacaaggacuggauccuguggaucagcuucgccaucagcugcuuccugcugugcguggugcugcugggcuucaucaugugggccugccagaagggcaacaucagaugcaacaucugcaucuga

SEQ ID NO: 168611 - RNA, 1701 nt, Artificial Sequence; identical to SEQ ID NO: 160824
  derived and/or modified CDS sequence (opt4) from hemagglutinin__InfluenzaA__AFG99050

SEQ ID NO: 168612 - RNA, 1701 nt, Artificial Sequence
  derived and/or modified CDS sequence (opt4) from hemagglutinin__InfluenzaA__AFG99061
augaagaccaucaucgcccugagcuacaucuucugccugguguucgcccaggaccugcccggcaacgacaacagcaccgccacccugugccugggccaccacgccgugcccaacggcacccuggugaagaccaucaccaacgaccagaucgaggugaccaacgccaccgagcuggugcagagcagcagcaccggcaagaucugcgacaacccccacagaauccuggacggcaucaacugcacccugaucgacgcccugcugggcgacccccacugcgacggcuuccagaacgagaagugggaccuguucguggagagaagcaaggccuucagcaacugcuaccccuacgacgugcccgacuacgccagccugagaagccugguggccagcagcggcacccuggaguucaucaacgagggcuucaacuggaccggcgugacccagaacggcggcagcagcgccugcaagagaggccccgacaacggcuucuucagcagacugaacuggcuguacaagagcggcagcaccuaccccgugcagaacgugaccaugcccaacaacgacaacagcgacaagcuguacaucuggggcgugcaccaccccagcaccgacaaggagcagaccgaccuguacgugcaggccagcggcaaggugaccgugagcaccaagagaagccagcagaccgugauccccaacgugggcagcagacccugggugagaggccugagcagcagagugagcaucuacuggaccaucgugaagcccggcgacauccuggugaucaacagcaacggcaaccugaucgcccccagaggcuacuucaagaugagaaccggcaagagcagcaucaugagaagcgacgcccccaucggcaccugcagcagcgagugcaucacccccaacggcagcauccccaacgacaagcccuuccagaacgugaacaagaucaccuacggcgccugccccaaguacaucaagcagaacacccugaagcuggccaccggcaugagaaacgugcccgagaagcagaccagaggcaucuucggcgccaucgccggcuucaucgagaacggcugggagggcaugaucgacggcugguacggcuucagacaccagaacagcgagggcaccggccaggccgccgaccugaagagcacccaggccgccaucgaccagaucaacggcaagcugaacaaggugaucgagaagaccaacgagaaguuccaccagaucgagaaggaguucagcgagguggagggcagaauccaggaccuggagaaguacguggaggacaccaagaucgaccuguggagcuacaacgccgagcugcugguggcccuggagaaccagcacaccaucgaccugaccgacagcgagaugaacaagcuguucgagaagaccagaagacagcugagagagaacgccgaggacaugggcaacggcugcuucaagaucuaccacaagugcgacaacgccugcaucggcagcaucagaaacggcaccuacgaccacgacguguacagagacgaggcccugaacaacagauuccagaucaagggcguggagcugaagagcggcuacaaggacuggauccuguggaucagcuucgccaucagcugcuuccugcugugcguggugcugcugggcuucaucaugugggccugccagaagggcaacaucagaugcaacaucugcaucuga

SEQ ID NO: 168613 - RNA, 1701 nt, Artificial Sequence
  derived and/or modified CDS sequence (opt4) from hemagglutinin__InfluenzaA__AFG99072
augaagaccaucaucgcccugagcuacaucuucugccugguguucgcccaggaccugcccggcaacgacaacagcaccgccacccugugccugggccaccacgccgugcccaacggcacccuggugaagaccaucaccaacgaccagaucgaggugaccaacgccaccgagcuggugcagagcagcagcaccggcaagaucugcgacaacccccacagaauccuggacggcaagaacugcacccugaucgacgcccugcugggcgacccccacugcgacggcuuccagaacgagaagugggaccuguucguggagagaagcaaggccuucagcaacugcuaccccuacgacgugcccgacuacgccagccugagaagccugguggccagcagcggcacccuggaguucaucaacgagggcuucaacuggaccggcgugacccagaacggcggcagcagcgccugcaagagaggccccgacaacggcuucuucagcagacugaacuggcuguacaagagcggcagcaccuaccccgugcagaacgugaccaugcccaacaacgacaacagcgacagacuguacaucuggggcgugcaccaccccagcaccgacaaggagcagaccgaccuguacgugcaggccagcggcaaggugaccgugagcaccaagagaagccagcagaccgugauccccaacgugggcagcagacccugggugagaggccugagcagcagagugagcaucuacuggaccaucgugaagcccggcgacauccuggugaucaacagcaacggcaaccugaucgcccccagaggcuacuucaagaugagaaccggcaagagcagcaucaugagaagcgacgcccccaucggcaccugcagcagcgagugcaucacccccaacggcagcauccccaacgacaagcccuuccagaacgugaacaagaucaccuacggcgccugccccaaguacgugaagcagaacacccugaagcuggccaccggcaugagaaacgugcccgagaagcagaccagaggcaucuucggcgccaucgccggcuucaucgagaacggcugggagggcaugaucgacggcugguacggcuucagacaccagaacagcgagggcaccggccaggccgccgaccugaagagcacccaggccgccaucgaccagaucaacggcaagcugaacagagugaucgagaagaccaacgagaaguuccaccagaucgagaaggaguucagcgagguggagggcagaauccaggaccuggagaaguacguggaggacaccaagaucgaccuguggagcuacaacgccgagcugcugguggcccuggagaaccagcacaccaucgaccugaccgacagcgagaugaacaagcuguucgagaagaccagaagacagcugagagagaacgccgaggacaugggcaacggcugcuucaagaucuaccacaagugcgacaacgccugcaucggcagcaucagaaacggcaccuacaaccacgacguguacagagacgaggcccugaacaacagauuccagaucaagggcguggagcugaagagcggcuacaaggacuggauccuguggaucagcuucgccaucagcugcuuccugcugugcguggugcugcugggcuucaucaugugggccugccagaagggcaacaucagaugcaacaucugcaucuga

SEQ ID NO: 168614 - RNA, 1701 nt, Artificial Sequence
  derived and/or modified CDS sequence (opt4) from hemagglutinin__InfluenzaA__AFG99083
augaagaccaucaucgcccugagcuacaucuucugccugguguucgcccaggaccugcccggcaacgacaacagcaccgccacccugugccugggccaccacgccgugcccaacggcacccuggugaagaccaucaccaacgaccagaucgaggugaccaacgccaccgagcuggugcagagcagcagcaccggcaagaucugcgacaacccccacagaauccuggacggcaucaacugcacccugaucgacgcccugcugggcgacccccacugcgacggcuuccagaacgagaagugggaccuguucguggagagaagcaaggccuucagcaacugcuaccccuacgacgugcccgacuacgccagccugagaagccugguggccagcagcggcacccuggaguucaucaacgagggcuucaacuggaccggcgugacccagaacggcggcagcagcgccugcaagagaggccccgacaagggcuucuucagcagacugaacuggcuguacaagagcggcagcaccuaccccgugcagaacgugaccaugcccaacaacgacaacagcgacaagcuguacaucuggggcgugcaccaccccagcaccgacaaggagcagaccgaccuguacgugcaggccagcggcaaggugaccgugagcaccaagagaagccagcagaccgugauccccaacgugggcagcagacccugggugagaggccugagcagcagagugagcaucuacuggaccaucgugaagcccggcgacauccuggugaucaacagcaacggcaaccugaucgcccccagaggcuacuucaagaugcugaccggcaagagcagcaucaugagaagcgacgcccccaucggcaccugcagcagcgagugcaucacccccaacggcagcauccccaacgacaagcccuuccagaacgugaacaagaucaccuacggcgccugccccaaguacgugaagcagaacacccugaagcuggccaccggcaugagaaacgugcccgagaagcagaccagaggcaucuucggcgccaucgccggcuucaucgagaacggcugggagggcaugaucgacggcugguacggcuucagacaccagaacagcgagggcaccggccaggccgccgaccugaagagcacccaggccgccaucgaccagaucaacggcaagcugaacagagugaucgagaagaccaacgagaaguuccaccagaucgagaaggaguucagcgagguggagggcagaauccacgaccuggagaaguacguggaggacaccaagaucgaccuguggagcuacaacgccgagcugcugguggcccuggagaaccagcacaccaucgaccugaccgacagcgagaugaacaagcuguucgagaagaccagaagacagcugagagagaacgccgaggacaugggcaacggcugcuucaagaucuaccacaagugcgacaacgccugcaucggcagcaucagaaacggcaccuacgaccacgacguguacagagacgaggcccugaacaacagauuccagaucaagggcguggagcugaagagcggcuacaaggacuggauccuguggaucagcuucgccaucagcugcuuccugcugugcguggugcugcugggcuucaucaugugggccugccagaagggcaacaucagaugcaacaucugcaucuga

SEQ ID NO: 168615 - RNA, 1701 nt, Artificial Sequence
  derived and/or modified CDS sequence (opt4) from hemagglutinin__InfluenzaA__AFG99094
augaagaccaucaucgcccugagcuacaucuucugccugguguucgcccaggaccugcccggcaacgacaacagcaccgccacccugugccugggccaccacgccgugcccaacggcacccuggugaagaccaucaccaacgaccagaucgaggugaccaacgccaccgagcuggugcagagcagcagcaccggcaagaucugcgacaacccccacagaauccuggacggcaucaacugcacccugaucgacgcccugcugggcgacccccacugcgacggcuuccagaacgagaagugggaccuguucguggagagaagcaaggccuucagcaacugcuaccccuacgacgugcccgacuacgccagccugagaagccugguggccagcagcggcacccuggaguucaucaacgagggcuucaacuggaccggcgugacccagaacggcggcagcggcgccugcaagagaggccccgacaacggcuucuucagcagacugaacuggcuguacaagagcggcagcaccuaccccgugcagaacgugaccaugcccaacaacgacaacagcgacaagcuguacaucuggggcgugcaccaccccagcaccgacaaggagcagaccgaccuguacgugcaggccagcggcaaggugaccgugagcaccaagagaagccagcagaccgugauccccaacgugggcagcagacccugggugagaggccugagcagcagagugagcaucuacuggaccaucgugaagcccggcgacauccuggugaucaacagcaacggcaaccugaucgcccccagaggcuacuucaagaugagaaccggcaagagcagcaucaugagaagcgacgcccccaucggcaccugcagcagcgagugcaucacccccaacggcagcauccccaacgacaagcccuuccagaacgugaacaagaucaccuacggcgccugccccaaguacgugaagcagaacacccugaagcuggccaccggcaugagaaacgugcccgagaagcagaccagaggcaucuucggcgccaucgccggcuucaucgagaacggcugggagggcaugaucgacggcugguacggcuucagacaccagaacagcgagggcaccggccaggccgccgaccugaagagcacccaggccgccaucgaccagaucaacggcaagcugaacagagugaucgagaagaccaacgagaaguuccaccagaucgagaaggaguucagcgagguggagggcagaauccaggaccuggagaaguacguggaggacaccaagaucgaccuguggagcuacaacgccgagcugcugguggcccuggagaaccagcacaccaucgaccugaccgacagcgagaugaacaagcuguucgagaagaccagaagacagcugagagagaacgccgaggacaugggcaacggcugcuucaagaucuaccacaagugcgacaacgccugcaucggcagcaucagaaacggcaccuacgaccacgacguguacagagacgaggcccugaacaacagauuccagaucaagggcguggagcugaagagcggcuacaaggacuggauccuguggaucagcuucgccaucagcugcuuccugcugugcguggugcugcugggcuucaucaugugggccugccagaagggcaacaucagaugcaacaucugcaucuga

SEQ ID NO: 168616 - RNA, 1701 nt, Artificial Sequence
  derived and/or modified CDS sequence (opt4) from hemagglutinin__InfluenzaA__AFG99116
augaagaccaucaucgcccugagcuacaucuucugccugguguucgcccagaaccugcccggcaacgacaacagcaccgccacccugugccugggccaccacgccgugcccaacggcacccuggugaagaccaucaccaacgaccagaucgaggugaccaacgccaccgagcuggugcagagcagcagcaccggcagaaucugcgacagcccccacagaauccuggacggcaagaacugcacccugguggacgcccugcugggcgacccccacugcgacggcuuccagaacgagaagugggaccuguucguggagagaagcaaggccuucagcaacugcuaccccuacgacgugcccgacuacgccagccugagaagccugguggccagcagcggcacccuggaguucaucaacgagagcuucaacuggaccggcgugacccagagcggcggcagcuacgccugcaagagaggcagcgacaacagcuucuucagcagacugaacuggcuguacgagagcgagagcaaguaccccgugcugaacgugaccaugcccaacaacggcaacuucgacaagcuguacaucuggggcgugcaccaccccagcaccgacaaggagcagaccaaccuguacgugagagccagcggcagagugaccgugagcaccaagagaagccagcagaccaucauccccaacaucggcagcagacccugggugagaggccugagcagcagaaucagcaucuacuggaccaucgugaagcccggcgacauccugcugaucaacagcaacggcaaccugaucgcccccagaggcuacuucaagaucagaaccggcaagagcagcaucaugagaagcgacgcccccaucggcaccugcagcagcgagugcaucacccccaacggcagcauccccaacgacaagcccuuccagaacgugaacaagaucaccuacggcgccugccccaaguacgugaagcagaacacccugaagcuggccaccggcaugagaaacgugcccgagaagcagaccagaggcaucuucggcgccaucgccggcuucaucgagaacggcugggagggcaugguggacggcugguacggcuucagacaccagaacagcgagggcaccggccaggccgccgaccugaagagcacccaggccgccaucgaccagaucaacggcaagcugaacagagugaucgagaagaccaacgagaaguuccaccagaucgagaaggaguucagcgagguggagggcagaauccaggaccuggagaaguacguggaggacaccaagaucgaccuguggagcuacaacgccgagcugcugguggcccuggagaaccagcacaccaucgaccugaccgacagcgagaugaacaagcuguucgagaagaccagaagacagcugagagagaacgccgaggacaugggcaacggcugcuucaagaucuaccacaagugcgacaacgccugcaucggcagcaucagaaacggcaccuacgaccacgacguguacagagacgaggcccugaacaacagauuccagaucaagggcguggagcugaagagcggcuacaaggacuggauccuguggaucagcuucgccaucagcugcuuccugcugugcguggugcugcugggcuucaucaugugggccugccagaagggcaacaucagaugcaacaucugcaucuga

SEQ ID NO: 168617 - RNA, 1701 nt, Artificial Sequence
  derived and/or modified CDS sequence (opt4) from hemagglutinin__InfluenzaA__AFG99127
augaagaccaucaucgcccugagcuacauccugugccugguguucgcccagaaccugcccggcaacgacaacagcaccgccacccugugccugggccaccacgccgugcccaacggcacccuggugaagaccaucaccaacgaccagaucgaggugaccaacgccaccgagcuggugcagagcagcagcaccggcagaaucugcgacagcccccacagaauccuggacggcaagaacugcacccugguggacgcccugcugggcgacccccacugcgacggcuuccagaacgagaagugggaccuguucguggagagaagcaaggccuucagcaacugcuaccccuacgacgugcccgacuacgccagccugagaagccugguggccagcagcggcacccuggaguucaucaacgagagcuucaacuggaccggcgugacccagagcggcggcagcuacgccugcaagagaggcagcgacaacagcuucuucagcagacugaacuggcuguacgagagcgagagcaaguaccccgugcugaacgugaccaugcccaacaacggcaacuucgacaagcuguacaucuggggcgugcaccaccccagcaccgacaaggagcagaccaaccuguacgugagagccagcggcagagugaccgugagcaccaagagaagccagcagaccaucauccccaacaucggcagcagacccugggugagaggccugagcagcagaaucagcaucuacuggaccaucgugaagcccggcgacauccugcugaucaacagcaacggcaaccugaucgcccccagaggcuacuucaagaucagaaccggcaagagcagcaucaugagaagcgacgcccccaucggcaccugcagcagcgagugcaucacccccaacggcagcauccccaacgacaagcccuuccagaacgugaacaagaucaccuacggcgccugccccaaguacgugaagcagaacacccugaagcuggccaccggcaugagaaacgugcccgagaagcagaccagaggcaucuucggcgccaucgccggcuucaucgagaacggcugggagggcaugguggacggcugguacggcuucagacaccagaacagcgagggcaccggccaggccgccgaccugaagagcacccaggccgccaucgaccagaucaacggcaagcugaacagagugaucgagaagaccaacgagaaguuccaccagaucgagaaggaguucagcgagguggagggcagaauccaggaccuggagaaguacguggaggacaccaagaucgaccuguggagcuacaacgccgagcugcugguggcccuggagaaccagcacaccaucgaccugaccgacagcgagaugaacaagcuguucgagaagaccagaagacagcugagagagaacgccgaggacaugggcaacggcugcuucaagaucuaccacaagugcgacaacgccugcaucggcagcaucagaaacggcaccuacgaccacgacguguacagagacgaggcccugaacaacagauuccagaucaagggcguggagcugaagagcggcuacaaggacuggauccuguggaucagcuucgccaucagcugcuuccugcugugcguggugcugcugggcuucaucaugugggccugccagaagggcaacaucagaugcaacaucugcaucuga

SEQ ID NO: 168618 - RNA, 1701 nt, Artificial Sequence
  derived and/or modified CDS sequence (opt4) from hemagglutinin__InfluenzaA__AFG99138
augaagaccaucaucgcccugagcuacaucuucugccugguguucgcccagaaccugcccggcaacgacaacagcaccgccacccugugccugggccaccacgccgugcccaacggcacccuggugaagaccaucaccaacgaccagaucgaggugaccaacgccaccgagcuggugcagagcagcagcaccggcagaaucugcgacagcccccacagaauccuggacggcaagaacugcacccugguggacgcccugcugggcgacccccacugcgacggcuuccagaacgagaagugggaccuguucguggagagaagcaaggccuucagcaacugcuaccccuacgacgugcccgacuacgccagccugagaagccugguggccagcagcggcacccuggaguucaucaacgagagcuucaacuggaccggcgugacccagagcggcggcagcagcgccugcaagagaggcagcgacaacagcuucuucagcagacugaacuggcuguacgagagcgagagcaaguaccccgugcugaacgugaccaugcccaacaacggcaacuucgacaagcuguacaucuggggcgugcaccaccccagcaccgacaaggagcagaccaaccuguacgugagagccagcggcagagugaccgugagcaccaagagaaaccagcagaccgugauccccaacaucggcagcagacccugggugagaggccugagcagcagaaucagcaucuacuggaccaucgugaagcccggcgacauccugcugaucaacagcaacggcaaccugaucgcccccagaggcuacuucaagaucagaaacggcaagagcagcaucaugagaagcgacgcccccaucggcaccugcagcagcgagugcaucacccccaacggcagcauccccaacgacaagcccuuccagaacgugaacaagaucaccuacggcgccugccccaaguacgugaagcagaacacccugaagcuggccaccggcaugagaaacgugcccgagaagcagaccagaggcaucuucggcgccaucgccggcuucaucgagaacggcugggagggcaugguggacggcugguacggcuucagacacagaaacagcgagggcaccggccaggccgccgaccugaagagcacccaggccgccaucgaccagaucaacggcaagcugaacagagugaucgagaagaccaacgagaaguuccaccagaucgagaaggaguucagcgagguggagggcagaauccaggaccuggagaaguacguggaggacaccaagaucgaccuguggagcuacaacgccgagcugcugguggcccuggagaaccagcacaccaucgaccugaccgacagcgagaugaacaagcuguucgagaagaccagaagacagcugagagagaacgccgaggacaugggcaacggcugcuucaagaucuaccacaagugcgacaacgccugcaucggcagcaucagaaacggcaccuacgaccacgacguguacagagacgaggcccugaacaacagauuccagaucaagggcguggagcugaagagcggcuacaaggacuggauccuguggaucagcuucgccaucagcugcuuccugcugugcguggugcugcugggcuucaucaugugggccugccagaagggcaacaucagaugcaacaucugcaucuga

SEQ ID NO: 168619 - RNA, 1701 nt, Artificial Sequence
  derived and/or modified CDS sequence (opt4) from hemagglutinin__InfluenzaA__AFG99149
augaagaccaucaucgcccugagcuacauccugugccugguguucgcccagaaccugcccggcaacgacaacagcaccgccacccugugccugggccaccacgccgugcccaacggcacccuggugaagaccaucaccaacgaccagaucgaggugaccaacgccaccgagcuggugcagagcagcagcaccggcagaaucugcgacagcccccacagaauccuggacggcaagaacugcacccugaucgacgcccugcugggcgacccccacugcgacggcuuccagaacgagaagugggaccuguucguggagagaagcagagccuucagcaacugcuaccccuacgacgugcccgacuacgccagccugagaagccugguggccagcagcggcacccuggaguucaucaacgagggcuucaacuggaccggcgugacccagagcggcggcagcuacgccugcaagagaggcagcgacaacagcuucuucagcagacugaacuggcuguacgagagcgagagcaaguaccccgugcugaacgugaccaugcccaacaacggcaaguucgacaagcuguacaucuggggcgugcaccaccccagcaccgacaaggagcagaccaaccuguacgugagagccagcggcagagugaccgugagcaccaagagaagccagcagaccgugauccccaacaucggcagcagacccugggugagaggccugagcagcagaaucagcaucuacuggaccaucgugaagcccggcgacauccugcugaucaacagcaccggcaaccugaucgcccccagaggcuacuucaagaucagaaccggcaagagcagcaucaugagaagcgacgcccccaucggcaccugcagcagcgagugcaucacccccaacggcagcauccccaacgacaagcccuuccagaacgugaacaagaucaccuacggcgccugccccagauacgugaagcagaacacccugaagcuggccaccggcaugagaaacgugcccgagaagcagaccagaggcaucuucggcgccaucgccggcuucaucgagaacggcugggagggcaugguggacggcugguacggcuucagacaccagaacagcgagggcaccggccaggccgccgaccugaagagcacccaggccgccaucgaccagaucaacggcaagcugaacagagugaucgagaagaccaacgagaaguuccaccagaucgagaaggaguucagcgagguggagggcagaauccaggaccuggagaaguacguggaggacaccaagaucgaccuguggagcuacaacgccgagcugcugguggcccuggagaaccagcacaccaucgaccugaccgacgccgagaugaacaagcuguucgagaagaccagaaagcagcugagagagaacgccgaggacaugggcaacggcugcuucaagaucuaccacaagugcgacaacgccugcaucggcagcaucagaaacggcaccuacgaccacgacguguacagagacgaggcccugaacaacagauuccagaucaagggcguggagcugaagagcggcuacaaggacuggauccuguggaucagcuucgccaucagcugcuuccugcugugcguggugcugcugggcuucaucaugugggccugccagaagggcaacaucagaugcaacaucugcaucuga

SEQ ID NO: 168620 - RNA, 1701 nt, Artificial Sequence
  derived and/or modified CDS sequence (opt4) from hemagglutinin__InfluenzaA__AFG99171
augaagaccaucaucgcccugagcuacaucuucugccugguguucgcccagaaccugcccggcaacgacaacagcaccgccacccugugccugggccaccacgccgugcccaacggcacccuggugaagaccaucaccaacgaccagaucgaggugaccaacgccaccgagcuggugcagagcagcagcaccggcagaaucugcgacagcccccacagaauccuggacggcaagaacugcacccugguggacgcccugcugggcgacccccacugcgacggcuuccagaacgagaagugggaccuguucguggagagaagcaaggccuucagcaacugcuaccccuacgacgugcccgacuacgccagccugagaagccugguggccagcagcggcacccuggaguucaccaacgagagcuucaacuggaccggcgugacccagagcggcggcagcuacgccugcaagagaggcagcgacaacagcuucuucagcagacugaacuggcuguacgagagcgagagcaaguaccccgugcugaacgugaccaugcccaacaacggcaacuucgacaagcuguacaucuggggcgugcaccaccccagcaccgacaaggagcagaccaaccuguacgugagagccagcggcagagugaccgugagcaccaagagaaaccagcagaccgugauccccaacaucggcagcagacccugggugagaggccugagcagcagaaucagcaucuacuggaccaucgugaagcccggcgacauccugcugaucaacagcaacggcaaccugaucgcccccagaggcuacuucaagaucagaaacggcaagagcagcaucaugagaagcgacgcccccaucggcaccugcagcagcgagugcaucacccccaacggcagcauccccaacgacaagcccuuccagaacgugaacaagaucaccuacggcgccugccccaaguacgugaagcagaacacccugaagcuggccaccggcaugagaaacgugcccgagaagcagaccagaggcaucuucggcgccaucgccggcuucaucgagaacggcugggagggcaugguggacggcugguacggcuucagacacagaaacagcgagggcaccggccaggccgccgaccugaagagcacccaggccgccaucgaccagaucaacggcaagcugaacagagugaucgagaagaccaacgagaaguuccaccagaucgagaaggaguucagcgagguggagggcagaauccaggaccuggagaaguacguggaggacaccaagaucgaccuguggagcuacaacgccgagcugcugguggcccuggagaaccagcacaccaucgaccugaccgacagcgagaugaacaagcuguucgagaagaccagaagacagcugagagagaacgccgaggacaugggcaacggcugcuucaagaucuaccacaagugcgacaacgccugcaucggcagcaucagaaacggcaccuacgaccacgacguguacagagacgaggcccugaacaacagauuccagaucaagggcguggagcugaagagcggcuacaaggacuggauccuguggaucagcuucgccaucagcugcuuccugcugugcguggugcugcugggcuucaucaugugggccugccagaagggcaacaucagaugcaacaucugcaucuga

SEQ ID NO: 168621 - RNA, 1701 nt, Artificial Sequence
  derived and/or modified CDS sequence (opt4) from hemagglutinin__InfluenzaA__AFG99182
augaagaccaucaucgcccugagcuacaucuucugccugguguucgcccagaagcugcccggcaacgacaacagcaccgccacccugugccugggccaccacgccgugcccaacggcacccuggugaagaccaucaccaacgaccagaucgaggugaccaacgccaccgagcuggugcagagcagcagcaccggcagaaucugcgacagcccccacagaauccuggacggcaagaacugcacccugaucgacgcccugcugggcgacccccacugcgacggcuuccagaacgagaagugggaccuguucguggagagaagcaaggccuucagcaacugcuaccccuacgacgugcccgacuacgccagccugagaagccugguggccagcagcggcacccuggaguucaucaacgagggcuucaacuggaccggcgugacccagagcggcggcagcuacgccugcaagagaggcagcgugaacagcuucuucagcagacugaacuggcuguacgagagcgaguacaaguaccccgcccugaacgugaccaugcccaacaacggcaaguucgacaagcuguacaucuggggcgugcaccaccccagcaccgacaaggagcagaccaaccuguacgugagagccagcggcagagugaccgugagcaccaagagaagccagcagaccgugauccccaacaucggcagcagacccugggugagaggccugagcagcagaaucagcaucuacuggaccaucgugaagcccggcgacauccugcugaucaacagcaccggcaaccugaucgcccccagaggcuacuucaagaucagaaccggcaagagcagcaucaugagaagcgacgcccccaucggcaccugcagcagcgagugcaucacccccaacggcagcauccccaacgacaagcccuuccagaacgugaacaagaucaccuacggcgccugccccagauacgugaagcagaacacccugaagcuggccaccggcaugagaaacgugcccgagaagcagaccagaggcaucuucggcgccaucgccggcuucaucgagaacggcugggagggcaugguggacggcugguacggcuucagacaccagaacagcgagggcaccggccaggccgccgaccugaagagcacccaggccgccaucgaccagaucaacggcaagcugaacagacugaucgagaagaccaacgagaaguuccaccagaucgagaaggaguucagcgagguggagggcagaauccaggaccuggagaaguacguggaggacaccaagaucgaccuguggagcuacaacgccgagcugcugguggcccuggagaaccagcacaccaucgaccugaccgacagcgagaugaacaagcuguucgagaagaccagaaagcagcugagagagaacgccgaggacaugggcaacggcugcuucaagaucuaccacaagugcgacaacgccugcaucggcagcaucagaaacggcaccuacgaccacgacguguacagagacgaggcccugaacaacagauuccagaucaagggcguggagcugaagagcggcuacaaggacuggauccuguggaucagcuucgccaucagcugcuuccugcugugcguggugcugcugggcuucaucaugugggccugccagaagggcaacaucagaugcaacaucugcaucuga

SEQ ID NO: 168622 - RNA, 1701 nt, Artificial Sequence
  derived and/or modified CDS sequence (opt4) from hemagglutinin__InfluenzaA__AFG99193
augaagaccaucaucgcccugagcuacaucagcugccugguguucgcccagaagcugcccggcaacgacaacagcaccgccacccugugccugggccaccacgccgugcccaacggcacccuggugaagaccaucaccaacgaccagaucgaggugaccaacgccaccgagcuggugcagagcagcagcaccggcagaaucugcgacagcccccacagaauccuggacggcaagaacugcacccugaucgacgcccugcugggcgacccccacugcgacggcuuccagaacgagaagugggaccuguucguggagagaagcaaggccuucagcaacugcuaccccuacgacgugcccgacuacgccagccugagaagccugguggccagcagcggcacccuggaguucaucaacgagggcuucaacuggaccggcgugacccagagcggcggcagcuacgccugcaagagaggcagcgugaacagcuucuucagcagacugaacuggcuguacgagagcgagagcaaguaccccgcccugaacgugaccaugcccaacaacggcaaguucgagaagcuguacaucuggggcgugcaccaccccagcaccgacaaggagcagaccaaccuguacgugagagccagcggcagagugaccgugagcaccaagagaagccagcagaccgugauccccaacaucggccccagacccugggugagaggccugagcagcagaaucagcaucuacuggaccaucgugaagcccggcgacauccugcugaucaacagcaccggcaaccugaucgcccccagaggcuacuucaagaucagaaccggcaagagcagcaucaugagaagcgacgcccccaucggcaccugcagcagcgagugcaucacccccaacggcagcauccccaacgacaagcccuuccagaacgugaacaagaucaccuacggcgccugccccagauacgugaagcagaacacccugaagcuggccaccggcaugagaaacgugcccgagaagcagaccagaggcaucuucggcgccaucgccggcuucaucgagaacggcugggagggcaugguggacggcugguacggcuucagacaccagaacagcgagggcaccggccaggccgccgaccugaagagcacccaggccgccaucgaccagaucaacggcaagcugaacagacugaucgagaagaccaacgagaaguuccaccagaucgagaaggaguucagcgagguggagggcagaauccaggaccuggagaaguacguggaggacaccaagaucgaccuguggagcuacaacgccgagcugcugguggcccuggagaaccagcacaccaucgacaugaccgacagcgagaugaacaagcuguucgagaagaccagaaagcagcugagagagaacgccgaggacaugggcaacggcugcuucaagaucuaccacaagugcgacaacgccugcaucggcagcaucagaaacggcaccuacgaccacgacguguacagagacgaggcccugaacaacagauuccagaucaagggcguggagcugaagagcggcuacaaggacuggauccuguggaucagcuucgccaucagcugcuuccugcugugcguggugcugcugggcuucaucaugugggccugccagaagggcaacaucagaugcaacaucugcaucuga

SEQ ID NO: 168623 - RNA, 1701 nt, Artificial Sequence
  derived and/or modified CDS sequence (opt4) from hemagglutinin__InfluenzaA__AFG99204
augaagaccaucaucgcccugagcuacaucuucugccugggcuucgcccagaagcugcccggcaacgacaacagcaccgccacccugugccugggccaccacgccgugcccaacggcacccuggugaagaccaucaccaacgaccagaucgaggugaccaacgccaccgagcuggugcagagcagcagcaccggcagaaucugcgacagcccccacagaauccuggacggcaagaacugcacccugaucgacgcccugcugggcgacccccacugcgacggcuuccagaacgagaagugggaccuguucguggagagaagcaaggccuucagcaacugcuaccccuacgacgugcccgacuacgccagccugagaagccugguggccagcagcggcacccuggaguucaucaacgagggcuucaacuggaccggcgugacccagagcggcggcagcuacgccugcaagagaggcagcgugaacagcuucuucagcagacugaacuggcuguacaagagcgagagcaaguaccccgcccugaacgugaccaugcccaacaacggcaaguucgacaagcuguacaucuggggcgugcaccaccccagcaccgacaaggagcagaccaaccuguacgugagagccagcggcagagugaccgugagcaccaagagaagccagcagaccgugauccccaacaucggcagcagacccugggugagaggccugagcagcagaaucagcaucuacuggaccaucgugaagcccggcgacauccugcugaucaacagcaccggcaaccugaucgcccccagaggcuacuucaagaucagaaccggcaagagcagcaucaucagaagcgacgcccccaucggcaccugcagcagcgagugcaucacccccaacggcagcauccccaacgacaagcccuuccagaacgugaacaagaucaccuacggcgccugccccagauacgugaagcagaacacccugaagcuggccaccggcaugagaaacgugcccgagaagcagaccagaggcaucuucggcgccaucgccggcuucaucgagaacggcugggagggcaugguggacggcugguacggcuucagacaccagaacagcgagggcaccggccaggccgccgaccugaagagcacccaggccgccaucgaccagaucaacggcaagcugaacagacugaucgagaagaccaacgagaaguuccaccagaucgagaaggaguucagcgagguggagggcagaauccaggaccuggagaaguacguggaggacaccaagaucgaccuguggagcuacaacgccgagcugcugguggcccuggagaaccagcacaccaucgaccugaccgacagcgagaugaacaagcuguucgagaagaccagaaagcagcugagagagaacgccgaggacaugggcaacggcugcuucaagaucuaccacaagugcgacaacgccugcaucggcagcaucagaaacggcaccuacgaccacgacguguacagagacgaggcccugaacaacagauuccagaucaagggcguggagcugaagagcggcuacaaggacuggauccuguggaucagcuucgccaucagcugcuuccugcugugcguggugcugcugggcuucaucaugugggccugccagaagggcaacaucagaugcaacaucugcaucuga

SEQ ID NO: 168624 - RNA, 1701 nt, Artificial Sequence
  derived and/or modified CDS sequence (opt4) from hemagglutinin__InfluenzaA__AFG99215
augaagaccaucaucgcccugagcuacaucuucugccugguguucgcccagaagcugcccggcaacgacaacagcaccgccacccugugccugggccaccacgccgugcccaacggcacccuggugaagaccaucaccaacgaccagaucgaggugaccaacgccaccgagcuggugcagagcagcagcaccggcagaaucugcgacagcccccacagaauccuggacggcaagaacugcacccugaucgacgcccugcugggcgacccccacugcgacggcuuccagaacgagaagugggaccuguucaucgagagaagcaaggccuucagcaacugcuaccccuacgacgugcccgacuacgccagccugagaagccugguggccagcagcggcacccuggaguucaucaacgagggcuucaacuggaccggcgugacccagagcggcggcagcuacgccugcaagagaggcagcgugaacagcuucuucagcagacugaacuggcuguacgagagcgaguacaaguaccccgcccugaacgugaccaugcccaacaacggcaaguucgacaagcuguacaucuggggcgugcaccaccccagcaccgagaaggagcagaccaaccuguacgugagagccagcggcagagugaccgugagcaccaagagaagccagcagaccgugacccccaacaucggcagcagacccugggugagaggccugagcagcagaaucagcaucuacuggaccaucgugaagcccggcgacauccugcugaucaacagcaccggcaaccugaucgcccccagaggcuacuucaagaucagaaccggcaagagcagcaucaugagaagcgacgcccccaucggcaccugcagcagcgagugcaucacccccaacggcagcauccccaacgacaagcccuuccagaacgugaacaagaucaccuacggcgccugccccagauacgugaagcagaacacccugaagcuggccaccggcaugagaaacgugcccgagaagcagaccagaggcaucuucggcgccaucgccggcuucaucgagaacggcugggagggcaugguggacggcugguacggcuucagacaccagaacagcgagggcaccggccaggccgccgaccugaagagcacccaggccgccaucgaccagaucaacggcaagcugaacagacugaucgagaagaccaacgagaaguuccaccagaucgagaaggaguucagcgagguggagggcagaauccaggaccuggagaaguacguggaggacaccaagaucgaccuguggagcuacaacgccgagcugcugguggcccuggagaaccagcacaccaucgaccugaccgacagcgagaugaacaagcuguucgagaagaccagaaagcagcugagagagaacgccgaggacaugggcaacggcugcuucaagaucuaccacaagugcgacaacgccugcaucggcagcaucagaaacggcaccuacgaccacgacguguacagagacgaggcccugaacaacagauuccagaucaagggcguggagcugaagagcggcuacaaggacuggauccuguggaucagcuucgccaucagcugcuuccugcugugcguggugcugcugggcuucaucaugugggccugccagaagggcaacaucagaugcaacaucugcaucuga

SEQ ID NO: 168625 - RNA, 1701 nt, Artificial Sequence
  derived and/or modified CDS sequence (opt4) from hemagglutinin__InfluenzaA__AFG99226
augaagaccaucaucgcccugagcuacaucuucugccugguguucgcccagaagcugcccggcaacgacaacagcaccgccacccugugccugggccaccacgccgugcccaacggcacccuggugaagaccaucaccaacgaccagaucgaggugaccaacgccaccgagcuggugcagagcagcagcaccggcagaaucugcgacagcccccacagaauccuggacggcaagaacugcacccugaucgacgcccugcugggcgacccccacugcgacggcuuccagaacgagaagugggaccuguucguggagagaagcaaggccuucagcaacugcuaccccuacgacgugcccgacuacgccagccugagaagccugguggccagcagcggcacccuggaguucaucaacgagggcuucaacuggaccggcgugacccagagcggcggcagcuacgccugcaagagaggcagcgugaacagcuucuucagcagacugaacuggcuguacgagagcgaguacaaguaccccgcccugaacgugaccaugcccaacaacggcaaguucgacaagcuguacaucuggggcgugcaccaccccagcaccgacaaggagcagaccaaccuguacgugagagccagcggcagagugaccgugagcaccaagagaagccagcagaccgugauccccaacaucggcagcagacccugggugagaggccugagcagcagaaucagcaucuacuggaccaucgugaagcccggcgacauccugagcaucaacagcaccggcaaccugaucgcccccagaggcuacuucaagaucagaaccggcaagagcagcaucaugagaagcgacgcccccaucggcaccugcagcagcgagugcaucacccccaacggcagcauccccaacgacaagcccuuccagaacgugaacaagaucaccuacggcgccugccccagauacgugaagcagaacacccugaagcuggccaccggcaugagaaacgugcccgagaagcagaccagaggcaucuucggcgccaucgccggcuucaucgagaacggcugggagggcaugguggacggcugguacggcuucagacaccagaacagcgagggcaccggccaggccgccgaccugaagagcacccaggccgccaucgaccagaucaacggcaagcugaacagacugaucgagaagaccaacgagaaguuccaccagaucgagaaggaguucagcgagguggagggcagaauccaggaccuggagaaguacguggaggacaccaagaucgaccuguggagcuacaacgccgagcugcugguggcccuggagaaccagcacaccaucgaccugaccgacagcgagaugaacaagcuguucgagaagaccagaaagcagcugagagagaacgccgaggacaugggcaacggcugcuucaagaucuaccacaagugcgacaacgccugcaucggcagcaucagaaacggcaccuacgaccacgacguguacagagacgaggcccugaacaacagauuccagaucaagggcguggagcugaagagcggcuacaaggacuggauccuguggaucagcuucgccaucagcugcuuccugcugugcguggugcugcugggcuucaucaugugggccugccagaagggcaacaucagaugcaacaucugcaucuga

SEQ ID NO: 168626 - RNA, 1701 nt, Artificial Sequence
  derived and/or modified CDS sequence (opt4) from hemagglutinin__InfluenzaA__AFG99237
augaagaccaucaucgcccugagcuacaucuucugccugguguucgcccagaagcugcccggcaacgacaacagcaccgccacccugugccugggccaccacgccgugcccaacggcacccuggugaagaccaucaccaacgaccagaucgaggugaccaacgccaccgagcuggugcagagcagcagcaccggcagaaucugcgacagcccccacagaauccuggacggcaagaacugcacccugaucgacgcccugcugggcgacccccacugcgacggcuuccagaacgagaagugggaccuguucguggagagaagcaaggccuucagcaacugcuaccccuacgacgugcccgacuacgccagccugagaagccugguggccagcagcggcacccuggaguucaucaacgaggacuucaacuggaccggcgugacccagagcggcggcagcuacgccugcaagagagagagcgugaacagcuucuucagcagacugaacuggcuguacgagagcgaguacaaguaccccgcccugaacgugaccaugcccaacaacggcaaguucgagaagcuguacaucuggggcgugcaccaccccagcaccgacaaggagcagaccaaccuguacgugagagccagcggcagagugaccgugagcaccaagagaagccagcagaccgugauccccaacaucggcagcagacccugggugagaggccugagcagcagaaucagcaucuacuggaccaucgugaagcccggcgacauccugcugaucaacagcaccggcaaccugaucgcccccagaggcuacuucaagaucagaaccggcaagagcagcaucaugagaagcgacgcccccaucggcaccugcagcagcgagugcaucacccccaacggcagcauccccaacgacaagcccuuccagaacgugaacaagaucaccuacggcgccugccccagauacgugagacagaacacccugaagcuggccaccggcaugagaaacgugcccgagaagcagaccagaggcaucuucggcgccaucgccggcuucaucgagaacggcugggagggcaugguggacggcugguacggcuucagacaccagaacagcgagggcaccggccaggccgccgaccugaagagcacccaggccgccaucgaccagaucaacggcaagcugaacagacugaucgagaagaccaacgagaaguuccaccagaucgagaaggaguucagcgagguggagggcagaauccaggaccuggagaaguacguggaggacaccaagaucgaccuguggagcuacaacgccgagcugcugguggcccuggagaaccagcacaccaucgaccugaccgacagcgagaugaacaagcuguucgagaagaccagaaagcagcugagagagaacgccgaggacaugggcaacggcugcuucaagaucuaccacaagugcgacaacgccugcaucggcagcaucagaaacggcaccuacgaccacgacguguacagagacgaggcccugaacaacagauuccagaucaagggcguggagcugaagagcggcuacaaggacuggauccuguggaucagcuucgccaucagcugcuuccugcugugcguggugcugcugggcuucaucaugugggccugccagaagggcaacaucagaugcaacaucugcaucuga

SEQ ID NO: 168627 - RNA, 1701 nt, Artificial Sequence
  derived and/or modified CDS sequence (opt4) from hemagglutinin__InfluenzaA__AFG99248
augaagaccaucaucgcccugagcuacaucuucugccugguguucgcccagaagcugcccggcaacgacaacagcaccgccacccugugccugggccaccacgccgugcccaacggcacccuggugaagaccaucaccaacgaccagaucgaggugaccaacgccaccgagcuggugcagagcagcagcaccggcagaaucugcgacagcccccacagaauccuggacggcaagaacugcacccugaucgacgcccugcugggcgacccccacugcgacggcuuccagaacgagaagugggaccuguucguggagagaagcaaggccuacagcaacugcuaccccuacgacgugcccgacuacgccagccugagaagccugguggccagcagcggcacccuggaguucaucaacgaggacuucaacuggaccggcgugacccagagcggcggcagccacgccugcaagagaggcagcgugaacagcuucuucagcagacugaacuggcugcacgagagcgaguacaaguaccccgcccugaacgugaccaugcccaacaacggcaaguucgacaagcuguacaucuggggcgugcaccaccccaucaccgacagagagcagaccaaccuguacgugagagccagcggcagagugaccgugagcaccaagagaagccagcagaccgugauccccaacaucggcuucagacccugggugagaggccugagcagcagaaucagcaucuacuggaccaucgugaagcccggcgacauccugcugaucaacagcaccggcaaccugaucgcccccagaggcuacuucaagaucagaaacggcaagagcagcaucaugagaagcgacgcccccaucggcaccugcagcagcgagugcaucacccccaacggcagcauccccaacgacaagcccuuccagaacgugaacaagaucaccuacggcgccugccccagauacgugaagcagaacacccugaagcuggccaccggcaugagaaacgugcccgagaagcagaccagaggcaucuucggcgccaucgccggcuucaucgagaacggcugggagggcaugguggacggcugguacggcuucagacaccagaacagcgagggcaccggccaggccgccgaccugaagagcacccaggccgccaucgaccagaucaacggcaagcugaacagacugaucgagaagaccaacgagaaguuccaccagaucgagaaggaguucagcgagguggagggcagaauccaggaccuggagaaguacguggaggacaccaagaucgaccuguggagcuacaacgccgagcugcugguggcccuggagaaccagcacaccaucgaccugaccgacagcgagaugaacaagcuguucgagaagaccagaaagcagcugagagagaacgccgaggacaugggcaacggcugcuucaagaucuaccacaagugcgacaacgccugcaucggcagcaucagaaacggcaccuacgaccacgacguguacagagacgaggcccugaacaacagauuccagaucaagggcguggagcugaagagcggcuacaaggacuggauccuguggaucagcuucgccaucagcugcuuccugcugugcguggugcugcugggcuucaucaugugggccugccagaagggcaacaucagaugcaacaucugcaucuga

SEQ ID NO: 168628 - RNA, 1701 nt, Artificial Sequence
  derived and/or modified CDS sequence (opt4) from hemagglutinin__InfluenzaA__AFG99259
augaagaccaucaucgcccugagcuacaucuucugccugguguucgcccagaagcugcccggcaacgacaacagcaccgccacccugugccugggccaccacgccgugcccaacggcacccuggugaagaccaucaccaacgaccagguggaggugaccaacgccaccgagcuggugcagagcagcagcaccggcagaaucugcgacagcccccacagaauccuggacggcaagaacugcacccugaucgacgcccugcugggcgacccccacugcgacggcuuccagaacgagaagugggaccuguucguggagagaagcaaggccuacagcaacugcuaccccuacgacgugcccgacuacgccagccugagaagccugguggccagcagcggcacccuggaguucaucaacgaggacuucaacuggaccggcgugacccagagcggcggcagcuacgccugcaagagaggcagcgugaacagcuucuucagcagacugaacuggcugcacaagagcgaguacaaguaccccgcccugaacgugaccaugcccaacaacggcaaguucgacaagcuguacaucuggggcgugcaccaccccagcaccgacagagagcagaccaaccuguacgugagagccagcggcagagugaccgugagcaccaagagaagccagcagaccgugauccccaacaucggcagcagacccugggugagaggccugagcagcagaaucagcaucuacuggaccaucgugaagcccggcgacauccugcugaucaacagcaccggcaaccugaucgcccccagaggcuacuucaagaucagaaccggcaagagcagcaucaugagaagcgacgcccccaucggcaccugcagcagcgagugcaucacccccaacggcagcauccccaacgacaagcccuuccagaacgugaacaagaucaccuacggcgccugccccagauacgugaagcagaacacccugaagcuggccaccggcaugagaaacgugcccgagaagcagaccagaggcaucuucggcgccaucgccggcuucaucgagaacggcugggagggcaugguggacggcugguacggcuucagacaccagaacagcgagggcaccggccaggccgccgaccugaagagcacccaggccgccaucgaccagaucaacggcaagcugaacagacugaucgagaagaccaacgagaaguuccaccagaucgagaaggaguucagcgagguggagggcagaauccaggaccuggagaaguacguggaggacaccaagaucgaccuguggagcuacaacgccgagcugcugguggcccuggagaaccagcacaccaucgaccugaccgacagcgagaugaacaagcuguucgagaagaccagaaagcagcugagagagaacgccgaggacaugggcaacggcugcuucaagaucuaccacaagugcgacaacgccugcaucggcagcaucagaaacggcaccuacgaccacgacguguacagagacgaggcccugaacaacagauuccagaucaagggcguggagcugaagagcggcuacaaggacuggauccuguggaucagcuucgccaucagcugcuuccugcugugcguggugcugcugggcuucaucaugugggccugccagaagggcaacaucagaugcaacaucugcaucuga
